United States Patent Application Publication US 2008/0114160 A1 - sequence listing, part 48

SEQ ID NO: 13468 - DNA, 3421 bp, Oryza sativa
tccttaggatatcccacaaagaagcatttatctgatttaggtgtgagtttgtctgattgcaaacgttttacatagaccacacagccccaaatctttaggaaagacaaactgggacgcttcccagtccatatctcatatggtgtcttatccactgattttgatggaaccctgtttagtgtgaacgcaactgtctctagagcgtaaccccaaaagcttagcggcagatcagtttggctcatcattgatcgtaccatgtccaacaatgtacgattcctccgttcagacaccccattccactgaggcgttcctggcggagtgagttgtggaacaattgcacattcctttagatgattgccaaattctaggctcaagtactttccaccacgatcaaatcgtagatacttgattgtcttgcccaaatgattttgtacctcattctgaaattccttgaacttttcaaagtactcagacttatgcctcattaagtagacataaccatatctactaaagtcagcggtaaaggtaataaagtacccaaaaccacctttggcagttgagctcattggtccacatacatcagtatgtactagtcccaatagttcacttgccctttcactttgacccgtgaaaggtgcctttgtcattttgccaagtaaacaagattcgcatgtctcaaatgatttaaaatcaaaagagtgtagaagtccatctctatgaagcttctccatgcgtttctcatttatatgacccaagcgacaatgccaaataaaagtgggattcaaatcattaggacgttgcctttttgcattaatgttatagactgaacatccatcaagattcacaatgtataagccattcatcatgggtgcatggaaatagaaaatgtcattataatagactgaacaatcattgtccacttcgcctcttgctaagctcctacttcttttcagcccctgcaacgatttgcatatgtgagcaactgacccggtatcaaatacctaagaatcagtagaggaagtagcaagattaatttctataacattaatacctgaggtggaactctttccatcctgctgcttctgcttgaactgctctaggtatttcttacagtttctcttccaatgacctgtctccttgcaaaagaagcactctgcatccttagcgggccctgtcttttgaaccttggtcttagagttgctagtactcgtgatctcatcagagtttagctttctcttttgacaacttttcttgttgttgggcttgcgcttatgcacaactatcacatggttggagtttttcttaatgctttcctcagcagtctttagcatcccatgcaattctgccaaggtcctgttcaggttgttcatattgaaattcattatgaacggctcaaagctgggaggtagcgactggagaatcaaatcagtaaccaactctcggctaaggggaaaaccaagcttatccagactctcggcgtaaccaatcattttgatcacatgtgggctcattggattaccttctgctagcctgcacgcaaccaaggactttgaggtattaaacctctcagctcttgcttggtcctcaaacatgttacgtagtctcgtgattatcgtatgagcatccaatgcatcatatttcctttgaagctcaggggacatagtagcaagcatgagatagcttgtatcaagataatcattgcatcgcttttcatgctccctacgttgagcagcaggagcattgttgggcaagttagctggaaaaggctctgtaagcacaaactctttgtgctcttgcctgagaacagttctcaggttgcgataccaatccatgaagtttattccagtcaacttctctttctcaagaatagaccgcaagttaaaattggatgatgcaggagctgccatgatctacaatagaaatatatgtatgcaaaatcagcatcatgtttacatttaacctttcattaaacaatttaacaaaagatacttccactatgtattgtgaaacaaaattccctctagtaacatagtgagtcaagatcctcattttattagtgtctagtgagctttggcatcatagctagacaactatcaaaataggtaagcaacaccttgctaatcacatcatatgtgactcttgtgctgttggggtgacatctccatgtccaacccaacctatgccccaaggtccaaaactgttttaataaccttgtcaagtaaaccaataatctccgcacatagatgtccgacatctatcctattttatcatgataaaaagtgacactttgctatgacaaacccatcacttatgatcacaaccgtattaggtgcaattactggaagagcataaatcacacttaatttttctgagggaatctatcctaccatgtcatatcaaatatacaacagcagtaaagtaagatagatataaaaaccccaagcgaaatctaaggggcaacgcacacggcggtacatagatctgagggaatctatcctaccatgtcacggggtacatagatctcatctacgattcgccatgtgaaaaccttaacggcgtaatcgaattatgccgaaaccgagtcaatctcactggctcattttttctcattggcgtacggttccagtggacatcggactatccgatgaacacaatcgcgctcagccttggtgagtactagacattccagtgaagtcaccaacccatgcgactatcggttcatctcatcaacccatgcggctatcggttcatctcatgttccgatcacctaagaactcatatacaacataatagatctcatctactacacccgcatatcaactatatgcaatgatctagatcataaactatacaaggcggctctgataccactgttgggataagcgtaagctacgatagcataaatcaaacatttctatcgcataaaccaggaaccaagcaagtattagatcatatatcgttaccactcgacgcgctgcgcagcggaagaagacactgagaagtcgaagaaactctcgcgaagtagcacgcgtcgttgtagaggaagtagtcgatcgcaccggctcgaccttctcctcctcgtgcgttctccttgccgtactcctacgctgatcagcaccgcaaaccagcggcgcctctaccggtatccacacatacagggacgaaacgccacgcgcagatgtgctagcacccgcgcgcggctagggttttgctcggggagggaagtgacggctagggtttctcacgtgatgcaatgcctccaccggtcacacccctcacgaatatataggatccatcactcgggcctccaaggcccgtaagactcctatttggatccctatacgaagtatgctcatattggatctccatccaatccccttagtccggcccattaagcgtgcgaccctgtaggttcatgtatact

SEQ ID NO: 13469 - DNA, 616 bp, Oryza sativa
cgcccgttgctgcctccgctgcccaagcatggtagctcgcaggacgtgctcgccgtccaggtcaccgtgttccctcgcgccggcatctgcgtcggcacgacgctgcaccacgccgtggccgacggttccagctacgtgcacttcctcaagacgtgggccgccattcaccgcctcggcgacgagcgcaggaaagcggtggtggtggaccacacgccgccgctgttcgaccgtggcgtcgtgcaggacggcgacggactccgggaggcgtttatccgcgacctccgggatctcgtggagtccggtgacaagcggctcgacgactgggacctcagccggaggccggacaccgtgctcgcgacgttcaggttcacggacgagctgctccgcaagctggggaggcatgtcgaggcggagacctcggcgcggtgctcgccctacgcgctggcgtgcggcgccgcgtgggccggcatcgtgcgcgcgcgaggcgtgggcggcggcgacgtcgcgcggttcgggttcgtgaccgggtgcaagccccgcgtgagcccgccgataccgtcgagctacttcggcaactgcctggggctgtgcttcgtggaggccaagcgaagacccc

SEQ ID NO: 13470 - DNA, 700 bp, Oryza sativa
ccttttatttgatgagatacagtaattgttgtggacttgaaagcaaagttatgagttcatcacagtacaaagggacgatgtttaatttttaagccaaaaattgtaaacatataattgttctgtagtggcatgtaaatgtgttagttattgcagtttaacacttcagcattttgtttcttatggcatgccagtacagcagtgtttgtttctatattcataattttcttataactactatgtgtaaagatacactaataatttgtatttcgtgtattagtccaatagttgaggtttcttatctattatctgagatggttcagcacgggcttcgctgcattgcattctgtaaaacaaggaagctctgtgagcttgttctagcatacacgtaagaacccattttcttctctgctattcatttttgtgttgttttttcttgttttacattacttgtattcacttatttcttcatatgtcattttgtattgtaggcgtgaaattcttcaagagactgccaaagaattggtagatactatctgtgtatatcgtgcaggctacattgctgaggtcagtattctgttctgtctcacctaatgtcttctttcattgtacttatcaaattttttattgtttcttagaatgaattttggtttgataaaatatgcctcatttagaatttcatcgtgctctcgaactgtatgga

SEQ ID NO: 13471 - DNA, 715 bp, Oryza sativa
ttctgcggcactggagactggaagataccacctctccttttgcatggtcaacttgatggtgcggctggcgcaatcaatcactcctctgtgccttgccaaccaatccattccaagtatgacatctaggtccttggattcgagaagaatgaggttggctggaaaaatcaacccttgaatttcaactgtcacagatgggcagtagtgagttgtggtcatgccacctccaggagtatgaactcgcattggtatcttaagcttcactaaagataacccatgtgcaccagcaaaacgcttggaaatgaaggaatgggttgcaccagaatcaaacaatattactgccggtgtcgagttgacggggaatgtgcccaatataacctctggtgctgactgcgcctcctctgcagatgcatgattaacacgggcctgaacgaacttgggtccagcacgtcttggcttcgggcactttccaaccgtgtgtccgggtttgttacaattgaagcagagttcgggtttttctcccaacctcttgggctgttctggcagagctggctgaactgattgagctggaatctttagtgaactcggagtagggttgaggctgtgctgctcactgttgttgtgactatcactatggtgggtcttattgaagctacccgggtggtagggacggtgctgtcggataatcatggtggaaggtccaccgtgacgtcccatc

SEQ ID NO: 13472 - DNA, 593 bp, Oryza sativa
cttcagtgcctttatactcttgccaacgctgtgcccggctcctcgcttctcgcgccctctatttcgccccctcgtttctcgcacccacgcttccactaatcctattcgcccgcttgcggcgcatgaggtggatatgcggttgtggcagtcgagatagatcatatcgtgcgcgcgctaattacgctcgccgaccgaagcgacgttaccatatctccagatgaaacgaatcgccatgtccagattcgtgtgctactcaagtaatgtggcagtcttgaagagaccgctcattgttgacagccgagttaccattgccgatgtgcgtggtttgtgaccgttgggtttctgcccaattgtggagaccggtcccacctgtcaccaggccttaggagtggcgtcatgcccgaccgtttcccttaaagagggcgatcgccctggcataacgccgggggctactgtcggtgacatgggatcaggagtatcatgactggaggtttgaggcagacacaatcgcacacgtggcctggcacccccgagggacgtcgggcccgagggtgatgtgttcgccctcctcttagtccccccgagggggtcgg

SEQ ID NO: 13473 - DNA, 505 bp, Oryza sativa
gctgcacacgtggaaaccacatggctaccaagcgtgcacactaacacggtcaccacacacacaagcgaatgactaccgacaccggtacacaggtaccggggtcgacaaccgcacaacgggcatgggcgacaccgaaaggacgaggacggggcagtgagaggacagatccttaccaccacgcgacgaggcgtgggaacgacgacaacgaacgggcgcggctgagacgaacggcgagaagacgacttcggcggcgatccttggatgaaggcgagacgcggccggcacaaggcttggcgacgcggagccgaggacgaagacgatgacggggctgcggcacttgacggagcgaggacgacgaacgagaacggcttgacggagggacgaacgccacggcgaccgggaacgacgggaggacggcgacgatgacgaccggggccagcgaggaggcgatgtgggcagccggcagtggctggacggagacgaggacggcgtggaacacgccgtt

SEQ ID NO: 13474 - DNA, 34906 bp, Oryza sativa
  unsure (1)..(34906): unsure at all n locations
ttatctgaggaactaagttcctaatttgaaaagactcgaaatttccactataggagcgaattttagattggatggttaagaggctaagtttccaatttaaaaatagtgcatatatttagttagatgtagagccgggcctgggtaaaaaatatccttctataaaaaatatgaaacggcgatgaacttagaaaagaaaattcagacattccaggatcgattcttacgctggaaatgttcaaaacatccatccaatttaagtagaatttgttcattaaccgatcggattccgaatcatcagagaaacaagcattttcaggctagagatgtatatgtatgtacctttgcctcctcctaggacgtgatgtagcgggttcgtccggccgaagagccgcttcttcttggacttggacttgtggtggtgcttcttgtcgtcgtcggagtccgaggacgaggatgacgacgatcccttcttgaactcatggatcttgtcgttgatcttctccagcagcgacccgtgctcctcgccttcggacatcattccctcccccctgatttgatttggtacacaatggcaaacgaaacatcaaatcgaggactgaaatctttttccacacacgttaatttattcttcagagaaaaaacaacaacaacaacagaagaagaacaatacaatttgtctaaatccaacgccaggtgttgcattgcattcacaaagaaattatcaacaacgcaatggtcaaagatcatggacacttacagtgagacacaacggtttattaccctctctcgctcttcacctctatctctgtgtgtgttcttccttgaaacgaaggaaagcctgtgtttattctggggggttttgttcacctctcatgtctctctatgtagcaatgacactgtttttttttctttttcttacgtctgggtggcgtttcttggatctgcggggaggaaaccgaaatggcggtcgggaggcaaaggcggggggtggtgcgttatctgacgccgggaccgttaggatccacgtggacggttaggatttcgccacgtgggtgctatggacggccgggattgcggttcatgggcggatcgatcgatggccggtacggcgtctcacggggcgccgcgagtatcggcctgcagagcgtgtggccctccacgtaacaaggaggaaaggagggaaggtctaaggttgaaaacggtatgaaacttgtaaagtgttggctactgttttcgtcctgtggcggaacgttatattttgattatggattgttcgaaaatagaatggaaatgttatggcgatttttttctggtcattttaatggtatactgttttcatatgaaatttttcagaaattaccgtaatccttacatcttgtcaatgttggtatacccccctccgtccaaatatgattagtgcgtaagggagaaaaatattccgagtttgatcgtcgttttttcatgaatgctcgtagtgtctctagcgagaggtgaaatgtcagagacgggataagcatatccaatggagacataggtaataggaaacacaacatgtgtggaaacaaatcgacattgcatgcagctcctgatatgacgagtataatgttagttattgtatatgtgggggcattaactctttcttggtcttcgtgacaaacatatgccctatcatatttggatggagcaagcataatattactatgaactattaagtatttattaattatttttggctatgaattctaacttgatctacctacaaaacaagggagaatttactacttgctatcctccaaaataaacatgcccaaatgctactttctaaaattttcatgttctttttgctacccgggtctcaaccttcttcactttttggtgacgggcactataccagatcagtccatctgccatgaacctaaggctgtattcttctccctattttctcaacccacctctctcgttttccgcacgcatgctttttaaactgctaaatggtttgatttataaaaaactttctatatgaaagttaattaaaaaaatcatattaattcatttttcaaaaaaaactagttaatacttaattaatcatacaataaaacaaacttcgatttgcatggaggggaggtggggttcccaaccacctcctccgatgatctcatatgtgaaacctcgagatacacaatggattttctattatctttttacatcctactacaaggagagcctatacaggattgaaaccacagtttgcacgatgtatttgaacaggagtgtttgatcgatatgagacgagaaaatccaatcgctagctacgtacacgtccgaattaattaccagcggccatcatggccttgaattcctcgtagtcgacacggccgtcgctgtcccggtcggcggcggcgatcatgtcgcgcacccgcgccatgcacgcggcctccgggagccccatccgcgacagcacggcctgcagctccgccgcggagatgtacccgtcgccgtcctcgtcgaacaccccgaacgcctccctcatgtccgcctccttctcctcctccgcctccgccgccgccaccgcctgacgaccacccaggccggcaagctcggcgtggagcgcctcgaattcggcgaagcggagccccgccatccccggggcaatgtacgccgcgacgaccgcgtcgagcgcggcggccgcgggcggcgcctccccgcgcgcgccgagccggcacagcgcgcccgacagctcggccggcgtgatcacgccgtcgccgtcgcggtcgaacatctcgaacacgcgccgcagccgcagcgtctccgccctccgccggtgggccgcctgccgctgtggctgcactaccgacgccggcgcccgagatgctgcggcgctggccgtgagaacggacgagggcggcggaggacgcagcatgttaatggagcgctacttggttttcaccaatgtgtgcacgtgtgtacggaagcctagtttgcttgccttgttgggtcatctaatgaaagagcatcatgtgcgttctcgcgtggtttattttatagagcaagtaaaaatgtaaaatggaacagggcaacgacgacgacacgtcgagggtactactggagtagcacgttgttaacttttttttataaatatttgaccatttattttattaaaaacttttgtacaaaatataaaataaattaagtcatatctaacatttaaaaataaatcaagtcacaataaaataaataataattatataatttttttaaataattaaatgtatcttaaaaacgttatatattaaaaaaatgaagggagtagtttgtttgttcggatatatatatgtgccaaagagtggtacgccaggtacgcatgcgcttgaaaaattcttttttgttttgggttatgttttttatatttatcgtcttaatttttaacagttagtggagacaggccgcggtcagtggctaaaatattttatattccttctaattcatattattaatcgttttgatatttttcatagtgaaatcttagtaagtttgacaaatttattttttttattaaaaaatttagcaacatataaaatatttatatccattagttttattagatttaatattaaatatattttgataatatatttgtcttatgttgaaaataccactgtattgtttttataaatttgatcaaacacaaaaaaaaataactaagaaataaaattaaaatgactaataatataaaactgaaggacaacttgacacgtacaactagctagagtacgtagtacggtatggaaaaacagcggctgtatctatccaaaatattcagctgctgcttctgtacgatttttactacttctggaggaacactgtttaatatattttttatatagcagggccggtcaaatgattagttgaccgaattctattaagctaataaacctgcacaaagagggacataaagtaatagtattttattttattattccgaattttataatttaccacttgatatggactcttgatattttatagtattttacatggggacttattatattttttattccgaattttactgaaaattttattttattttggagttttgtattgcgaccaaattacttattttattttatttttattacgaattttaattaatccatattattttatttaatatgtttttttgagaaaatttcttcaataggttggaatttgtatgtgaccatattattatgcggcgcacttaagagtgtattgacgtgtaagcatacgtgtaaaaaaaaagagagtaacatactaacatattaaaaataacgaacacaagaagcgtgagccgacaacctactgctccattaaacataaaaacctaaaacatgacaccttcacctcgattttttttgatatatattgagagaaaaaaaaatccaaaaatatcattaacaaacgtccaagttcaacacatatcatcgatgagtacgagttttaaaaaataccacccgtacaagtgactttgtcatagaaatatcatcgtcgtttcgtcgttagggttacatacatcctgctccgttaaatgcacttttttatcctatagcatctaacataaggctgcaaatgaaatcctaacaacgatgatatttctaggataaatttacgtgtacatttcatacaacttgtagatatttattagagcttggtaattttttttttggattttctcatgtattaaagccagggaagtttccgtttcactactatagagattgactttggtgccgattatggccttaggtgccggattctcaaaccggcaccaacatgcggcacaaacgaggaatcttatacatgcatgtcaatacaccagtacatcttaggactaggagtatataaagacgtacgtacttgtgcatggaaattaacctagcaattcatataccatcacatttaatttccttgttctagaggaaaaaacaagagagaagagaatgacgacgacgacgaacacaaacgcgtctccttttgtaattttcgtaggaaacgcaagcaaagctcgttgttggctgcatgctgaataaaataaatagctttgctcaagtcgttatctatcagtctaccatttccatgctgtgatatcttatgtatatataatatatttggtcgacgcggcctacacacggttcaaccgcgttggaagaaataaattaaaatggaaagatcgacacggatagggacataggaagcttcgctgaagacgatgatccaagagctaggtagcttggctttggaggaaatccatatattatcaacaaaagtgtatatattgtaatatgcaacttttgttatagcattaacttacaaatgtggtttggatacacattcagcttttgttatagtattaacttaattaaaaagtgtatcctaaaacttagttcttttcttcaactccttttttattagcttttcaaactgtcaaatggtgtgtttttaaaaaagtttctatatgcaagttgtttaaaaaaagcaaataaatccatttttcaaatttataatagttaatacttaattaatcatatactaatgaggtttctcgtttcgcgtccgcaaaaaatttaccttctttttgaagcatcgaacggggccttggaaactttagttatatatagtattaacttaaaaatgtggttcgaatacactttcaacagtgattttggtgggtcaagagttttcatctctttgagcatgtattcattaattggtgtgtacccgtggtgtggtgtgcatgtgtagtggagaccatgcgcgtctataataaaaaaaaacagttatgctatatatatatatatatatatatatatgttggcacacaatttcaagaaatgaatagttttggaactgatgcaatgcttcatatattgtacagctttggtggattaagatatacttgtatttttataaagattatctggcacaactatttcatgttcgcatgatcaaagatgttttagggtagtcctaaccctccacatctaccaatgtccacagaatttatggctatcatataaacaaaaatttgatgtgacaaggaaattaggggtgagagagagagaagagaaacagtatgtctcatgcatgaaacgggctcggcgtacacaccaaggcccaagaaacaagagaaatcagcgttgggggcaactcatcgtttcttccacacacccggattttactcgagctcccaatccactgttcttgtctccgtcccacacgccagcttcttctaccgtgcaccgaatcctcacgaaattttggcatgttcccaagcctcttggtgccaacatcttgctcaccttctctctatctgtctcgccgcctccattttcccccaatcacccatcttttccaatctctctctgcttgatagctaaaatcggacaaaataatcctcaatcactcatccctaagaaataagttgtcctaagccatgtgcaaggatgaatacaacagaatgaattaaagaagtgccaatccaaatccaatcatgccgccagtgaatactcgcccctgttctagatgttgccggtgctccagacacaactactcttgctagtggtgctttacgagctagtggtccagtcgtcggttttcctgcggcacatgctcatgccactagtgcatggtggccagaatagtctcctggcaagtcagaatggtatggtgcaaattttcctcccaaagacataggttaatcaatgttgttagttaattaatgggttatattagaatgacattttttttcacttcaatgaactcctgctagtttatttcttatcatatatacctatgttgagctcacttagttactagcaatttcctacttcgaggttgagtgatgtcaccatttattttcatccattggatccttctgctcaacgtagcagattgctccctcaaggctttctctcttgctctgtgagcctaacgtaattccccacatggtccagccagccagtcaacaaccttttccccttcccctcccccctagcatcgcaggcggtgcattcccttccgttcgttgcgcatcaccaggagaccttcgcattgtgcgttgccaagtccctccccttaggatttggatcgtttgccttcatagcatgaaggcacgagcatgcagttagcccatcatccacagttcaagcaatccaacagttcacgttgcatgtggacttaacaacatctaaattgatatcggtctatcaagcaatcgaacaactcactttggattacttgaacggttgtgggggggttgactgcaagctcctgccttcacccccacgaaggtagacgatcaaaaccttctcctcattgattcgcctcttcctccatcaaaaaccgtcatattgtttctcttctaccatcccaagaggtatatcaaaaaagagtaaagtttagttttatatttatccaccaaatatgtcttagttccaccaaatattccacacccacatcttgcatgatcttgatcagaagtatgttttgctatcttctttggtcaagatttttgacttagtaataaatgtgaatacaagtgtgccttacttgatccctaccaaactccacatatttgaccttagagtagggacaatggcaatatcttggtgaggaatacaattatacaccactgagggactgagagaatcatttgaggaacttgttttttttattggaaaaaatcatttgagaaaatctccggaataaaagttagacgagaaatgggtgagtagtgctttactaactgttctgtctctcaaccgcccaagacaaggtgaagcatgatgcctcacagtttaggcgtatgggtaagacaccatgctgactggcatgattctggtaagagaacccatactatgcatttttaacattctagatatatagcattgcagcaactcctgatttgtttgtttcatttcgtcctttactcgggacgagcaaagattaaagctttgggggggggggggttgttgacggtcgttatcgaccaatttcgaccgtcagtattacccagttaatgaagactagctatgcttgcaatgcataatttccaattaaaatatctacttccactatgtgctatgatactaacatatatgcaggataagcatttataaatggaggagaatcgacggaacataaccgaacaattaaatgaaatccatcgagaacagacttatgggtggataggcctctaaacccattaaaataatatcaattgggaccaagcactacactactgagccgaggaatcaacaaggagtgcacttgccgagttgtgggctgttgggacaggctagggttcggccgaaccagcagctagcccaatcagcccagtttttcaccaactggtagttatcaacgtcccaaggcggttgtgaccgtttctacctgaagaaaccgtcgctggacacttggcgcaaggaggtgaagcaagagggaatatgctcattggataccttgagcatctccacactcccaaggcacctcatggcctataaatacccctcctctcattccattcacacacactcaagaagaagatcaaagagctctctcaagtttagtagtgttctagtgctagtggagtaggagatataataattttcttagtcctcgagtctttagtagggtatggctctagcagcttttctatcttcctttataagacttattaaattaatataatattcttctttatatatcttcggtattttatcccctttatattatttgagtaccgactttattttatacttgtatcgatatagttgtttagctagcttaccagagatgtgcattggtgtgggtcatggttgttaagtcaaacgaataatcgtgctcagatcgattaagtcgggtgattttgacagtgatggtttgttggcccatacattgggtgggcactgggccatatattgactagctcattaaggggatactatagcaaaaagagaaggaaaccctagtcccactcccacagccgccgcaaggcaatcagcagaaaaagaatagggacccgatacgagcgctggctacacaggcttgtgcgctggcgcctccagccaactcctccttcccttttgctttcatcctctctatctctggcttttctcttctcccatcccaaatcactggtgttgaatgcaactggtgggcaactgcaattgagttcatccattaggaatcaacctcgaggttagtttcaacttctctccttttccctaaaggtttctatggtctcatgctatgctttgcttactctttcttgctggttgctttgctagttctcttctctcactatctcatactctgctgtccaatttattggcctgatgcaagttgttgcctgctctagtgctctgctagatgccatatgccctgcatagtatatgtttgttggtctagtagggatgcccatgtgtgcttgctgcaagcctacaatgttgcttttgctagtgttgtgtggaccactggactagtggacctgctacttttgctagtgctttgtactatctagtgttattatattggcaagtagccaagtgttgttgctttgctgtttgttttattcatttatcttggatggcttttagtgatttgtcgtttgtgccatgcttgtgctgtggttttgtacttctgttagtaacttggtcttagcaagttagcatactatattgtcaatttgtgagctaacatctagcacaaatataataatttacaggtagcatggcagtgacaacgatggatcaagctaacggcgttcaaggccagaatgggagcaatgagctgccctatgatccaaagaaggaccctaaatggaaggccaactcgaaggacccgggatggaagtatacattttatccggatttggaacataaaaaaaaatattgcgatgtgtactttgtgacaagaatatggtttgtggaatatcaaggttaaagcgtcacattcaaggaggtcatccagaagtagaaaaatgtctgaattcaacttaagaagtgaggaatgagcttggtgaccacttggcatctcattctaggaagggcaaggtcattcatgttgatatgatgatggtgatgaagatggacaggttgctgcagaccatgaggaagaagtggctgtgcaagtcaagccacaagtaaagaaaggtttagctacaatagctgttgctactatgttaaagatatcagagccacccaaaggtggtanatctgtgcttcaatggttcggaaaagcccaaaagaagttgtagaaagaaggcatatgaggggtccttctcaaagaaccatagcatcacaaagaagatggagaagatgagagttgatgaacatgtgctgatttttggtatgaatgtggcattccatttaattgtatcaagtcaagaagttgggagattttgtgtgggtctattggacaatatggtcctagatacatatcagcctcttatcatgaccttcaggtgccattgcttgaaaaggcaaagaagaagacaaattcaataagagaaaagcatgaattggcttggcaagaatatggttgttctctcatgtcagatgggtggatagacaaaagaaaacgtcacttagtcaatttccttgtcaatagtctagcagggacattcttcttggagtctattgatatattacacctagcagctgatgcacaattgattgcaaatctattggagaagcaaattgatattatccgaagaaattatgtggttcggattgtaagtgacaatggttcaaattataaggcagcaggtagacttctaatggaaaggattccaactttgtattggaccccatgtgctgcccactgcttggatctcatgttggaggacattatgaaaattcctatgttgagcccttctattgcaaaagccaagaaagttactacatttatctatagtcacagtaggcttcttgatgctatgaggaagaagacaaatggagccgacattgtgaggcctgcagctacacggtttgctactgcttttctcacattgcaatctatgtggaagcattgcactgctttgaaaggtctttttgtggatgaatgttggactagttccagcttggctagaaaggaggcagggaaaaaggtttcttcatatgtgctgacaactgttttttggaatggggttgaaaattgcatgagagcatctcaggcgctgctcattgtgctaaggctagttgatggtgatgagagggcagctttggctaaggttagttatgctatggaagtcgctaagaagaagatctagagcattctttgtctctcaaggcaaaattacttgagaaggtgatgggtattgtgagcaaccgatgggattcccaaagggatcagaagttatatggggctgcatacttcttgaatccaaaaaggttctttgaacttaagagtgaccttgccaatagaatgttgtgtactaagctgaggcatatgttcaatgaggtgttatggaaaatggtccctgatgaggcgaaacaaagcaaaataagctcgcaatctgatgattatgtgagagaggagggtgaatgcttctcttctaagttggctcaagctgacaagacaaagaaaaatccacgtaagcatcctctttttttgtttgttttttgtttcaatctggctaggtgtaagtgtatcaacttgccttttcttgctgttctttggtggtcagcttatggaggccttgcttttgagctccaaactttagcaaagcatattgttagcctttgttgctcaacatcaggatgtgagcgtaattggatgccactactcgtgatcatactatgtaaaaacaacttcaatcagatctgattgagcatatctagcaaaagtttgggaattcaaaccaattaggtgactattcatcatttgaagtttaatttacaatctctatgttacatagagatagtatgcttcatataaagttgcaaactcgactacattttaccctagcagtaccaattcagttaaatatgttctctcttttttttttgatgtgaagcttccgcattattttgatattgacttgtctattactctttttttttaagattaggtcctgctattttggtggtgttgtgctgttgtatgaaatactcatgactactgaaattttttttccttatgttctgcattgagtccattatagtgtcggtgtgtgtggcagacttgtggctacatatgtttctttattttggtgttgcggtgcatctggacgaactactaatatcatagagactaccaatttgatgaaccctgagctccactcgagacactcaaggctgttgttggcccgatctttcggtgagttgatgataactacgattttggagaaacgttgacgacccgactacaaccatacgagacgttgttgtgttgcgccttagcgatcgatacacctctccgtgggttgttgatcttgccggtgcagatcaaccttattcctacaagcaaatctaagaaacaagcaagaacaagataaaagcaatctgaattgcagataggaattgaatacaaatgataggttggggttccgtaacgagtaaaccggtgatctaaccgatcacaggattacacggcaaagtagcaaagttaaactttaatctaaacaaaactcgagaaaccctgaaggggtacctaactatattanagaggtaggaggacgaccaaggggactctagggtcgtgctccactttgttggggtgcaccccacatgggccctccttgggccggggttccagacgaagttacaagcccataggcccattataggtgatgcaacaccttgttactttaattgcggctcactaagatggaatttcgcaatgaagctggatccgttggaaagaggactccgagatctttccatcaagtactcacgggctgaaaacagagctcatatggagatttcgcggccgtttgaaatcagcagtgcagcaggtggccgaattggattccagcacttggaggccttgaccttaatgtcttcttgtccatccatgatgtgagcaatggttgtatccgtagtagctatggtcacatcatactccccttcttcatggaaaaccgtcctcggtttttccatatggtgctcttcacatagtccattcaaaataacatgtttcatccaatcaagactagagaaactcgaagtagtgtgattaggaataacatgtttctctaaatccgaacaaatgaaaactctatgcaccaaatatatttttctatcattatattcatcaaagatatgaaaaatagcattagttggacatggcaaatcagacttagcaaataatttctcctccaaattattgagctcacaaaaatcatcaaactgaacatagcccaaagtatttaaagaagttatcaatttacgttcctcaacatcattagcaatgtgaacaacatgcttaaaatcagcacacaatgaaacactagaaatagcaggttcattcactagttgtggcatggatttaagtgaagcattatcacacaactcttctttatcacaagaaacagcaagtaaatcaacttgtaacaaaggcaaatcagaagtagtttccaccaaaatttgctctagattagcatggatagtggacaaatgtgactcatcagaagcacactcaccttgactaatattagcaccatttaatttaccttttatgccctcttcagataatataggtgcatcagtcttttcttcttccttcgtgagcgatggagatggcatctcgagcatattgctcttctcctcatggtgaatgttctgagctccctgcaaaatgtcagtaataggaagcacaagcataacctgtttctcccttgggttctttaaaatattgctctcaacactgcaagcaagcatgaacaagtggcctatatgattatatgtcacgttaataagcccaacgtgaatatcggaattaagccctctaaaaaatctagtcattatgttctcattgctttcttttaaaccactataagtgagacaaattttaaagttatgaaagtactcccgcacagttttgtcaccttgttttagatgttctaatttctcaaggagtatgaaaacacaaaagttttcctcatcattgttttgcattcatcccaagtttcaagcttattgccaacagtataccaccaagaagatgcagaaccggtacacttattactagcaaccttaatcatttgagcattagagaaatcatactcatcaaattgtttgtctaccgctagctcccaattaacataagcggtggaatcatacttaccatcaaaaactggcaaattagattctacccttgcaagatcattatcatgtacctcatatgctatgcgtgaagaagtcgttatatctcgttgatcgtgaagaagtcgatgttgagcatgaccatctcgtttccccttgtgcaatcctgtcatggttagtagcaaacaagaaacatacacaagaatatgcacgctcctatcaactacttggtagtggaagctccaatatcacacacactcaagcttttttaccaagctcttacaagttcttaccaaagcaggcataatggtgacgtacactgactcaaccaagcaccccaatggaggttcgatgtatcgaggccttggcaaacacctgctgtatggctgcaatcaaatctgtggagctctgggtaggcttaaatatgtagcaaaggaatagcaaatgttcaaatcagagaatgcaaagttgaataattgttcaaagtcaagtaccgtactggtcctaggctagaacgtaccagagacgcgagcctacacacaaacggtaccacaaaatagcactaggaacaacttaagcacactgatatatccaagcgatccagaagataacaagtgattttctcttttccttccttcttctctttttctttctttctttcttcttcttttttttctcttttttttgtcggtgcggctttttcttttctctctttttttttccacctttctgcctttttttttcttttttttaacaaaaactgactcaaggacatcaatgtaaggtcatagggacccaaatgtaaatatgaaaattacatggactcaactgtaaaagtcaaaaccaaaattataaatcatacaaaaatggaatgctgaatttatactggttccgtttttccaaacagatctcgaaaccgacaccaaacaaaaattcaccaaggtgtctagcaactcaaattgaagggagcgagtcggactctctctagtcacggtggtgatgggtacggtaggtcgaagggttcggcctgcccccccacaagtggaaccgaatccaataaaaaaaaactttccttttcttttctttcccttttttttcctttccttccaccccaccgaatccaaacagatctgctatattcctttcttcttcctcgcacacacatgcacgacacaccaccaaatagaagctatgcaacttgagaattcaaaaattaaccgacagaaacttttgaaaactacaaaaatagaaccgtggcagtgagccgattccgttttcgtaggtcccgacgacaacagagacacggaggcgacgatgactgtggtccaaaacgtgactagaactcaaaactctaaacaaactagacgctatgatcagcaacacgacgtgacgacgcaacacaaaactcaacaacgcaaaaactaaaaagaacaatgcaatggcacaaagatggctaggtacatgatgcaatttttttaggcaattttctggttataggtagataaaaactcaccgagcaacgaaagctctgataccacctgatgacccctgagctccactcgagacacttaaggctgttgttggcccgtctttcggtgagttgatgataactacgatttgggagaaacgttgacgacctgactacaaccgtacgacacgttgttgtgttacggctgagcgatcgatacacctctccgtgggttgttgatcttgccgatgcagatcaaccttattcctgcaagcaaatcgaagaaacaagcaagaacaagataaaagcaatctgaattgcagataggaattgaatacaaatgataggttggcgttccgtaacgagtaaaccggcaatctaaccgatcacgggattacacggcaaagtagcacagctaaactttaatctaaacaaaactcgagaaaccctgaaggggtacctaactatattaaagaggtaggaggacgatcaaggggactctagggtcgtgctccacctggttggggcgcaccccacatgggccccacttgggccggggtcccagatgaagttacaagcccatatgcccattacaggtgacgcagcaccttgttgcttcaattgtggctcattgagatgaaatttcgcaatgaggctggatccgttggaaagaggactcctagagctttccatcaagtactcatgggccaaaaacagagctcgtatggagatttcgcggccgtttgaaatcagcagtgcagcaggtggccgaatcggattccgacacttggaggccttgaccttgatgccttcttgttcatccatgatatgagcaatggttgtatccgtagtaactatggtcacatcaacctatgtttctttttacctgtgtttgcgttctatcattttggctatcaatgtctctcttttattgtactgagatgtatgaacatggaaatttgtgttgatatatatctactagtttctactcgtatatgcactgatatgtgttagtttcttctcatttactcagattagcactgatatatgctcatatgttgatagtttgacacatacagtacaatgtagctactgattttgatctttggatgtatgtgatgcatgtcacagttgatccttctccatttacatgacatgtaaagagttattaaattttcttctctacagaaattgctatggacactatgcgttgggagatagtgtcaacatatatattattatgctttctctcctctagacactacccatcaatggtgggttgggattgcccttagggttgaatagggatttttaaactaagaacaacaattagatcctagttgcaatttatataagagatagcctagtgtatctaggttgactactgtgactatcttgcaaaattaaacaagtttttacaacctagggtcaatcctagtttggaatgtcaatactaggatgtatattgtgataggtggaaaactgcaaatagagtagagagagaagttgacgacgcatgccgagttcttctttgaggtttcgaatatttggcaatttttgctagttcatattggagcactctacaaaaacaatattatgccatcatatatggtgtgtgctctttagtggtagcatttctcacttcggatagactagctccaaacccttgatatattgcttggatttcctacaatcaccaacaaggaagatcattgggtcctttgatttgtagaaaaaaaacatagaaatattgaaggaaaatttcatatgaaggcctttgaaacaaaggatttaattatattctatcctttgaaattcctatatatggaatggacaatcccataaagattttagagaaaaacttagcaagagctccaactttttgaaaaaaatttcctttgagtctatctttctcatctgattcctgtgttttttctgcaatccaatcaaacggtcatttttgtgtcttctgacatgttgcaatcctctgtattgcacttacttactttcttgttagaatctcgtgcttttccattcctacgattcaaagggccctcaattataactacaagaatttataggcatgtactaaaatgctaagagtaaccagacaaattttcactttactaacatgaagtctcttaaatttatggatgcatataatgcttataactagaacttagcctcattagcgtatgattaattaagtatcagctataaaaatttgaaaactggattaattttttcaaatcaacttttctacagattatttttttaaaaaaacacatggtttagcagtttggaaagtgtgctcatggaaaatgaaggggatgaagataggaagagggactgccaagcacggcctaagtttttcttccgttatatgcctcggagttgcaattgattgagatcagcattacttccttatataaaaaaagacatgataagaaaatttatgatcccagtcataaatttttgataagctactagtttaagagaaacaaacctaccttctactatatagttggtactcactaactcctaaatcttaacatgcaaatttgtcacatcatcacccactagcaattattatctagagtatcttaaatctcatgcaaacaagatacatcatttacaattttgttgtagttttcaaactcaacatgcaatctccacatcattttcacattatgtaaacatatacatctatcatttttataaagtataatatgcattcatctacatattcgagagcaaagcgtgaggtatcaaccagtgaagtaaacaagttaatacgtaacatgttgtagtgggacggttgggtatacactaaggactttcgaaagaggtacacactgaaaacaatgaaaaaaacacagatgtttagtactcgtacttagctctagcataatactagttaagtgaacaagttaattaatacataacatgttgcagtgcgacgattgggtatccagtaaggactttgaaaagaggtacacactaaaaacacagatgtttagtactcgtacttagctctagaataattttttcttagtacatcaaattactaactacaatatttagaacaagaactgcttatggttggccagttttaccttttcttgtttttgtcttgaaacaaatattgattaggacataatccattgatgatgagttaggtagatatttaaacatgggagaacattgttaaatattgtcggtatcatcataatcgcataagtatttcagtgatacgatttcgagctacaacaatatgaatatcaaaaaaatgatgtactcgaatagtttaaccgtttaacctgtgtggaccatagttggttagataaaatgatacatgcatgagaagctaagctattattaaggtaagggaaaagtttgaattaccccctgacaattgcgttagtccgaattacccctcgaaactgcaaatccagacatttaacacctcaaaattttcaaaccatacgaattgccctcctaatcgattttaacccggtattgcttttatgtggtggacacgtggcaatctagctaaccaaaaaaaagttaaagaagatgtgggtcccacgtgtcagccttatcaactcctcttcctccccttcctcctttctttctctctcatctgccgctgaggcgttgtgctccagctcggagagtcggtgaggcagcttccaaccgggtggtgagtgtgatcgtgtcggggcacacgacagcgacagaaatgaagtcggagggtacgctaagcccgtcattaggaagagctccaacctgtgcgggcgcagccacgggcgcttgcctgagccaccgggcgagaaaatggagggaggaggaggcgatcgagatcaggtggagggagaaggcagcctggcgatgatgctcaacgacggagagttgtggcgagccgtgtaatacgcgatgcggcaggagacgacatgggtgagatctccttgggagagctcgtggtcctatgatgaatcgtcgagccatcaccttcgcggacctccagcacggcagcaccccctccattccccaaccatgcaggctgccgcaaggccccttcacaacgcctcctgccccaagctagctgattgctcttctcctctccctccttggatctgccctcatcgccttctgcactctagaggcctccgtcggcaccgtcttcctccgcctgctcgtggaggccaccgctgccgcctccctctatcagttctagaggctggcactggtgtcgccttcctctgcctgctcatggaggctgttgatatttcttaacgacataagtagaaaaataattcccagcaatgacgtagaaatatttatggcatacttatggttacagatatgatccgcaagcgcacggatataccattgtagcatttcacccgggagtattccaaggtatcgtatttatttaatcccaagggaagatatgataagagagtactatgctaatagtttatatattacttgtatacatcaaggtcttatgcagaggttaagcaattcaaagggtaggtgacacacataagaaagaactatgatactctcactaaaatataatctaagctaagtggaggaagaataagaaaagaattcattcctatacttcggatatacatacacatttagtctacacttgttagtatactgtcatgcaaccaataccccctaacagtgccctcctagtgtttcgagagaccatcccgggttgacgagttccttacgataacctgtcatggtcgtccaatcggagctaaatacggaggagtaccctccccaggaatttgtcttatgaatatatactaacctggaggaatacccgtactgagctgtcaccatcagcggcccacctctactgtcccgcagcatatatgcccagatagtgatacttaataatctagacaccacgtctacattattaaatattactctatatcccccgagatgacataaagcaaccgagcaattggacactaaacccacaccattgcacctctctggtaggctagctatacaactatattgatacaagtataaaatgaagtcggtactcagataatataaatggtaaaaatattgaagatgtataaagaaaaatattctattaattcaataagtcttacaaaagaagagaggaaagctactagagccataccagaattctcctgaagacccgaggactaagaatactattctgattcctactccactagcactagggtactactaaacttgggagagtgagagagctcttcttcttgagtgtgtgttgagaatgagtgaggtgatgtccatttataggctggtaatgacggttgccgatgcaaattgtcggaattaccccgcaacctccattgagggaggtatcctggatgtccacgtggagggccgaggtgaggcacctccggccgaacctgggccggcccacctggcccccagttttggcaggtggccttcttaacttctcccttatctagaaggtctattggatcatgtcaattctatgtttttggcccatttatccataagtctggatttcgacagcgtctaactgattgctcgtttattttctgtcaattcttctccatttatatgtgcttctcctgcatacatgttagtagcatagtacatagtggaagtagatattttatttggaaattatgcattgcaagcatagctagtcttcattaattgggtaatattgacggtcgaaattggtcgataacgaccatcaacagaggccaccgaaggcttcttcatgcctcatctggagggcacagtgctgccgtcagctcctccttgcctgctgtcctgttgggtgtcgagagagaggagaaggtggaaggtagaagggtatgcatatgatatgtgggaccacccgatgttataatatttttttaattgaaatattgctgactaggctgccacgtgggtaacatgtcagactaaaacctccttctcgattgagggggttatttcgctggtttgaaaacttgagggtgttaaacgtctagttttacagtttagagggataattcggagtgacacaaataatttaggagggtaattcgaactcttccttaagtaataaatagaaagaattaaaggacgtcagttcttcggctacacaacgagataaacaattatctctctcctagacaatcgaatgaatgttttaatttacatgtgcattataagaacaatccgatggtcatgatttaaattatggtatgattaatacatattgagtttctttcatttatatagaatagaaaaaacttggtaaacctaagtacccatcttccctataattcaccaactgcactcctatatacaaacctcattcatgaaatccaacgatccaaaatgaacgaatccaatggctcgcatcgtcccacggaccccctcacctccctgcaccgcacacaccccctctctcccctcctctctctctctctcacctggaaatcactcgtgcatcccacaccaaccgcgacgccccaccattgccctccctccctcaaagtgctcctggctccctcataccccttgtcgccgcatgccctccacactgccgctggcactccccaccgtgcgccgcccccggccttccctgctacaaaggcttgcccctcctctccggcatcattcatcatctccaccttagccgcccagctaccggtcatcgagcagaatgatagcttttttatgagagacacaaaagaatgggcgtttctcagttaactcaatgtacaaagcaatcatgtatagggaagtcgtttctaaaaaggacatgatttagaaactcagaatacaattttcttgtggtacttaaagagtggagtaattttagcaaaggataatttagccaaaaggaagtagaagggtagtgttaagcgttgtttttgtgattctaacgaatcaattcagcgccttttctttgattgtattttggcaagattcatgtggaatgcagtctatatatcttttggaattcacccgcctaggaatgttgctagaatgttcgggaattggcagaagggggttcggcccaagttaagggctcaaatccttgtggggatgggaactttgtgttgggtggtttggttatgccggaatgatgtagtctttgatggctccaatactaatttttttgttgcaggtgattttcaggggggccttttggacaagacaatggtctttcctacttaaggaggaagatggccaaaaagtgagagaaggttgcttgatgctggagaagagagtttttggcttttctgcaatgaagggattgaacttaagaaaaagattaggatattaatactatcttgttttcttatgtggtacggttgaaactttgtattaactttttaagaattgttgtttctagagactaagtggttgaaactttgtattaactttttaagaattgttgtttctagagcctaagtgctcgggtctagttgcttcagatggtgttaaaccttttgtaagggtgtgagtctatatactctttgtatgtttcgttgagactgtgtagaggccggtttaatccattataaaaaaaaaagaagccggtcgtgatctgcagccgctgggccgcgggtcgcgatctgaacagatcagtccgaccgcaatcgctgtttcttttgctgcagaacctgaaaaggtcaggatagcaccgatatgcactagattttgacctatatatacttgcctgcccttttctgctcactagggatcatgatatacgataggcatttcagaccaatacttgccactgttttaattctcttttctgtttccatgatcatcatgtcaagaggggcaaacctgacagaaaaatctcaactgaaatcatttgcgaaaccagtgcaacactgcaacgatgagagtgagaattagtctggcaaatgaaaaaaattacaaattatgggttccactcatatatatctcagtcaatcacagtagtatcttggggaatttcaactgaattctattttgcacaaccacaaacctattcacaaacatgattggtacttttgagagaaaaactggtgagaaatctatcttcttgaaagtttagctaaagagtattcttaatcaaaacactaatataagaattagatttactggacaattgagcagctgtgaatggttgtttaatgctatattaaattactaattgaattgcaatgtcaattggctgaattaattttcttctataagattggaccaatctagaagggaatacacttgcctaaacttttctgctaattgaggtataactggtaccacgcctcatatgcaatgaaatgcaaatattattagctgtatcaataggacaagcagaagaatctaagatgcaaaaaggaaatgcagtatatatctaagctgaaaaatgtttgttatttctcaactgtgtatgtatacattgaagtcatttgacttgtgctatatcatggaataaaaatatatgacagtatatctctattcatcaaggaaagactcccccgcgtcgctctcatgggggcggctcagggtggggggggggaccctagccgcccgcgccgccacaccctcttccccctcctccacctcaccgccaccggagctcgccggcggcaaagccggcggtgagccaggaatgcggcggcaaggcccatacggctcggcggaaccgccctctgcatgaggaggacggagatggccgacgatggcgcgcccggaggtggagtcggccgtttggcttggggcagctggtctggcgcccttgtggccagatctggtcccctacctgtaggccaacgcggtgggcgacatgacggagccggagtggggcagcgagtggcggcgagggaggacacgggtcccggccggcgaggcagctgcgaggcggtggtggccctcagcccggtgatggggcagccggatcaagtgccccttggccagatccgccgccctcctagccgaatgacgacggcgagctgcctaggcgaggtggggactggtgtgccctcgccagcgcagggaaggctgtgggaggccggcgacggaggacggagccgggcgacgagcgcgtgacggaggcggggggctggtgctgcgatggaggcggggggagggtgcgcccactggcggttgcgggtggcccttgtgtgcggaggcagtggcggccaccagctgcgcccaccggcgtcttggcagcgacgcagcggggcgctcatggtgccgatggctagccgagcctcgacagccggtcccatggccgcatcggccggtggtcggtgcagcagtggatggcggcggcttggcggacttgtgagcctgcctgagctatgggtggtgggctaggcttggcggctaaagggacgatgtggcggtccggcgacgttcgttgtgtggatgggttgtgtggttttggatgacgctggcgaaagcctgtgctggcctttggttggcttgacgacggcggcaccattaggtttcgttcccctctttggaggcgttgttatggcatctccctcactaccaagaacctttcccatgcatggatggtcgttcgtggacccccgcgtcgaagctctgtaagcctagcttttcggcgaggccttcgtctcctaggttcggttcttgatgtgatgagtgtccaactttcttcgttttcttctaagtgaagtcggagctgctttgttggggtgcgatgaagctaggcaacgataacacgttgtagttttcgaggggtgttggtgttagctgtgtacaagaagtggtgctctggtaacttgggctgatgttcaaagtggacaatcaatgtgttgcttgttttctgtgatgcctttggcaatgatgatgtgatagcggtggagtcggagctgctatgtcgctaggcgacaagcccggtaacgataacatttgcctcacgaagtcgaagcctttgtgtcgcttacaacaagctctttatcgatagttgttttgggctccaacatttttcctttttccacggtgttggtagcttaagttagagtgttgtggtttttgcgcagttttcccctagttaactgtgcattgtaaggtttggtctcgttttctccttaaaatgagacacattcttttttatataaaacgtcggtaacggcctgactgttcgaaaaaaaaatatgacagtacaaatatctattgcaacgaaacaatctcactatatatgcttttgaatctattgcaggtgtatatctcaacaattcaacaaggatgatataactgcttatgaaatttcttgcttcctgcatcctgtctctgatattcagttgtttattctgtcaatttttcggcaggaattatcaattcatcttagtgctttgcattgtcaaatggcaggtgtccaaaagcatctcagataaaatctttcagtcttgaatttttaatttgtttttaagagcttggccatattatgttattctcttacctttgcctgcagcgataaggaagcctatagttacttggtcttggacagcggatgatcaatgcaatagtggccagtgcagggtaatctttcaatgaatataattgctggaaacaaacaatatatttgtcaatattcgtactgttgccttagtgtctgtatgcatgtttgtacattgctaaaagaccgatgagaggataattagagggattgagaataatcagtaaatacacttctcagtttcgtgtttctcccggatagatatgggagcaagacaacaggtgatgatgagaactggaacacaagctaagctacatgttcaaggatactcaggtacctcgctctgccaacaagtatgttcaatccttgcctagaaatttcgattgataaattttgtttatttttaaataagtgctaatgatgtatgcaggtttctgatctccgtgtttcagcttactactgaaatggacaataccgttggaacgtcatgaaaagattaagtggcaagaaaagaacaagcaatggacaatctccattaattccgcatacacttggggaggccgggcgcctggccgcttgcaaaaactggtgtctgtcactggtattcagagtaaaaaacttcactttccgattgcttgatagaaaactgaaaaacttaagttcatgttaatatatgaacccttaatgacgataataagagttggatttttttttaattttctgccaaacacgcacaccactcagatcgatatggctcgattcatacttcatcttttggtaggttttcagttggtactgtttttcatgttttacatgaaatttatgtactaagctagcattccattgatcgattttactgccctggaactccttcctcataacttctatcaaaacatctcattttacaggatagattcatgcatttcgaataggaaaaggtacgaattaccccctgaactatcacggtcgaccgaattaccctcttgaaccacaaaaccggatattcttcacccccaactttgcaaaccagacaaataacccccctggcttaatccgcggtggttttgatcctacgtggtattccagtcagaattcatttataaaaaaaaaggtgggccccacctgtcagtttctctctcttttatctctttcccaatctctcactctctctctctcttctccatcagcgttccatcagaggccgcacctgtcagggccgacgctgccgccgacgtccagaccggctgccgcaccatgctcggcctcatagtcaccgggatcgccggcggtgccctcgcgcaggcggcgctcgccgaggccgccaagcccatcaagctcggccccccgccaccgccctccggtgaaggagaggttctacctgcagccgctgccgccggtgggaggcggcggcgagggcgaaggaggtgaggtggcagcgggcgcgagcagctggcggcgcacgatgagccgaggtcggcagctagcgggcatgggcggcgagcgggagcggaggcagctgcaggtggcgggtgaggaaccgacgacggcagccgggcgggcggaggcgggcgtggcggcgggcgaggagccgaggacagcagcagggatggctacgagcggcaggcgggcaaggagtggacgccgacgggcggccggtggtgggcgaggcaagcggctcttctacggtcacgccgccgtgaggcgcctaccaatcccggacgccaatgacgagcacgtcggactccgtcgatgacgacgacgagaagctctgcctgggggagtggtgctcgttgcggttgtacctctacttgacactggcgacggtgcccacggcgagcatgaggtctagctccgccgcttcctgtcacaccctgaagttcttctcccaagcctaaattaattaataaatggtctcaacaaattatctgtgtattggcaagagagaaaccctattttaataaatgcaaataataatcagaaatggcacgtgcaatttttcttgggttctacatgtcataatatgctaacaagatttttagagctctataaataattttaaccaatttaaaatgagcacaagcaattattaaatccctggaaatcccttttttcctttttttttctttttcccctttttccttcgaatgggccatcggcccattctcctctccccacccctccccgcgcgctagctgggccggcccgaggccgaggcccagcgagcggccaccgcgccccctctctccgggccactgacaggtggggcccacctgtcgggcccaacccctacctgcggccggcgccgcctcgcgccgctgccgcccgcctctcccgcgcctcccgtgccatgtcgcccacttctcgcactcgccccgcacgtcccgcaaccgccaccccctctcccgcccgcacgcccgcgccgagatggccgggattcaatttttgaatcccgcctttctctccaacccacctcccccacgtcgccggccgattcgcgcccctcccggccacgtctctccccctcgcgcctatataaagcacccctgtcccctcctccacctttttcctgttcttgccgagctctcccgtgtactccaccgccctagcgccgcgcaccacccaccgccaccactttagcaacctccggccgccgctcgccgccgttagagccgccaagcctcgccgtcgcctctgtcggctccgcaagcccacaggccacgtcgtccactccttccccgtcgaaatatgccaccgggagccgtcctccgtcgcgcgccggtgaacccctccattgccgctgccttcggccgtcgttcccgccccttttcgcaccatctcgccctttctaaattggcccattttgttccctaggtttccccggagcccgtcccgccgtcgccgtcgccttccaccactcgccgtcatcgatcgtcgtcagtgaggcccctcccccttttcccctctctctcccgcgccgcctagcattgccgcttagccgcctagccgccaacgctagcgccgcgcccggccgcgtgccgcctccgccgtcggatctaccctcagatagatcggggccgtccgttaccgcccgcgtggcaagcccacgtggccgccacgtcggcgccacgtgtgcgccacgtggcgatcccctctcccgataccgtggactcggtccaccgtggaccggcgtccccgagccgatgacatgtggggcccgcatgtaggcgcccccttgtgctgacatcgctagggttaattattgcgcaataaatcaattaatgttttcctttttatagtaaaagcacagtgaatcttctaaaattcatagaaaattcatccgtgctctgtttaagcccattcaagtatcagtaagtcaagaaaaatgcaaataatccattaaaaatggttttgttctttgtttcagttgtcttttagcctatttgcattgtttgctttgtatgtcgcatagattccagctctcccgacgctccggtgtacttcgagatagtcgtcgaagttcctccggccatagagcaaggcaagtcatgcttgtcacttgaacatattgatcccatattgcaaatgctttttaaatattgcattgttttataatgctaccatgggatgtctacctactggatcgcttagccatgcttagatcaactagtacacaatgggggaattacattaatgcatagacttaagattctagtattgatgttggattagtgccaccgctttggtgttggttaattaaaatatattaaatggtgggctgtgggtacatggttctgttggtcgcgcccatggcaattaaggaccggttcgcgggaaaccctggaagaattcctcgtacttaccacaagccagcatgggcaactgctgggcttgtagtgtagctttcctctagctgacgcatccaggcaagggtgggcgtgatggagcgggatgggccctgcgacagcctttgtcgcttccagattcacctaggcacaagaggggactgcccgctgccttgcgaggagtgggggtgaaacctgaggtgtggtgtgcttggttagagggggttatctgaagggtcctatcacggcctctttccagtatgtcatagtggcatgtcagtgcacgggaacgtgtcgtggggctgtgtcttgtgggtacagttgtacacctctgatcagagtaaaactattcgaatagccgtgcctgtggttatgggcggtcaaccagattcatcatgattagtctcacctctagcttagcttaatggaactgattagttcagttgatggtttgggcctgtctcaacgtggtgtagcgttgagcagtgattggtttaatactggttaattactataactgttttactactttcaactactgtttataaatgctagctttacgcaaatgaaccccctttagcctcctttgattatatcctgcatcataccctccgttctggtatgacttgctgagtacagtgggtagtactgagtcttgctctatctcccaaccctcagagttcaagtacgcttccgatggtggtttctccgaggagtaggcttcgtctgtgctgtcgaggatgcctgtggagtggtgttcccgctgcaatccaagtcaaggcttagctccagttatcttttaattttcgctgcatttatgtaagacttttataatgtttgtaagacgtggatctgtatgtcaactttatcgtttgtgtacactggccggacctagacaggggttttaatgcacgtttttcttgaaattctattcgggaatttcagggcgtgacaccgcctcctcctcgtcgtcgatgtcctccgcgaactcctcctcggggctctgtgtgtacttgaccgccggcacgagacacgggccacgggcagaccgcgagccacgggccgctgcttccggcgatgccgcctcgcctcgcgcctccgccccgtccacccccgtgcaccgccgcccaccgcccccaggcaccgccgccctccacccgtccgccgccgctcgccgccagccgtgcccgccgcccacatcctcccctgcaccgccccatgaccatgagagagagagagagtgaagagagaggaagaggggaagggcacgtggtttccacattttttaaaaatagaaaatgctgactgggttgccacatgtatgccacgtaggacaaaaccgctcagaattggatcgagaggggtaagtcgtctggtattgaaagttcagggtgaacaatatctggttttcgggttcaggggtgtaattcagtcgaccgcgatagttcaggggggtaattcgtacttttttctttcgaatatgtacaagtcatagatccatgtaaatataaatgtcaattttcatgttgcaggggtggctcatcaccagttgcattagattttatgttgtacataacactctaaaatgatggatccttttctttgtgatgctgatcagggatagcttagatcagagggagggaagcatgaggagaatgctttcatggcttcggcagctgtttggagtagtgcaattcttctctcaccgcacgacgacaatactcctgtttgaaatacatgaatttattaagggcatcaataattatatggtttcaaaagataaaaaagttgcagtgttatgttagacgcgtggctatgtaattaacaatataattattctatattcttttttcatcaatcttaaatatatcttataattcttgattgtaaatcatgtattttttttatttggtttaacactaaatactaaatattgtcgtagcgttagcacggatatattactagtatttagaagtacaagatttatctaagtagtactccctccgtcaaaaaaaaaaactcaatttctagaatttgaattttgtaaaaaaaaataaacttctaccatcctacctacccttagcacataaaacgagaagttttatcccttaaatattctttacctacctatcaccattactatattttctaataagggtcattttagttatttttacttctcattaaatttgtattaggatgctaggaatgctctttttatgggacggagggagtacatcatagactgcgttcggcaagaggagctgggaacccactctctctttttccatgcgccatgctttttaaactattaaatggtgtattttttgaaaaaaaattctatatgaaagttgctccaaaaatcatatggatctatttttaaaaacaaattagccaatacttaattaagcatgcgctaatgaaccgttccgttttctgtgcgggagggattaagttctcatccttactaccgaaagcaacctaaagaacttggccgtgttcattgcgggaggttcacaaccggaaccggaataatacacacgaaaaacggaacggtccatcagtgcatgattaattaagtattagcttttttttaaaatatggatcaatatgattttttaaataactttttacagaaatttttaaaaatgtatcatttagtagtttaaaaaaatgcacgtggaaaaagagaggaggggagttgggaacaggggaaaccaacgcagcattaggaaaccgggtagtaagaccctatttagatgggactaaaacttttaagtccctatcacatcggatgtttagacactaattataaatattaaacatagactattaataaaacccatccataatcttggactaattcgcgagacgaatctattaagtctaattaatccatgattagtctatgtgatgctacagtaaatattctctaattatggattaattacgcttaaaaatttgtctcgcaaattagctttcatttatgtaattagttttgtaagtagtttatatttaatactctaaattagtatctaaatacatagacattagtatcaaatacatagactaaagttaagtcactcgatccaaacaccacctaagcctctagctgaccagcagcaataaaacagcaataaaggtcgatgattgccgagcctgtcccttgtttcaaaatataaaagaaattttatttaaattggagtgcaatacaagcatttatgtaatgatggtacacaatacaagcatttatatgcactaattgccttgattcccaccacttcgatgattccagagcaaatcagattcttctcaagaaaatcaattcaaaaattaacaactgaagtaaaaaaaaaacagatttgaaggaagagatgtctcactaactttttttaagaaaaaattataaacgtattggaattgaatataggtccatggagttgaaacccacaccccttgtcactacactaaatgcatctcacaactgaagtgactaaaaacatttttttaacgtgctaaacaacttagatgtctatgggttcacttatgcgtatgcttatcaagcaaatgctataaaataaatcatgataagaaacacaaaatcaatatcaaaattcaatttaaaaatcaaattttggctataaaataactcacaatgagaaatcataaatcaacataaaatttaaattttgtttttcaagtataagcatcagtggaatgctgggaccgttagaaatttttatttatattatttttttggaaaagagagtaggatattgtgcctagcacttatctattactttatgtgggacccacttttatgggacctaaatatcagtgatggtggtggtgaggcagactcaccaccgccagatggaacatttacggcctcatattttcgcttatgcatgtgctaatcagccaaaatttaaattttcaactttaaaattgatgccgaatttaaggtttttccatcaaaatttattttttaccctttgcttttagatcactaaaaacacatatataaaagttttattcacaaattacttttcgtttgcaaatataacgtttggcttcttacacgaataagcgaatcgataaggctattaaagaagtaaagatgtagtatattacttcctcctccatccgtccaaaataagttgcttttgtacataaatttaatttagacctagcatatgttcaaattcgagtattttttttgaacgactcgcacgagacggtgtgaagttctattgatagagtaggaaaaaattacaagattacaatcctgaagggtcataaccaggagaaagaaaaaaatataccaccacccacacaccggtagcgccaacacacacgaccaggagaaggttagcaccggaccggccaccgctagaccaacaaaggaacacagacgagatcaccctacaacaaggggatgccaaaacgacgtcttcaagaaaaaaagtgacggaaaaccgccgccgccgtccatcagggctcaaaggagccaagactgggctttcgcccggcaatcacccttgaggggtgagacagcacgacaacgccctcaggagggggaattaaccatcgttgtcggtccggccaagaccgggctaggttttcacccgccactcaccacctgcgaatctacggctgatgcaccgatgctccaccaccactcaaactctgccgacatatggggcccctgcaccgacgcccccccgccggccaaccttcgtgcgtcgaagaccgcgccacacccaccggcagctccaccacgcaccgaggtcgcctcttccaccgc

SEQ ID NO: 13475 - DNA, 19452 bp, Oryza sativa
  unsure (1)..(19452): unsure at all n locations
ccgttgccaagctctccgctgccgtcgcgaccaccaccagctgccgcgaccgcccccagccgcctaggcgaggctgtggatctggccgccgatgccagtctcgccgccagatccggcctccgtcgccagcctcgccgctatctccaaccccgccgccgacgcccccaacaagagaagcagcatgccgccagcacgcatgccatccccgtcgccgtcgccgtctcccccgccaccgtcgtcgccttccccggcgccagccgccaccaactgccgccgccaccccgccaccttcaacccccaccgccaccaccaccaaatgccgccgccacctcacactgacccgccgccggcggcctctcctccagatccggccgcggcggcccggatctgggcggtcttcgccgtcccgcacgcggtcgccgtcccgcacgcggccccccaccgcgacgggagagggagacaaagacgagggtgaagccccggcaccgccgtccttgcggccgcgcggctttgccggcagccgctcgggcgatggcgaggcggcggagggaggaggggggaggagcgggcgatgccggtggtttccgcctcccgtgtcgcccgtggggaggacgacgcgggggcttgactcatacactgaataaattcgagtataaaagtgaacttattttaggatggatataacactaagttattgagtggtgtacttattttctgttctaagctacaacttcattgtttttgcttaacacgaagtttctttaaaagtcaaataaatctatttatcatgttctcaataattgataattaattaataatgtgctaacggtttaacttgtttaacgtgcttaaaaaaatccaagtgatgcctctgtcccaacgcctgtgtttaattcgaacccacgaaataataaaaaaaatatagtattctatttatcctgaaatatactactacactgttccataaaaagataaacactagctacgaatctctacacacatatgtctaaattcgtagctaggatcgaactttttttacggagggtactacctcagtaaaaaaaattaagatgggacctaacctggtactgatgtttttcagagaacataattctagaacggacatctaggggtgggcgttcggtggggaccgaacattcggtccggtctattcggtcttttaaaagttcggactttcaaatgcacaaactgaatttatccccagagaaatagagaccggagatttggttaaccgaaagttcggtttcggtcttggggcaaaccgaaggcaaaagagacgtgagtaggcaggcttcgtctccaacaatggcaggcaactggtagtgtcaaaacaaagatttcggtaatacttaaaaggggtggctatcaagctaaaaaagtggatgggtttaaagacaaggaattttatacatgtttaggccttcttattcaagaagtaataccctactcctgtccggggatgattccgccgagtgtattattgatcgtatgatctggggaaaaaaggtcgtcccgagaggagcccggacccctccttatataggggaaggggtccgtattacaaaatacagtccatattcctaatggaatatgtgattacagataaaatacaatcgtaaccgactaggatctcgggtatttccttgacatacaagttagaaactaacccgagtcctcgtaaagatattctatctatatttggtaccatgtatccaactaaactataactgccgtgtagatatgggatatccatatctccacagtagcccccgagaccattgcagtcgacgaaatagctttcttagaagaaaaagcaataatccgagtgcttcaattcttcctgctctggcctgccgagcactaaaatcaaagactgtgaagggcgaaaataaaacatggtgcatcgagaagatgcacctaataggtgtagcccccaactatatggttagttaaaaaaactaaacatgtagttaagaaccaagtggttttacaaccaaacgtcatataacaaagcacgcatggtattcagtaaaatacccagccgactgcttctcagctttaatatatcaagaataaaaattatgaaaaggcccgagtgacaaacactcaaaaggtccacaaaaatacatgtttgactagaatccgagtatgaaactcttaaaatgatccaccaaatatgataaaaatcatggtaattaagaagtttaatagcctagactataactcttaccataatcaaaataagcatataacatgccaagaaaatgactcttaataaactagtcatctcgaatcaacccaaacagcttttgcagcctaataaagcttgcaaaaatagtataacacctttctgtcgggcacctttttatttgcatcgtggtaattccaaagaattatcaaactgcgttaaaaatgattttaacagcatcgggtcacatcattgtgagcacatattgccaaagcaaaacgcgcctaagtccctagggatcaacgggccacgctggtaataatattgggctaaagtactgtacaggcctaggcccattagcactcccgataccctaacaaaacacagaagtccaagcgacacttcgtcttccccgccgaaactctcgccatttccccactccttgctacagtacaaagctgcgccgacgaagctagggttcatcaatccgccccaatccgttctcagaaatccacgaaacttctccacgcgcctaccgcaccgattccccattcctctccagctatttctcggaccaaatcagatcattcgactcgcatccatggcggaagagagagaaagtttcgagagtcagtgggcgccctctgacgtgacggaggagaatctgaaggaaatggtggcgcacggcgttcttccggcgaaggagatcatcgggtggcgaccggcattcggcgaagcattcccaaccccggatacacacgaggtcgtggtattttctcacttcttttatggtggattttctcttccaacttcaagattcttccgtggaattctgagcttctatggaattagcctgcatcacctgaatccaaactccatagtgcacattgccaatttcattcatgcctgcgaagcttttttgggcatcaggcctcatttcgccttattccgccgaatcttcttcctcaaaccccaaccgaacaggagcaaacaatgcgtggttgggcgctggcttccaactcagaggaacactaagccaaaagtatttctccatgcccttcaagacctcaaacaaaggctggcatgcaaactggttttacgttcaaaatcctgaacccgcactctccgagtactcctgtcttcctccagtttaccaggacacatggaattcattgcctatgggagatgaagctgctcagacggtggaattgatggaacgcatgctaaagctgaaggaacaaggtttgcagggagaacaaatcactcgacacttcatcaaaagtcggttagccccaattaaagagagatcccgcacggcttttgaatttgacggcaaacatgatccaaatcgggaagacccagattcccttgactttaaggtcatgaaagaaagaatgtacaagatcttctcaaatgctattgtcatcagctattcacatctgttgccagtcatgccattcaatgcattcaaccctcctccaccggtatgtactaaaacacttcaaccttcctcaaaatatgatctcgtctttttgttaaatcaattgacagtggaagatattatgtctaggaatttgctctgatgaagtcggatcccccaatcgctcagcgccgatcacctcgccgtcaaactggtcaggggagcgggggaccaaagatccggtccgaagcccagcccaacacctctaatccagccggccagtcagattcccataagaggaagttagtgctgagtgacgacgaaggcgacgacgctgaaaagcctggagatagagaaacaaccagaaaactaccgaagcaggctattccaaagaagaaaacatctagtcgtcctacgccaaagatcaggaagtcttccaggtacaaatcatataatgatcttccttgtattgatgcacacccagcatggaaataatactgataacaaaaacttgtaggaaaccatctgatatagatccttctagaaaggactctgattcggctaatatggaaacaagttcttccaaagaaactgggccgactaccgtggatcacccgagtgacaatcagccggcaaccgataatgtagaaatcggtgatcaacccccgactagaaaccaatcggccgaagctgaagccggagctaatcaggagcccccgactggaaaccagtcggacacagggccaagccaagagattccaaaagttggagcccaagcagacagccctcgcggtcaagacgctagcagtggaccgaaggtctggatctccttcaaaggcatctgagtccacttgtcctcatccagaaatcatcacgggtaaacactttgcctgaaaccacgttgatctaactgactctatttgattgtttgaccgttatccatggatgcattaggaccaatgattggtgatgaagaggaaattctccggatacaagcggccgaagattcacgccctcccattctggtcaagtggtaggatgacgacttgcaaccccaaggaattgtgataaaccggcgaaaaaagacgaagaggtatgcctactggaaaaggcactcggctaggcgactcgcattgtaaatgtaagttctttgacgcctgacctcaaccatcttgttcgccatttagctcgagcgctaataaaattgttttgcagaggattcaccttaggaatgaagtgaaaaccacaaccctagagaaattagttcctcatcttggaacccttgaagccgtcagagatcaactgcacgaggcaaaagagcttgccaagaaagctgagcacggtctaagagatcggattgcccagctccaggagtctaacttcgaactgagtggctcgtcaaaaggtatacacaaaatctgtctaactaacttgcactgtcatctttgtaacttcaattaatcggagtcaatgtagtgcaagccgccaagatatctcaattggagaaacgaattcagactctggaaaacgataaagcagagctggcgagtcagagggactcagctttaaaggacgttgaaggtaccatcaattgatactccaaaagccattgccttctgtatgctgactcgttaatataaatctgttgatgcagactgcaagatcaagtcgcaagcccaattcgacgtcctggtcggcaaaatcaaaagacttgaaggggccgactgtgataacgacgcaacccttgcaagtatcgggccgactgaattaaggctgcttcgcgggcctcttccagccggtgtaggtcatccactaggtcgtctccgtagcgctcttcgcgaaaattgcgaaaacgcaaagattcaaattctacttcactaggcaacattgcttccgctccataaactaggaagaatggcaactggcccgtagcccgactgggggtggtgcgcaaggaccaaagtacatatggcagctattccacccatttgccggcacagggattcagttggtcaaaaactcgtgcatttattccttggagtaccatgccattggctcgttcaacctgcccatagctcataggatgcgctacggaggcatagcaaattttgatgccgaagtcttcacaaaaatctttaaatactccgccagtgaattgagtgccattatcagtaataatccaacaaggtaccccaaaacgatacacaatgttgatgaaaaaaatctctagctttgtccgtcgtgatcgtgatgaccggtttagcttcaatccgcttggagaatttgtcgatagccacaaaaagatgtgtgtaaccgccgactgcctttttgaacgggccgaccatgtcaagcccccaaaccgcgaatggccaagacaacgggatggtttgcaactcctgagccggtagatgagtttgtcgggcgaaaaattgacaaccctcacatgttcgcacaattttgtcggcgtcggacacaactgtgggccagaaaaaaccctgccgataagccttgccaacgatggttcatgcagcagcgtgattactacaaatgcctgaatgtatgacctttcgcaattgccttccctcctccaaagacacacagcgttgcagaattcccgatggacttttcttgtacagctcggtctcatgaataatataaagcctgctacgcctggaaatccgctcagcttcgtctttatcttgagggagttcttgggaggtcagaaatcgtataaggggctctctccagtcggtttcgaccatagctatgtcttgagtgcccgcggcttcagctgtttctctcttgggtacggttggctcatagagatgttcgacgaacacatcagaaggggccgcttcgcgtttggatccaaaattcgctagtctgtcggctgcttcattattgtgccgaagaacgtgagtaagttcgagtccatcgaacttatcttccaacttttgtacctcctgtcgataagcaatcatattgtcgtcgaggcaggaccactctttcataacttggttaacaactaactgtgaatctccgcgaactgtcagacgcctgattcccaaagagattgcgatccgtagcccgtgaaggagcgcctcatattctgccactttgtgagatgcgaaaaaatgtatccacagcacatagctcagtctttatccagttggggaaattaaaacaactccggccccagtgcctgaaagtctctttgacccgtcaaaatgcatagtccaatactccatcttttcctctgacgtgtcctcttggcactcgatccactcggcgacaaagtcggctaaagcttgggatttgatcgaagttcgcgacttgaacgatatatccaaggacatcagttctaaggcccattttgcgattcgcccgtttgcttcgcgattatggagtatatcgccgagtggaaacgatgtaaccaccgtgactgagtggccttggaagtagtgggataatttcctgacggtgattagaacaccgtacaacagcttctaaacctgaggatatctcgtcttggagtcggccaaaacctcactaacgaagtagatcgatcgttggactttctaaacatggccttcttcctcacgctcgacaaccaggaccacgctcacaacctgagaggtagccgatacgtatagtaataacggctcttgtgggtgtggtgaggccaaaactggtagagtagtgagaagtttcttgaaatcttcaaaggctttctgtgcttcgggtccccactggaaattgtctgttttctttaacagtttgaagaagggcatcccccgctcgccgagtcgtgaaacaaaccggctgagcgccgccatgcatccggtcagtttttgaatgtctttttgggaactcggcggcttcatgttgaggatggcgttgactttctccgggttggcctgtatgcctctgtgagacaccataaatccaagcagattccctgacggtactccgaaggtgcattttttagggtttagtttcatcctgaaagcgcggatgctcgcaaaggtttcttccagatccgtaatcaaatcatccttctgcttggtcttgacgaccacatcatccacataggcttcaacattgcgaccaatttgagtcgagaaacatctctggatcatgcgttgataagttgctcccgcgttcttcaatccgataggcatggtgatatagcaataggctccaaagggcgtgatgaacgaagtcttcaagcagtcggattccttcaatcggatctgatgatatcccgagtagcaatccaaaaaactgagcagctcgcagccggcggtcgagtcgactacctggtcaatgcgaggcagcccgaaaggatctttggggcaggacttgttgaggtcggtgtaatcgaaacacatgcaccattgcccagtctttttccgaactaggacggggttagccagccagtcgggatgaaggacttctttgatgaagcctactgctaacagcttggtcaattcctccttgattacgtccttcctgtcttgtgcaaagcgacggagtcgttgtttgatgggtttagcgtcttccttaacgtgcaaagagtgctcaatcacctctctaggaataccaggcatatcagatggtttccacgcaaagatatctttattgttttgaagaaaggtgatgagcgcgctttcctatttacaatctaactcggcgcctattatagcagttttagtaggatcagaaggatctagggaattttcttggtcttggcttcgctttctccactctttgagatcttggccataggcacttctccttcgcttgtcgtggttgcagccagtcggatgtcttctcgagcaatcgcgatctcgcgggtttgagccatctcgcaactttccttgtcacatgtgacggcttgcttgatgtcgctccgtagggatatgactccccgaggaccaggcatcttcatcatcatgtaggtgtagtgcgggacggccatgaatttggctaacgccgggcgtccgagtatggcgtgatacgctgtctcgaaatcagcgacttcgaagcagatgttctctgtgcggaagttctcccgagtaccaaaagtgaccggaagagtgatctggccgagtggtgttgccgatagccctgggatgactccgtggaagggtgcattactcggctttaactcggtgcgcgggatctgcatgtcatccagggttttggcgaagaggatattgagtgcgctgccaccatcgatgagagatctgcgaagcttgacgttgcgaaccactgggtctagtaccagggggtaccgccccgggtggaccactcggtcaggatgatccgagtggtcaaacttgattgttatctccgaccaccgaagatattggggcatatcgggctgaacagcattgatctccctttcagtcagattttgctttcttttagattcgtaagctagagggccgccaaagatatggttgagctccttgcggtgatcttgaaaatctgtcggggcgtcatcatcatcatccttctttttcgacgtgctttgttctccgtcaggggtcttccgtgcattcttggcatattgctctgcaaactgcttgtagacgaagcaatctttagctacgtggttggagttgggatgatgcggacattgggagttcatgatcttgtcaaaagtgttgacgcgcgaacgttgtcaggaggagtgtgtagtagtcgcgatgagttcctcgggcttacgcttgcggtccttgtgattgttacttccaccccctcccgtagtcggcgcgtctttctttggcttccaagtaggacccgactgcttggatgcgataatggcgtcttcggctttggcatactcgttggttttttcaaacatctgtttgactgtcttgggaggcttgcgcccgaacttgccgactagatcttcgtggcgaattcctttggtgaaagcggcgatgatgacgtcgtcggtaatgttggagatcttgttgcgctgttcagagaagcgtcggatgtaatctcgaagggattctccaaacttatgaatgacgttgtagagatcaaactgtgtgccggggcgttcaaaggtgacctggaagttggcgatgaagtggtcatgaagttctgtccatgatccaatcatgccacggggtaatccatggagccaggaccgggcagaatcagctagggccacaggtaagtagtttgccatggtcttgctgtctcctcctgctgcacggattgcgagaccgtagacggtaagccaagactccagattagtggtgccgtcatacttctcgattccagtcggcttgaagccggctggccaatccactcgacgcaggtcattagtaaaggcagctactccatccatgtcgtcgtcgtagcgatctggtgaatggcggtgacctcgtgctgcacggcgctggttaatcttatcgcgaagatcgacaggacactggcaaggtggggagcaaggccgttcaactcggcgctccctgtgtcgctcaggaggtgagtgaacagatcgctcgtcgtggcccctgctcctgcgattggatcctatgccggcgatgctgaggcttggctggtggtaatcatgagatcggagatggggagcccggctgccagtcggcgtgcggatgcttccgaagttaaccgggaccgaagcggcgatcatggtcttggtctggttcaagatgttgacgacgtgatcagcttgattgagtgcgtcttccttgaggagggtgtcgagaagggtgatcgcagcgacagcgttctgttgaggggtgcgaaagaccgctgtcccctcgacgtcttgctgcccgatgagatctcgcgctcgtcgccctgcgtccaaggctcgttgtcgtcggtcctcggcctcctttgcagcccgttcgcgttcttgttgctctcgccgcagccgttcttgctcttgtgcttggcgctcctcttccagtcggcgtcactcggcttcctgctgtacgcgtcgtgcctctgtttctcgggcttggcattgttcttccgtctcgttgtcggccatgaagacgccgaagtagagaggggtgtaattgtcttcaaagctttcgtcgaagtcgtcgaggtcgcagctgtcgtagcggtagccgaattcgtcgtactccacgatctctgttggtcgtgagtcgatgccgggggagctgaggtagccttccagttgatccgtcgaaatcgtgccgagtggctggagtatgatgccgacttccctggagctaggcatgatcggtgttgaagccaacttccgcctaggcctacggggagaagacgcccttgtagtgaagactgcagccaaatcgtcggggagtttcatcatgattggcgggtaggccccatcatcttgatctggtggtgtcggagtagatgggatctcgtccaagtggtttgaagccgactcgagcgagataagcttggagtagatcttggccgagttcggaataccgaacggggctgagacctggttctttcccgactggtttggatctgagtcgaggagagagatcttaccgaagtcgttggtgatgaagttgaggctgccgaaccgaaacgcctgcccgggagggaagacgaagttgtcgatgccggagacggaacccatcgcactgatcggcgagaaacttgacgcaacccctacctggcgcgccaactgtcaaaacaagatttcggcaatacttaaagggggtggctatcaagctagaaaagtggatgggtttgaagataaggaattttatacaggttcaggccttcttattcaagaagtaataccctactcctgtccggggatgattccgccgagtgtattattgatcgtatgatctggggaaaaaaggtcgtcccgagaggagcccggacccctccttatataggggaaggggtccgtattacaaaatacagtccatatccctaatggaatatgtgattacagataaaatataatcgtaaccgactaggatctcgggtattttcttgacatataagttagaaactaacccgagtcctcataaagatattctatctatatctagtaccatgtatccaactaaactataactgccgtctagatatggaatatccataatccccacatgtagcaagcgacagcgcggcgatgcccgacgcagcccctcgtgcggagccgagatggaggtgtggatgtgtagcgtggacggcagccagggagaagtggaggcaagccgcaagcaggccgaggtcggcggcgcggcgtggcgcgaaggaggcaggcggcgccacggcggcgcgtcgcacgtggcgcgaaggaggcaggcggcggcgcgacgcggaggaagggctggcccctccggtggccgggacgaggtcccgtgcgagtcgaggctggggagcatgtgccgtcgtcgtcgaggagttgccgagttgaggataactgaataagatcgagactcccctttttcctttcttttgttcacccggacatgtggtggggaactggagattagtcatgtgggcccaatcgaaatggacggtgggctactagggcagccaatgggctggaggcctggagcaacatggaagttgatactttcggtcttcggtttcttcaatttgtagccggtactgagagcaagtacagtaagtcacctataacgatatatcaagaagaaaaaaagaaagagaagtaagtgggctataaatttaattgccagtaacaacacggacttcaacacgttgtatgtatgaggtgggaccggatattaattgtgtaggatatttgtgtaaataactattgtatgaataggctattagattagttatagatgatttggagctaacatttggctatactattaaacttgctctaaccgaaccggtctctcccatcgtgcaaccgagcaaacgaccgaagaccgctactttggttttttcggtttcggtgtcgattttttaggtacggtattcggttctcggtttttatgctcacccctaatcgtacgtacgctaaccgctgctagagcatcaccaacacatcttaaaattttattcccaaatttttagttatggggatgcaaaaacataatttgaggtgttaaaaattttctcactccaagagattaggtaaaattggtttcctaaaaattaaaagggtgggccacgataaaacctccacgaaaaaaaatatgttttgcgctccttcctcccgtcagatcacgtgtgcatctcttccccgcacgtgaagcgccgtgattaggagccaaaacaagacaacacatggatatattccgacgaaaaaaaaatttagcttattatttaattttttttaaatgttgcacgatgttacaccaggtatatcgaaattgtttcactaagtagatcgaaaatgtttcactcgtttaaatcaggtgttgtttcaccttataaaaaaacaatgtttcagcaaatagcgaaagaatgtttcagttcactgcaacatttgatccatacatagtgaaacattgtgtacactaggtgaaacattttttttgtggaacaaaaaataaaccaaattcccttaatagggggtttccaaaatatgtgagttttttttttgcaatggaatatttcgttcactacaacattagatttatacatagtgaaacattgtgagtacactaggtgtaacatttttatggaacaaaaaataaaccaaattcccttaatagagagtttccaaaatatgtgagtttttttgttgcaaaagaatattttaattcactgcaacattagaaatagtgaaacattataagtaaattaggtgaaacatcttttgtagaaaaatgagagaggaaagtgggtgggccgaggtacacacgtggggatggttgtggaaaaatgggagagggtagtaggtgggccgaggtacacacgtggggaggggcgcgggggagcgtccgatctggctcccccgcgccggtcacccggctacaagtattttcggaattttgggaatgagattagatttggctcccatcggttgccattttacccaaaatggcttatttggcttattagaaaattaaaattaatttataagtaaaacttttgtagatttgttcgtagcgacttaaaagccaacattaacaaaaattacgttaaaagcatttcaaaatcaacttcaaaatcaagttcaaaaattcaaattttggcttattctttggctgtttaggccaaacgatggggctatctgataagatcaatttttttcaaaaaatatcttcagattattggatagagaataataaaccgattctgttgcactgttggtgatgctctgaatccccgccccgagtcctccttgactatccaaaagcaccgcccgccgccgtcgccgngacgccgcctagaaaaaatggacgcgctcgtggtgcggcggctcggggaccccacgctggcccccggcggcgaggcctccccgttcgcgccggtcaccggggaccacccggcgccggcgctcgcgtcgccgacgtccgtgcgggtgcgcgtggcggccaccagcctcaacttcgccacctacctgcaggtacagggcaagtaccaggagcgccccgcgctaccgttcgtcccgggctccgactacgcggggttcgtcgacgccgtcggccccgccgtgcggaggttccgccccggggaccgcgtctgcggcctcgccgccgtcggctccttcgcggatctcatcgtcgccgacgagaagcagctgtgagttcggtttttcgcctctcgctgcctcgtatggtgatctccgtttggaagattagcttactccaagtggctctctctttggaaatccccatttttgggttaatttatcagtacatgccttaattagtgggatacagcatcacgagttatatttggttttctctttcaattgtcggatgcattttcttgtatgtagtcgattagttgttgaagcatttctacatcggcttatatctgttcgctcttctcatgtccgatcgtagagttaaactttctgctagttcggtaggtgctatgcagattttatagcttatgagaagggttgtttgcttttgggagtaaatgtttctttttaaaaactatttattctatgatatgtctaaatatggggatgtgggagtgggagagactatgctggttttcgatgaaaaagatgagaatgttgctgtctgtctctctatagatagttaagccttgatcccctaataaagaggtggaatctttcaattgtcgggatgccttaaaaaaggcgatgttaatgttgtagtgaggactggattgtattttgttttgttatttcagcttgatttcactagcaaacaaagcgcacagtatgtctcctgtttgtttatcttagcaatatgcaatgtataaatcaactaatacaatagctgcacttgtggtggttgcagttgcagagtaaaacagttagcactgttgtgaaataaaataaaggaagcaaatgttggttagatacttgtatatatgtgaatttctgaatttttgtatatgaggggctatctgtagttaccagaatttttttgtaagtataacatgcattttaaatcgttggatcagaatcataatcagacaggcgcacatctcaaagctaatgctttgtgcaggtctgcaggaaaaaaatgaattgtacttggccaataatcagggaacttacacaatagagaaacatcttatttattctggtatgttctattgaatcagtgctatgttctttcgaatcagattttcggtgcctgatggatgtgaccttgttgctgctggagcattgcctgttgcatttggtacatcgcatttggcccttgtacacagagctgaactaaaggctggccaggtgcacccctgtgttaatctctttgtttataaaatgcctataagatatccatttggtacttgtgcattgttcatgttattgttatggacattcatcatggatacggcacaaatctcctttggaatggccatccacattctcggagcactgcattgagtaaatcagcatctctctgctgctgctccacatctctatatccataattactgttagtgtgttaagttatgtggcagtggcatcagtgtcttaccttcgtttgtgacatatcatgtacacacaatattatgagctagaccgcattacctcaaatggctcattttgatggccattattggtcaaacataggccttgtattttatatttatgaaatttattatgtcaattttctatataacttaaattctacagtttctatcatagaggtgaacttctgcaacagtacccaaacatccacaccgttctgataaggtcaaaatgttatggatgcttattcgtggataaggaagggtccacagattgggataaaggtccacagataggataccacttaactattccctatccttgaaaactaaaatcatctaggggcatatttctaatgctacagtgtacaggcactgttcatctgcagtaccgttaccatagcaccattttgttggtgtctccaattaaaacccttccatttaggacccaccatctgatgatctgatacaggggttttgattattttattctcacattaatgaaatctgtcagtactgttctgttttttaatggtactgtagcagtaggactagggaagcatttgccttccaaaataagaatatctatactatattgattaattaattagcttcctggcatagagaataattgtttgtatcctatctatttgagatatggtttattccgaaggtcaggattctaagcttgtttggttggtgacctgggcgtcatgcctgagaaaaatatgtgcctgagtgttgcatgaggtgggagtggttcatgcctgagagaaacttgtttggttggtgacctgtgcctgagaacacttaaaactaatattatctggcatttttctctttttaagcttggagtttaatcataaatccaatatagatacttaagagatttaacaaatatttttttttacatagtctcataacatatctttagctaatcaagtggagagcagttcagcacgtttgccaatcacaagatagtgcatgcaaaagaaagcaaccagctgcagcgtgagagaattactttaattcagcagttagtagagaagtacttcggctaatcaagtggcctggctctgcatgcaactgaggtcaccaaatttggtctcctgactcaggttggttgagctgccggagagcccaggcctggaaaggtatggagcgcaggagtggctcaggcactaaccaaacaaggtgtattttttctcaggcttgtctctggctaggcagatttgtctcagggtggcaaccaaacagcctaaggctgtgtttggcaccgcatgttcccaactcctctcccttctattccgcgcgcacgcttttcaaactgctaaacggtgcatttttggcaaaaactttttataggaaagttgcttaaaaaaatcatattgatccatttttgaaaaaaaaaagctaaatacttaattaatcatgtgctaatataccgctccgttttccatgcacaggagattggttcccatctcttccaaacgaattcagcctaaatcttctaatgggtgaagttactattcactcaaacctgttcagtaatataccaaatcatccctatgaaagggatgcatgcacctctattatgattaagcaataagaagaaataagttaggtctagtttgatcagaaattcagaatccctcagcaatccagcttggcaccaatgagtgcgatcccatctttgtgcaggtcttcattctccatcggtaaatcaatgtccattacagtttcccttctttgattaagagtcagctaccaaagctcctagtaacgatatacatattaagatttctagtgagtgatgcttgtcttagtattgtaatgcaaaacatagttaagacacatgcatatagctttagcaaacataaaggttataatgctcggatgtgctcccagtacattgtcggatattgttaataaaggttgtgattgcaggtgctacttgttctgggtgctgctggtggtgtcggggcatctgctgtacaaataggaaaagtttgtggtgctgttgttattgcagttgctaggtgattggtgtgatgagataattgttgtacggttgctattgcatttcaccaatttgtgttctcttcctaaatatcccctttttttttcttgactttaggggaactgagaaattgcagtatctcaagactataggagctgaccatgtaattgactcaagcaaggaaagtattatggaaagtgccaaatcttttttaaaagccaaaggcctcaaaggtgttgatgtcttatatgatcctgttggaggcaaattaacacaagatagcctaaaacttctcaattggggtgcacatattctgataattggatttgccagtggagatgtaccaattattcgagcaaacatcgctcttgttaaggtaaaccaattttttttgtggaatttccagaatttttacttttcaacacacagctctatgccttatttgtatgcactccattgtagaatcagaatgatttaatcactgctgacttttattcatttctcttaagagcatcatagggaactggattcactgtcatgtaccttgtttttgtgcaccgtataactattttagacaagcttccatttgcttaagaggtgggactggtcctttctcaataagcgagagtctgatatgaattctgatgaattattgattgggcaaggttagcctgaattcattctcattgaaactaatttgaggattaagaatcctatgaattaagaaatacttgaagcagacaacagtagtgtaaagattgcatcagtggaatcagaaaaaataatatgatcaaccaatctaaagttgaatttttagaagactttgaatttgcacgatagctttccagctagaatgtaaaatggaattgctggggaattcagaatatttgattgcagataaaatgtcttcatacataacttttttttaaaaaaaagaaaacgagtaactaattgctgctgtgctgtttcagaattggacaattcatggtttgtactggggaagctacttcactcatcggccacctgtactcattgactccctcaatgaactcttttcatggctttcaaaggggttgataaaaatccagatttcccacacttacaggctccctgaggtaagcgacaacattttaacaaaccttattataattacagttcttgtaacactaaccacatgtcacatgaaacgtcgcatggcccaatcaatcttgaagacgacacataagtcttgaatgcaaaaaacttacataaatttcattagagacagctctgcacaatatttatatataactcccatgttctgaatggatctttcatttgtaatgtgagcttttcatcagctaggatagcttaaagttgcttggcactttttgcatcatttggctgccatattggtttttgagattacgatccaatcttgttgatacttataaagtcaaagtagttccagtatactaaaatgtacttatgaagcaactaggcgtgactgcctgagcatgtcaacacggacacacgtggtaatatatgccagtggtgcatcttatctaagaaaatggtactgattttagtcaatttctggctttgtatgctgatcaactgcccagattatactgtactgtcagccagtcagaataaggaccaactacgtgggttttttaccatttgtaactactgttcatatct

SEQ ID NO: 13476 - DNA, 513 bp, Oryza sativa
cggacgttggtgggaaaagctttccgacaagggtttttctggccgaacgccctcaaagacgcctgcgacatggtgcagcggtgtgaagcctgtcaattttacagcaaacacacaaaattgccagcgcaagcgctccagaccatccctcttacttggccattcacgtgctgggggctcgatatactcggaccattcccacgaggacagggcggctacaggttcctgttcgtggccatcgacaaattcaccaagtggattgaagcgacgcccacgggggaaatcaaggccgataaagctatcaagttcatcaaaggaatattctgcagatatggattgtctcaccgcatcataacagacaacggcttccagttcatcagtgccgacttctaagattacagcattggattgggagtcaagatttgcttcccctcggtttctcaccctcagagcaatggacaagtcgaagggcaaacggcataatgctacaaggaatcaaaaaccgcgtctatgaca

SEQ ID NO: 13477 - DNA, 8256 bp, Oryza sativa
atacaccaaaaggcacttatgagacactcttcaaaatatctctataacactgtaaaggcattttaaaaatgcctctatagtattaggaaaatgtctctaccaggtatatttcaggtatatttgtgctcttaaaaattttgggcctacatatataaagtttatacattaaagctttcggagatacatcttaggtcatatacacggcaacgaccaaaagaattcacgcttgagccgcataccggatgctttctttttgatcattccacaaaactgaaatagcacaaaactgttcggtttatgccaatgtggggttaaggatttcataaagaaatcatgggggagcatgaccaagagatacttaaaaatctcttccctaaaactttttgttgggattctccatttaggattaaaaataaattaccatccaatagataggataaatttaacttcctaaggtacttctttcccttcccttgtttcaaatacttcatatagtatccttgaacccggaattagtttgatggatggagtaaataattatttcttgttacaatataggaccatctttcctgaaggcccaaagtgcatcattcagtccggatcaacgtactaccctctgaaccatacgagagatgaatttctgcctcgtacagctcgggccaaagaccagggaagctgaagacctgttatcattttctattggaggattctaaatggatagatctaaagacttcaaacctccccccggctgctcgcccctctgatttttgcgcgggcgttgctgctgctgggtcgcggcatgtcagcgcgcgcctgagggcaggttgatttcgcgagcctatcgtgcgtccgcgtcatcgctggttcttttgcagggaggtcctcttctttatggctatcttgttatgcgtccccgccgtgcttttttgggctcaggaatatttgcgtttagtgtgatgcggaggagacagagatgggaaaaaggcccacgccacgccctggattgttgacagggaaaacgactcaaaaaccaacttaacttaaattcgtctctagtcagacggaagccactaacaagattcctatcgatagtagggacatgctgtacgttcttcagctgcacgatctttcccgaagtaaacttcagatctaccgtgccaacaccatgaacagaagcatgtgacccattctccattaggacggtggaaccctgtgcgacctgataagaagaaaataatgagatgtcagcacaaacatgtatattggccccagtattaacccaccagttaatagactgattaactgaaaaaacagtaggtaaataccatacccgctttcatctacagtgttgccaatagtcatatttgtagacttagaagtctgccctgcaggtgccttcatccccttgcgttgtggacacttcttcgccagatgaccaggtaggccacacacaaagcaagtcatcttatcctggttaggattgttgtttatattcttcttcttgaagttggtggtctgctgagctttgtattttcctttgctcttgttttgggccttgtgcacaacattggcactggactgcccaccatcgcccttagacgcggcatccttttcccgagctttctcctcaacatcaagagacgctatcaacccctcaacggagtattccagtatcttgtgtttgagtgcagtaccgaaacctctccaagatggaggtagtttcacaataatgcacccggctacaaatttgtcgggtaagacacacttaaggagttcgagttccttagccatagtctgtatctcatgagcctgctcaactacaaaaaggttgtcagccatcctttagtcatgaaactgatccatgatgtacagatcattgctagcatcagtagcaccgaatttagtattcagtgcatcctacaactccttagcgtcggtcatatgcatatacaccttgaccagacgatcgccaaggacgctaagaatgcatcccacaaagagagtagtagcctcatcgaattctttctactggtcagcagcaagaactaccataggtttgctagcactcatccataagcatttcatagttgtcagccacagagtgaccctgatctgccatctcttaaagtgcacaccggcgaatttatccgacctcaatgcatcggcaaaaccagccatagtaaaaccacagtgcctataataagatttttggattgttgaaattataagcacataatgatttaatttatcccataaataaatcacgacatcgcatatgtgttggacaaaaaaatcgaacacactggcctgggagatctgcttagctcctgtgcaggtctaaatcttgatgagatgcgggcgtgccagtcagtttgatcctgcaactgacaagatatgcaaatagtagatcaaaacagccgatcggatgacaagccgatggagtagttcccgccgatagccgataatagccgatgccgataccagccgatagcgatagggtttaagcaatcggctatatgtccaatgtagataatgatataaaggcaattggctgatgatgatgtaataaaataacaatataatccagtataaaccaatcggcaaataatgatatgataaataagcatagatccgaaggttaaagcacacatcggctggaggtctgatgtcatgaaatccacaagattagattaaacagtgaaacctttgttgtcatcggctaaatccaacttatatgtatatgcaatccttataagccgatgcaacgtccagataactcaccggctgaaaccccgatgaaacccttattggcaatcaagaattaggctagagattatggttctaagcacgacttagtagatcaaacttaactgatgcaacattaagtatgaaaagaaacataatatctagacaatcaagctgttgactgaattttcagggtggtagatgtcgaagctaatctaatctagcaacgcgatttagccgataccggcagaaaccctaaaacgagaagcagccgatagagctaaattgatatgctaagactagattaacagagacatatgataaataggtaggcaaatatatcatccaaaccagagcaatccaacatgtcgaatgtactgatgcagccttgaacgacgccgacgtaaacgatacaattgcctaggccggtggaatattggacttaccccttagccggagatcgaacaccgatgcaagaatccgacaactgacgacttgacaactctcatcggctaatctcaggacttcgaagccgatgctgactctaagccgatgactactccgagcttaccaaatttcactgttaacaagatgtaaactagcatgaacgcatcaatagatctacacttgtaaacaacacaatataacatgaatagatcaaatatgcgtaacatattgagcacttactgaggttgctgaaagaccggttgctcagcaggaattactcgccgttccgggcgttgacgaaagcacgcagcacgcgagcgaacaggaatacaagctgtcgtggacgaacagggagcagtcgcacgaagcgcttcctaaaaaccttattgccgccttctcccggtgcaggacgtcgaaggtagaggttccggagacctgctctcccgatcgccggtgcacgccgacaagcgggatggagtagtctacgagtgacagcgcagcacagagtaggaggcaaaccctagattgattttgtgtgtgttgcgtgaaggcggcggcttggtttatatagagataggtcgcttgatcaaggcgcccgcacgatctccactccgcgtaaccaaaccggataagtcgcgtgtaacttatccggactccacgccgttttcacgcaccggatttttcggaatgtttccaaaacaaaacaaatccgaatttccgcagcaaaacaaaactgcaatttctgcagcaaaacaaaactgcatctgcgcaagggtgaggaaccaattttttagaccattcgacgcgtacgtcgtgcatgcccaccgcctgccaggcgaggcaagcgagcgcgcgtatgttcccccacttctctccacctcacatgcttcaattggctagaaggacaccctcccttttaaggaggtccctctctcctagaataagcaaggtggtactaaactccccatgcatgtcatcccatgagatgtacttttgtgatttttcaaagaattaatctttgaatgggctaaggcccatctattaattccaacaatataaacttgtacgcgaataaaactgggtcgtacgtaggattatcatagaagtagtcttggtataatctcaaatgacgtgcttatctgttgtgatcaattacttcatgtcccgtgaaagacccgccatgttttgatgcattggcaatgtgaatagctatgcatgatttgtgctgcggcaaaaaaaaaatcgtcatcatcgttggatgatgattcatccagaagctgttgaaataaggagcgaggataactcattacagatcggatcaactgccaaaccattattcatcacaatataataattttttccctaacgacattgtcagatcaaattaaaaagtagaacgtgattgatatgagaaatttctaacatgacggtcacctagcatattacctgatttatgacattttcgtgtagaggatcagctaggccttctgtttctccacatattagagccttagaggcgaggtcttccaataccaccgtgcttcggcgagggtttctctggcggtaacagaagccggttagtaaaaatattttttttttggaacgaatgaatgattccaatccgtaggttttaggaactaacttttgaagttttgagtctctctcgaagatgctaataaaacttcagtattgagaaaggtatgagagaactgttgtccacaaggaggttagggttatgattttgtgaaatttcataatattagacttatggatcccctccaacaaataagttttagcggttcgggctctgccactgttcacactcattcccgcttggacactcggccaccttgcaagaaaccactctacacgcacacgcgtgccatggccgccgccgccgcctcctcctcctcctcctccgccacgctctgcaagcaccacggaccacccaccgcgtcccgccgccgcctccgcgtctgcgtagccatctccgtcacggcgctcctcctcgccgccgtcgtcgccgctgccgtgctggccgtcgccgcggcccgcccgcgcccggccgacgcgacagtcaccgcgctccgcctcgcctcgctgtccgtctcgcccggaggctccgtcaacgccaccctcgacgccgtcctcgccatccgcaaccccagccccgtcgccgcgttcgcgcacgacgccggccgcgccgaggtctactaccgcggcgcgctcgccgcggacgccgacgtgccgcccgggcgcgtcgcgccgcgcggctcggaggcgctggccgtcaggctcaccgtgctcgccgaccgcctcgccgggcgcgcgccggagctgtacggcgacgtggtcggcgccgccggggacgtgtcgctcaccgtgcggacgaccgtgccgggcacggtcaccgtccttggcgtgttcaggcgccacgcggtggtgatcacggcgtgcgacgtcgcgctcagcgtgcgccggccgggcgcgcacagctcgtcctgtcgggttctcaccaaactctagccatatgttggatttttttaccattttcagtagagttgcaaaatttaaatgtctagtgttatctgaatccattcaagtttttaaggttcttaatgtgtgttaatcgctgctagtaacttgaaattcagaagaatatgtccaaatcaattcattcacctccaagttaatgagcacatcaagcatgagcaacacacaagtgaagtatgtgcattgatcacagaacaagcatgcaacagtcagttatcaacagaaaggaccaaaatgaattaatctgctaattagtatggtcttcagcattcagaatacctcaaataatacatgcaaataataatcatagtaaattgtgtgtcatatgtatcttgtgaccaaacagaagctcaaaaatatgaactgaaagttactggaacataagcaactactccatgtgaccgtctacagtgttctccgtactagtgctccaaaaaaaaacccggttttcggatgctcgagaatcaaaaccatttctatctgatgtcatcccaaatattgctataagatgacagaggaaacccaaatagactactttggtgatgtgctgagctgaagatgaaacatgcaaattaaggggctttggtcttcaaagcatcagtttagtgctgtttcttctcagctaacattgggatctttgagagaagcttgtgatcaagcactgcatattgcttcttgagctcgattagggccttctcgcccacgacatcgacttcatcttcgtatttctcatacagcattggcagtgtgtatgccatcaggaaaactgcaaacatgcatcaaattgagtgtctcaaacgacgatgagcgatagagatacaaattgttatctattgatctgcatttctgatcataattttcagattcaggcttttcagtttccaggtcatccaaagagaagagatagaagtgtaagatcatagcttttcaacattacctagtactaacaggttaaataattcaatatcctaccgtaatgaatttttttatcgaaattactatttgactgacctgcgtggagacactttccctaaacgtgcatggaagaaacaaaactcagagtagtaattttctatcatgtaacaaattcaaaagtgagaaggtattgttatatattcgatctgatgcgaatgcgagtagacatcagaacacaatattgtgcattcccatgtgtttgttttttccccaaacagtaaccaatgcaaattcagatattcgtgaataaatccatcaattttgttttgcaatcaacataattttcataatttggtaagggtgagtaaaattatagaaattaatgtacatactttatcacacagtttttctatatgcaaaggggaaacctttgagttttacttcaattttttgtcaatagatatgggagcatatttcacaattctttcagaacacacctcaaaaaactactactccctccgtttcacaatgtaagtcattctagcattttctacattcatattgatgttaatgaatctagacatatatatctatttagattcattatgtggggaatgctagaatgacttacattgtgaaacggaggaagtagtaatttgcagtgaaatctgagaaagtaaacaatgtgcttactggtgtaagacaaagtcaagaagctgaagcagctcccaattatagaaacgaaccagaggcctgcaactgtctggaagaagaagaagatgctccagtatcacattgcgcgtcaattacatgaaaagggaattaataaaattaaaaaaaaattaccataagatatgttgtgaggtcttttccggaggcgacatggcgtaatgttaagaaggcctcattgatttctttcctcagaatatgagcaatcttcaggcattggacttcagacagaattgcatctgggaactttggaggacccctgaaatttctaatatgttatatcagcctccacaaagcatgaatttgttgttctactcctctccatccattacttggtaacaagggccgaaatctctttcaaaattgttctcttttaaaactgtacatgtataggttttgttcgaagaaataaaaagagttcaacgtatacagttgagcagtgcagttgtacattgaatatatagaaaactatatactgtaatagaaatgaattcttcagaataaacagctagctaggcaaaagcaactagagccaacaaagattagaccaacatgaatagcaccaagatgacagagaaatgacatgagtaaactgatcaaatccagatatatattcgtgcttttattttttttcagttacttctaagatagctccgaaattaaccattctattaaatcaatattcatctatcaagccacaaatagatttttgtaggaggaccagttttcgattcttctgacaagaacaaaacgaagctaaattgttagtagaagaagcgagaatgaactaatcatgggggtgacctgttgatgaaggaggcggcattggcccagacgaagcagacggtgaggaagaccatgagcgag

SEQ ID NO: 13478 - DNA, 1057 bp, Oryza sativa
ccctttgatacaagaacttagatcggctatatctatttagcttctaactattcctaaattattcttgcaggtcttagccgatctgttctcttttgacattaaggactatctcgatgagacagaagaggataccacaagcgaagccttggcccctttatccgatgatgtgaagaaaactcttgaagatatctcttatcggctagaggcatcatcactagacagtttggtggtcgactgtggatcaattagggcccggctacacgaagttcaagctttaattcctgaagaactaaccgatgtcctcactccagctgcttattttgaacaacatcaattcaaactggagaaagccaagcaaagactagtcgaacgccgagaacgcaaagagattgaggctaccatccaggccaatcggcaactcgtgcatgaagagaagtcaaaacttgatcaactatctgagggcccgatcaggtctaatattgatcggcttgaagctcgaaagattgagctcttggcacaattccaagaatgcaatgccgaagtggttctggaacacaagaagctagccgatctcccatagtctgtcgaagaacaaaaggcaaggctaaaatcggctatcaagaacgtcgctgatatgaccaagtccctaaaagtcatccctggaaccgatgctcaggatgcccaattcattgaagaagtagaacaaattgggcaaagagctatatcggctatccagcgctacttgtctcagtgatattttgtgtaatagactctaggaattttatgccgattcaatataactccatattttgctaaaaaatttgcaattttgcaatttctcatatatgtgccccctaattttataatgtccaaaacattgataaaattataatttgaactaagggcgatataacaatatcagccattgtacatcggcaaaccacaaccgattacaatatgaaaacaactaagggcgatataacaatatcggccatctcaaggcgctgcaaatgcatcggctatcatgtaccggcaacatcagccgatcatgcattaa

SEQ ID NO: 13479 - DNA, 3955 bp, Oryza sativa
ttttctgggtgtatcattctgaaacggaacagcacagttaatacaaagaaatggtatgtcctgcagatgtgttcaaaatatttaaaggtgaggatggaaggttcaccgatgcaatatctaatgaaccaaggggattactaagtttatacaatggcgcacacctcctcgtccatgatgagacagaactcgtagaagccatctctttttcaagggaccatcttcaatcaatatgtgattcaagtgagctcaagccccctctagctgatcaagtgaaacgtgccctagacttaccattaccaagggcatacaagagaatggaagcattgcattatatgttcgagtatggacaggaggaaggccatattgtggtccttctggatctcgcaaagctggagttcaacctcttgcagcatgtccatttgaaagagctgaaatccttttctcagtacgcatctttccttgacatatacacatatacaaagtaatagaaaacaataaaagtaatcaataatgatatgaactatatatctcataagatataatgatgtcctaaactactacaagccaaaatttgtgtagagattaatttcaattcatttataatataaattctttcaattcatgataaaaatctatttcataaataccagacacggtatagactgttatgagatatttcataaaaatatttaaaaatgtatctgttaattatcaaataggcttgaaaggagacactatgttcgctatggaggtcataaattccaatattaatcagaggaaaagaaatggagagttcaaacattgaaatttggaattaaaaataaggaatattacaaaaaaaagtccataaagaaccaaatacaagattaattaaaatttgaaatcaaaacaaaataaaataaaaaattagaaaaggaaaagagtgaactcaagtaggaatggaatataatttagaaataactagcatttagaatataaaataaggagtattgaaaacacaatccatctgcaacacaagacgagattaagtaaaatcctgaattaaaaaataaattccaaaattaaaaaaataagaacatgagataaaatagaaatataatttagaaataagtaaaattctaaataataaatactccctccatcccaaaatataagtatatttagcatagtgacaattcaaactttttaactttgaccattaataacaaacaaaatgaaaaacacaataatgtaaaattgatgttactagatttatcattaaacaaactatcataatataaaactctttttatttaaaatatcttacttttataaatattgttgatcaaagtagtatctttggagaccgtgttagtaaaaaaatgcttatattttggtacatagggagtaataaatattgaaataatagttcatctagcaaaccacataagattaattaaaattcaaactaaaaataaaatatattttgaaattataaaaataaaaagaagagctcaagtagggataaaatctagaaataactaaaaattgatattaaaaataatgaaagaagagatcatctggaacacaacatgggattattttaaaatttggaataaaaaatacataacagttcatgtaggaatatattttagaaataaatggaattcaaaataaaaaataatttaaattccataattagaaaaaggatgagagttcaagtagaaatataatttacaaataaaaattaaaaggaataaatttagaaataactgaaattcaaaactgaaaggaataaatattggaagaatattccatggagacatcaatacgatattaattaaaattcaggaaataaagaacataaattctaaaaatagaaaggaggaaaaaagagggttcaagtccgaatacaaattagaaataactgaaatttaatattaaaaagaatatgaaaaaacatatatgtacaacacaacatgagattaataaaaattttaaaaagttaggaaaataaaaaaaaataagttttcaagtaggaataaaatttagaaataactaaaatttggaatagaaaattaagaatattgaaagaagagagtaaaacataaaataagttaaggttcatttacaacacacactgaaataagtaagatgcagcataaaacatgaaatataaaaataaattagaaacaaaataagagttaaattcagaatacaatttagaaataaccgaaattcaaaataacaaaatagggaatattgaaagaacagtgtacaaagaacataatacaatattaattaaaattgaaaataaaaaataagatctgaaatgagagaaaatgagaattcttataaaaatgcagtttagaaataacaaaaactagacattgaaaagaagaaatactgaaataggggtcaatctaaaagacaacgattgcaaatgatgatagagcgggtagcggcaaaccataaagaagtagctttggttgatagaccatttattctaaaaactataaaaccaagcctcaatgacgattaggttctatttttataatcctaatgatattaagaggaagggtgacatgcaagctatgaaagagtagggttgaagcggttgacaagacttctggaaagtaaaaagaggaaacctggccataacaatgaatagcttcaatattttaaatccaaatgacaataaagaagggtgcagtgggcaagccgtaaagaagtatggtagcggcgtttaacttgctttctaaaatctataagatccaattgttaaaggttttaaggaggatgaatagaagccgtgacagacagggcaagcaaataaagagacggtaaagatcttggtggcaactggtgtaacttttaaaaatataaaagtgaaaacccaataattataaggttcaaactttaaagtcctaagacaacgagatgattatttaataattttaaggaaaatcatgtgtaaacaataagataattttttagggtgctagctgtgtaattgcgcaagacacccaactagtttcaataatatcatatttgtttaaatatattgtatagaagcccacttacagacattgtagagaaggttttgagacatttcataaatattgtctagtgttgatgtttagaaactgtaatttaccaaatgttaaaagacatttttgataaagttatttcccccctgctgtaggcattatttagggtacggtgttaattcgtgtgtactggaaactgtaatttaccaaaaagttaaaagacatcccgcgtaggcattatttagggtacggtgttaatttgtgtgtactagaataaatataagaggactgatgtaggacatgaacaaatagttccagaagtcaatatgtgaagttttgatgagatggttagcatatcaaggtataagatggagatctggataggttcagggattgactgtagcatggtttacttgcttatacgtgttactttgaaaaatgttactttttgccactctgtttttccagaaaaaatatactgttctctttttttgcaactgttaatacaagttagtacaaattaaattatatgttatatttgtaattttctaaatttttgtttatgtaagggtgtagcagcattttgagggaaaattaatgcttgactcactactacaaaatcagttttttttctggctaaaatcaactttggcaagcaggcggccaaccgcctgcaacaaaaggctagagaaaattgtgattttggctggcgggcctcatccgcttgcgaaaataaaatttcgcaggtggcatcctagaaatccaccggaaaaatggatttccgctgatggcacatttaggtcaactgccagtgaagagattttccaaaaaaaaatccacatattccataggattttcaaaacaaatttacatcaatatattcatcaacagatcagcagattcacattaatagttctattacagtg

SEQ ID NO: 13480 - DNA, 622 bp, Oryza sativa
ttcaagagaatatttggcaacaccaatgaagcaaagttagtacgttggcatgccacagagagaaggaatgacggtttgctaagacaccctgcggattcgattcaatggaggaatatcgaacgaaagcacaaagactttgctgccgacccccagaaacatgaggatatgtttgtgtacggatggcatgaatcctttcagagacatgagcagttctcacagcacttggccagttctcattgcgaactttaacctcccaccatggttgtgcttcaaaaggaaatatattatgttgtgcttgttaatccaaggtccgagacaacccggcaattacatcgatgtgtcttggagcctgttatcgatgaccttgagattctgtggaaagagggtgtggaaacttgggatgcatatggtcaggagaacttcacactacgagttctattgttttgcaccattaatgattatcccgcgctgggtaatctttctggacaaaccgtgaaaggaaagaacgcatgctctgactgtatggaacatacacgcagtaggtggctgaagaaatcaagaaagatggtttacatgggtcataggagatggctccccctactgcacgcctttagaagaaaga

SEQ ID NO: 13481 - DNA, 1204 bp, Oryza sativa
tcggttaatcatagataactaatcaaattcatgcgtgcaagcagcgatcaaaggagtggatgatgaataaggccgataagctaaaacaagctgtccgtacactgtttaggacctgtaatgacatggtggacaagatgcacttagtagacgctgtccaacgtcttggaattgatcacctttttcaagaagagataagcagcacactaagcgatatcaatggaagtcaatttgctagcaatagcctccatgaggttgctcttcgctttcgtttgcttagggagaatggcttttgggtatcaccaggtatatatcaatctctctctctctctctatatgtgtgtgtatatatagatattacatatatatatatatatatatatatatatatatatatatatatatatatatatatatatatatatatatatatatatatatatatatatatacgtaatatatatatatatatatatatacatatatgtatatacatatacatatataggacactcatatggggcaccatggtgcccgggcaccatggtttcaaatgcacaaaatcactcaaatttttcaaaattttcaaattgtgagtatatacctagttataagaattcgattcatacctatacctatcaacaaaacaactcaaatttaactttatttcacaatccatgattacatacctaactaattatatgtatgaatgctatatacctagaatcaaaatctaacaaaaacaagttcaaattcagttcaaacttgctttcaactagttagtaaagtagttaatattaatacctaaataattgaaaaagtttcatgctcatttgaattgggtatatactcaatttcaacaatggtgcccgggcaccatggagcaccaaacaaatttactacatatatatgtatatatatatatatagcttaaatagaaatgacaagacatgcataaatactagattgatgcagagttcgtaagtagattgattaatgaatactaggatatatagtctcattttttctgggtgtatcattctgaaacggaacagcacagttaatacaaagaaatggtatgtcctgcagatgtgttcaaaatatttaaaggtgaggatggaaggttcaccgatgcaatatctaatgaaccaaggggattactaagtttatacaatggcgcacacctcctcgtccatgatgagacaga

SEQ ID NO: 13482 - DNA, 2586 bp, Oryza sativa
aggcgggcgggcccgcccgtcagcggcacgcgcgcggggaggaggccggatgggccgcgggggagagcagagagagggagagagatgggccgagccggcccaagagggggagggggggagaaaagactttttagagcttttctttttataaaaccattttaactttgtttatttcttcttaattattatttgtgctctgaaaattccactaaaatttatttacgcattttaggcttttaggaaataaacaaaaatcctccaagccttatttgacttttaactttgcacattttaattgttggaggctttcacatggattttacttattctatgcataatttagaggatgtattttagagtcgttttgggacgcgacaatgatgacgatgacgatgggtcgcttggttccggcgtatgattacggggacgtcggccgggttctcgagaatcatgtcgtcgtctcccgctgttgtctcggcgccgatctccatcatcgtcgtcattattgcgacgtcctcgaccagtatcgcccagcaaccgccgttcgcgatcgtcgtgatcgtggcggttgtggcggttatcacggtctcggtcttcgcttgaacggcctccttgatgttcgttatcgtgacgccgtgaagagatatgacgccgggaatggttctcgttgtctcgtgtgcgtcgtgcctctcggcggccattcaagtgatcgcggagatcaccggtgccgcgaggtggcagggtcgctcgatgaggcgattcccgccgttcagggttttcaccatttgcatcgccagttggtggctgttccgggtgcgctgcagcagcggcctcttcgaacgcgttgctgaggttggtcactgattcccgtagtcgttctgtccaatgtgcgagatcgtcgttcagaacgggatcgtagggggtttcccttagtattgcgttgacggctctgatgtgctgggccggagtagtcacttgattctccgcttccgcattggtgcgcgctgacgtgccgacatcgtcgatagccaatacctcacgcggcgtactcgttgtcgatgatccatagtcttcgagtaggtgcaagactgatggttcatggggatcgatgtcgattaccccaacaaattgatctgaaatcggcgtcactccttgttccttgtcctcatctctgatggggatgtgtgactgctggaccttaggaggtggcgtcttcatggcggtgagaaagaccttgcagctcgagaggtcgtgattctttgtcttgtgaataggacaatagacatcacgagttggagaggtacgctgaattccacgctctttgtaggcacgaatttcagcatggacgttgagaaagacccagcaggcttgcagggtgtgtttcttggttttgtggataggacaccaggaccttgtcacctcggaagttatcctcgtcggctcgtgattcctgtcggaaagacaaggcttggccgcactaggatccttctcgggttcggatgtcgtcgacgttccgatctctgcttcggcgggaggatccttcgacatggagtcgccccgggttgtagccactgcgttctcgtttccggccattggcggaccagttgagatcggcattgtggtgtaaaccggaaagacgatttcactgacttgagtccacaccagtgttgttgaagtaggaactccttggttgaggttggtgttgacgctgttgtcaacgaagctggatgtcatagtagtagaaccttgagcaccaagtcccccacctggcgcgccactgtcgacggtggatacccgtagaccggatatagagggtattgggatacgctggtacgaggatctacgtagtacgacatcaagcaaacaggaaacagggattatactggttcaggccccttggtaggtaatagccctaatccagttgatgtgggattatatgatggaaaccacagattataaagggaataataaagctcgacgataccgacaagatcgtagtcgagttgatccgactagatctcccggcgacttggtttcgataagctccggcttcgtaggctgtggtggatgtgttggctctgagattcgatgccttaggtcctcccgggggtcccttttatactgtaggtcaactggtctccaagtaagactcggagacatcgaacccgacacgatataatgacgacccagttctatccgagtaggactctttccatctgtagactccatgatggacttccttaacctatgctgagaacatccatatacacgcaaacataccatatcgatacgtgacgtatatcgaatggtcgagggtatactttacccgtaaccctgacaaaaacattggtggagatcagtggcgccgaacgtaggtttacacatggggctggttcaagcaaggagctagccctagccagctgctggctaggacaatgatgtatggctctggcaccgcacatagtaagccacagtcactggctcatatcactagcacaacggcaaacattgagcgagttaacaactgctccctccgtcccaaaaaaaaccaacctactattagatggaacatttcctagtacaatg

SEQ ID NO: 13483 - DNA, 6578 bp, Oryza sativa
ttcaaactgttaaacggtgcattttttgcaaaaagtttatatacgaaagttgcttaaaaaatcatattgatccatttttgaaaaaaaaattaataaatacttaattaatcacatgctaatggaccgcttcgttttctgtgagcactgtgcgtgttgggatccagtgatggcgaacccagcctgcctgctttagttcccaaattttttcccctaaacatcgcatcgaatctttggacacatgcacagagtattgaatctttacctattataaaattttaagatgtttttgccgtagtctcggtacgtcgtccgattcgctcgctgccattatcctattgcaattccactgcacaccacgtctgggccgtgcgacagccctggcggatgtacgtttgcccttccagttcacgtgttgtgtttccgttcaatttggctgttccagacggacagaaaacaagaccgttttgattcttctattcatacacaactttaattccatagatatacacaattttttcaagcgaaacggactctgaaacaggaaaatttagggttcggttgtgtaggataagactcgatttcatgcgcgatatgatacggttttgctccgattcttgggaaaacggaaaaaggaggagataagaatcaaaacccctcgatcaattttgaattacctccaaggattcggttggatttcacggaggagggagcttcaggcgttctctgtcagcgatgggagtccggccggaggtagatgacgacactgcagcgctgggacccacgcgacagtgagagggggagcaggggatgatcattagacatgttgcttgatgggcctgatgcgcgattgtggggcggaagtggaggggaggaggagggaggttaacaggccggctcggctgcggataatgggctcaaaatagcccagggagaaaggaagctttttaataaatacgaaaatgatgtttatattattaaaattagcaatgaagatctgaaaattctaaaaacatttcacatagtgtaatttatcatgtagaatttaataaaaattaaatccaatcatattttatttggaaaattttatttcccacatttaccttgattttcatgagcctttcttttattcaacatcgtatacatgtgtaattgtgattttatattttaattaattacataatgtaaatctttcttaattttttcttaaatttctcatgttttcttcccgttgcaacgcacgcgtattttttctagtatagataaaaacaaaaactaattatacagtttgcatggaaatcgcgagacgtatcttttgagcctaattagtccatgattagccataagtgctacagtaacacacatgtgctaatgacggcttaattaggctcaaaagattcgtctcgcggtttccaggtgagttataaaattagttttttcatttgtgtgcgaaaaccacttccgacatctggtcaaacatccgatgtgacacccaaaaattttcatttcgcgaactaaacagggcctaaaatagacttttgaacaaatatcaataaacatttgaatgaatatcagcgtctgatgtgtaaggtggtgagcgtggtcacgcagacaagacgactatggatgccttatgcttggattagggatgaaaatggcaaaaaacaacattgtttattaaagacaacttacgtcggttgggaattttcatatttaacagtctaactatttagtgagaactacaatatgatgctaaaagaaaacataaaaaaattcaaatttttatatagccaaatcggaaatggtaaaaaatggcactatttatagagaaataatatatattcagttggtcgggaatttcagtcaccattttcattcctacttgaaatgcttgattgatttaataggttgatggtggattgctggctaatgggttagacctaggactaagtgggaggtctaggggtttggttgtggcgtgaactatagctgggttagttgacccaccctgcataatggagggtcaaggattcctatttggtgtagttgcaatcccagtcaacagagccgctcgtcatcagccatcgatcttcacctgtctctggccacaatcctcgtccctgtccttcgttcccgtccgtcctctatcttccccatcttcctctccatctctggctcaactcctcgggccatgccacgcccccatgccctagctcttaaactctagccaccgagggcagcggtgtggccaccagccatcgcgcggggattccgccgtcaccaatccaccacgtgcaggagtagcaacactaggcacaactacatggtcatacctgtggtcatgaccgggaaaatgatggccattgcgaaagaagaagatagattttgagtattatgaaggatcgaatcataataactaagccatccagagaggggtgaatggttggtatacccaaaaaccgaaaacttttagcggaaataaaagttatcctcgaattcaacggatcgcggtctgaccgaagtgaatgcgccggtctgaccgcctggaatacgtcggtctgaccgagatcgaacttcggtcgaaccgccgagatcgccagccgcgcctgttgtcgacgccggtctgaccgcctcgctcccgccggtctgaccgccaccttgccgccggtctgaccgccggtgagtcgtcggttagaccgccgaaacccagtgaaacacaaatcgatgaactcttaaagtggatgatgactttattgattctctctgtgtttacaaacagcaccaacatcacttcttacaaaaatttcgactaaattcgaaaccctaactcaaaactcaactcaattgctttcaaaagcgataccgggaagcctcacactccccctctatttatacccgaggtaggcaacctaaagccacgaaccaaactcatactaggagtcttaaacaccttaggaaaccctctagtataagaaacaaactttacataaccaatcatactaaatttggactccttccaaattcgactccgcatcccatacgcatacaatacctccatcgtatgccatatggaatctccatcaaccacgtgcatcaactctagcctaagtatcccgtatgatctctgaccaccacagacgttatcttatccccaagccgactcccggtccatcaccgcaaatactctcccgaggcatcgagtcacctacatatgaaataaacaaagaaaccatattccgagaccaagctatctccaacttgactcattagtagtaaacaacagtattacatatgtatagtatccatctagaagccataacaatgaaacaatcacggatatccaaacaaacaacctgaaaccgaaaccgacacagcgttagccagtcagaccgcgggctgcgccggtctgaccgcgcatataccgctggtctgatcggcaacacctgcccggtctgaccggacccaatccagcagtacctgtagattcacctgtgaaatccaatcatctccaaaactacttcgtgaataaattccaaatatcaaaaccaataatctccgatgccaattgttcgttacagaataataatcaaaaacctttattttacatattacatgaaagtttttggatttttcaatcgtaagtttttgtgattttgagatgaaagttttagatttgaattgaaagtttttgcgattattgagatgaaaatttcagatttaaattgaaaattttgtgattaattttgagataaatgttttcttatattttaaatgaaagttttgtgattttttaaaataccacgtgaagctgaaccaaaaccggcaagggatgcatggtggtgtgcgacttgcttcgctagtgtagctgcaccaactagtaacccttgggatggtcctccaatggtggagaaggtcatgggaaataaactaaaataggatctttcgtgccacaaaatttcaaattttacatatgaacctatccactaatccacagcaagaaggaaaaaggacgcgattatatttactaaccaggtgttatcagtaaaaataatgtttatgatagcttaaacaacacatgcttacataaacataagcttacataaattgatatgatttaaatttaaatagtatataaaatgatgatttaaatgtaaaagtaagatgatgtggctttacgagagaacaaaagaaggaatataatttagatcatacatataaggtctaaaaaaattgagatgatatggcttagtgaaagaataaaataagagagataatttgaaccatagattaatcatgtaaagactaaaaaacaatcgatgtgatatgactgaacgagataaaagagaaataacattaactaagtgaagatggactatataagtatataggatattataaaaaaaaagatggagagatatattcaaatattatgtgggataatttaacatgtttgcattttgaatatctaaaatttaataaattataaaattgtagataatatagtgtgcttgcatgatgcttaaatgtaataattgtttgtgaataatgatgtgatatcttttgcatgttaaactctagaattgagttataactttattatagtaagagaggataggattgttcattttcattcttctcccatgtggagaatgaattcagttctgaaacttgttttctgtttgcaaaatttcataaagataaacatggctgcacttgcgtcgtccatagacttgttttcaagacaaattttgcaaaacctagttagtttaagaaaaaaaagtctaacaacttgacatttagatcttagcaatgttcacatatttgagcacaaatgtttgcaggccatcctcattccattaccttaataagttaataggccagccttgtatagaaatgtaactgggccttttctggcagagagttgagtttaatcagcccagttgacataaggccctagtgttaatctcgagttgttgtttcctacccattttgagggaaaaaaaaaaaaactagcagaacacttggagtggtctagtggattcctccaacggcgttcatcagtgtaatgaaatatcgtgtggttcaagcgcgccacatttgagattctccttcacctcggtgtcgatcatggcccctcgaggccattcgtccctccgcgaggaaccgagaacctcatcagaaattgtcaggtcgtagggtgaagaactagaatattagcaacttttctatagaccgtttagtagttcgcatgtggaaagaaagtaagggagtagaagttggaaaagtatatataaacaacgtagcctaattcaagaacatttttgcatggcatactcacgtgagcgaaccactctttcttttttttacaccacatttttttttcttttctgacaaattatacaccaaaactttacttgttcaattgagatttgaatatttgtatattaaaaattgagtgaattacatattgggccagtttttattaccatggttgcatattggactaggattaaactataatttttactttagactagttatctttgcataacgtttcagtttaggcccgttctactccaactctcatgtctttcgtctccaagagccaacagacgatctgggcagggtgactgtgacacagagcaaatcgagctcattactagctggaaacaaaaatagaaaaggagatgtctctgtctttgcttgttcactgtaggctggaagcaaaaattggaaaaggagagatctttgtgctttgctcattaacctgggggcttttgctcattcacctggggaatttggatggtctcaccaatgccaggagaacataagctcattggccaatggagaagctgcaggagcagccttgaatcaggtacaaggactagaggaggatgaagatgcaaggactaaattattggggtgtggacctactagtccaaggtgcaaagcttggtaacaagatatggtctaaaatgaaaagatttgatatcacctagtccaatatacaaattaggtaataaatgtaggtccaaagtgcaaatcgccactataacaaaaaccttatatagaggctctcttgaacagacaattttcaaaatgactctaagttttaaagctctatagtctagagatattttttagaggcactttcaaaatcgcctaaaatatttttactctagagacactttagagacattttcagcatattttattaaatttatcttgtagagacatcttttcggcactttaaaatttgcctcatatgtaaaggtattttcttaaggcattttaaacaatataaagatatttttccaaatattaatatatatcaagtaactagatataagtaacacaaatcacatatttacatgtaattaaatgaggttgagatggttagtgcattgaagataaaaaatgtcaactcaagatgtctcaagttcaaggattggtaagagataatgtttttctttttttttcatattgatttgctatagttgtcataacatattaatgtctctacgaagtgtctttatttgcatagagacatctttataaatgcctcttagttcgtagagaca

SEQ ID NO: 13484 - DNA, 684 bp, Oryza sativa
ttacgcatacaaaaaatcaccaccataattaaacattgtaatgataagatagataagaagtgccatcgatacacggtacaaatttgtcgatcccgacgaatcaagcatgcggtaacctatcggccccttctaggtcggtcagaatgcattgcattctcgtggtccttcaatcgttgatactctacttgtgtttctgactctgttatcttctggccatgatatgatggagtgacattgtcgatccatcgagtaaatccacccatccttggattgccctgtaaaaatagtaatgttattcagtttgggtagtaattttgtgcaaatcatagcggattttgtaaatggttagacatacaacgaaatcgttgtctacattggggcagacaaaatatctccttcgaaatgtttgttcagcaaaggatgtagccacctgccagcgatctctgcacccacactttggacgctcggaccatttatgtaaccctaatggattgttcctccagtctaagcttgcaatttccacccgacgttcgtactccatccaagcatgaatgaactgtatggtcggtgcaggttgcgttatcggcccgccacttgaagtaactctgactgggtcaatccattgtacgaaagtgtgttgtcgtgagcataagttgttctagcaccatatgaatgaaaagaact

SEQ ID NO: 13485 - DNA, 604 bp, Oryza sativa
aaccgatgtaaatgtatgtaggtcatagtaagtattattattcttctgggcaatggtggctaacaaacgaggcaaattatcataagaagcttcgaatgtgccatacttcatctcaataatcttttgtttggctctccaggcctttgcatagcttatggtgtacttgaatttgttctcgatgtgcctaataattgattttggttcaaagccaatgttaccaacaacactgctgtacatctcacttgccacaaaagcttaagtgatgtttcggtgatacttctccaccccttgtaagtagcacttgtgctcggtcacaatgctaactttccaataatcattccatttacccttatatgcatggacacgccacggacaatcttccttcatgcacctcacttcatacacataatttgttgacttgaccaccctaaactctctctgcaaggaaactgtccaatgcttcaccgcctccttcatctcatctttatgagcataccttgcaccttcaattacctcgttctccttatactcatagggtacatgatcaccatctgatataacaagtccagagaagtcctcatttgcccaatcagaggccattaca

SEQ ID NO: 13486 - DNA, 563 bp, Oryza sativa
caagcagagataaaaaatattacttgtgtagatcaactctagttgagatgtccttaacaagacattcttgtctcttcccaaactatcgcatgacatggtacggaaggtggtactcaactgcccagaaacaaatcaattggcactggtacatgaagtaatcggagcctcgattgcacaacgagatcagtgtaagacttgtagcctcagtggtgtggtatggtaaccactcaatctataaatgttgaagagttgtcgtaggttagtatttcaatcatataagtaaatgacgaattagaagtgatagtggaagtacttatatgtgtaggctgtaggcagtccatcacgttgatgtactgcttgtatgcgacgtcccggtgagcatgtgcagtggctatactctcaaataggtaggccactgtcttctccatgtctggctcattgtagggccaaagggtaaagctttgcctccacttatgcttgccaaccggttgtcttagccacatccacatctgaatcaccagcacacaaccacttatgttggatgatggggcctggcgacaacc

SEQ ID NO: 13487 - DNA, 531 bp, Oryza sativa
gctcggtccccctaaagatcaaagcaagattcatcaactgaacggagaaagatcgtcggcgaggagagctggtgaagggagaggatacggacgggcattaatccgtcgaactgcgtggcctggaccatcttgccgagccggagctggtccttcccgatgggggacctgcacgacttgcacgaggaccgcccggacttggcgtactccgccttccaggccttgggcggcgccgccattccgccggccggtgcggctggtgcccttttcctcccttcccctccgccgcttcttggcttgtcctagggcctagaaagaacccacacaacgagaaaggagaaagggaagggaaaggcctgatgatgatgaggtgtaaaaacgttaaaaaggaaaaaaaaaatctcccctcgaaaatttggggcgagttgagttaatttgatggtttttcttttaaaaccctgtgccatatcctccccgaatgtgtattctcatatgccatttttctggggatcctctagagtcgactgcaggcat

SEQ ID NO: 13488 - DNA, 600 bp, Oryza sativa
cggagtttccagtgagccgagattgcaccactgcactcaagcctgggtgacagagcgagactccgtctccaaaaaaaaaaaaaaaaaaaaaattaactgggtgtggtggcaggcacctgtagtcccagctactcaggaggctgaggcacgagaattccttgaacccaggagccagaggttgcagtgagctgagattgcaccactgcactccagcctggcaacagagcgagacttcatctcaaaaccaaagaaagaaaaagaaatgaatcattaaattcatctgaaattttggataacacagcgagactccatctcaaaaacaaaacaaaaaaaacataaagcaccgggcacagtggctaacacctgtaatcccagcactttgggaggccaaggcaggcagatcacctgaaggctggttcaagaccagcctggccaaaatggtgaaatcccatctctattaaaagtacaaaaattagccagggatgatggtgtgtgcctgtaatcccagctactcgggaggctggggcaggagaattgcttgaacccgggaggcggaggttgcagtgagctgagatcatgccattgtactccggcctgggt

SEQ ID NO: 13489 - DNA, 571 bp, Oryza sativa
atcaataaaccgaatggatacaccttgggcgtcaaactcttttattaactggatcatgtcagcagtatcgcgcccaaggcggtcaagtttcttcaccaagatgacgtcaccttcctccaccttcatcctcagcaagtccagccctttccgatcgcttgaactggccgatgccttgtcagtaaagatgcgatttgctttcacgcctgcgtctttgagtgcccgaacctgaatatcgagagattgctggctggttgatacccgtgcgtaaccaaaaagtcgcataaaaatgtatcctaaatcaaatatcggacaagcagtgtctgttataacaaaaaatcgatttaatagacacattaacagcactgtttttatgtgtgcgataatttataatatttcggacggttgcaaaattgttaatgaataactgtcaggtagggagcctgatatgcctgtcgactttctaacctctgaccaaaaacagaattacggttgttatgctgcagaacctaatgacgtgcaactggcgcgctattttcatcttgatgaacgggatctggccttcattaaccaa

SEQ ID NO: 13490 - DNA, 2181 bp, Oryza sativa
atcgaggtgttaggattcgtcagggagctgaggttgatggcttttgaggtaggctatgaagttgctcccgagtatcgccagatttcccatgaccccgacgaggagaagtgtcgtgttcgtgtgacgttggctagtgatagtgaagaccttccgtcttataagttcgaagctggaggaagatcgtactgccatgcttgtcaagaagtagctttggtggctattggagagttgcgtcaacactttgaagaagagttggattcatcagctttccagtatcatcctcataagcctcatggtcaagattatggaacctatacctgtccagatggtgaagagagtgccactctgatgcatgtggtgcatatgcttagtgctatggatgcagtaagtgtggagcgagacaaagcagctcatgatagggaaaactggaatcgaggcaagatttgcaagttgaagagcaaggtgcaccgtctacagaaggaattagctgaacttaaaggagagacgccaccgccaacatccaagcttcgcctcactgcaaggaagagaacctgtccgccccctcgtctccagttagcttcgaagattcgcgtgatgggtgaagctgtgcccgattgtgctcaacctgtcatcgacatcataagtgatgaggaagaagaggaagatcctaaagaaagagagccagctactccagaggaagaagattcatcgcttcgttccgacgcaaggcggaagtagacgtttagttagatcgttgccatagttcgttgtgttagattgcttgtttaagtttgcttgtgagtgtgtgggttgtagttgttgcttacatcatgggtgggatgtaacagcatgagtctagttcttttgcttgtcagagtgtaagatagttggtgaggtagtgttaatgcaacttaaatgtaatcatacacagttaagagcaatatagaaatttaaattaattaaataacttcgttctaaggctgtctctctgtcgttctttcctgttgtctctgcttatcgtcagatggtgaacacgcgcaccggcactggaagtggaagtggaagtggagccaataacaatgaagagaactcaacgctagctcagattttggcccaacagacacaactgatcaatctgttagtgcagcaggaacagaatcagcagggaaacaatcagaaccagaatccaccccacctccccaaaataagttggcagatttcttacgtgtgagaccccctaccttttcaagcaccaccaatccagtagaagcaggagattggttgcatgcggtggagaagaagttggatttgatccagtgtactgagcaggagaaagtttcttttgcttcgcatcaactgcatggacctgctgctgaatggtgggatcattttcgccaaggcagggcgggaggagaacctattacttggcaggagttcacagctgcttttaagaagacgcatataccgtcaggtgttgtagctctaaagaagagagagtttagagcactcaaccagggatctcgttcggttactgagtaccttcatgatttcaaccgtttagctcgctatgctccagaagatgttcgcactgatgaagagcgtcaggagaagtttttagagggactgaatgatgagttgtcttatgctttgatgtctacggatttccgggatttccagcagttggtggacaaggcgattcgccaggaagacaagtataaccgtatggagcagaagaagcgcagggctgcccaatttaaggcacaacagggcagtaatcagaggccgcgtctcgttactggacctcaagctccatcgtaccctcaaggaggatcttcgtcagttgtccgtccccaacgccagttctacaacaacaatactggtaatcgtggcaatgacaaccgcaacgtgatagctcgtcctgcagcaactccagttcagaatcagtctgtcaggaaggaacagggaagcaagcccgtgatatgcttcaattgtggtgatccaggacattatgctgataagtgtccgaagcctcggcgtgtgaagaacgttccagccccgaacaactccaatgttccagcaccgaaggctcgtgttaatcatgttgtagcagcagaagctcagaatgcaccagatgttgttttgggtatgtttcctgttaactctatacccgcaactgggctg

SEQ ID NO: 13491 - DNA, 4686 bp, Oryza sativa
ggctcgattacgtgtcttggagatcatcttgccgcgattttatctccttaccttgtttgtttttaggcttgttgctttgcttgcttgatggatttccgtcttatgtggttcatattatccaatacatgtttgatgttaggatatggggcttgaaggaactcatgttgttcatattatccaaaacttgtttgatgttaggatatgatgggactgtcagtgtgcttggcagctggacattagtaatcactgaattattgccattttgccaacttgctgcgtcatattactggagtcccacactgtaagttgcagaatcctttcagtttccacaaactagcatgccaaagatagtaatccgctcaaggtcgacgcttgtaaactcttatcgtttggagcagggaaattttcctatttcttgcaagaaatgaattacttcacaccatttgtagcagtgattcttttccctacttcttgtaaactctttagtttggagcagggaaattttcctatttcttgcaagaaatgaattacttcacaccatttgtagcagtgattcttttccctacttcttgcaagaaatgaacgacttcgtgtgaagttcatgtgaaattcgccaggcaagtttttagaggggagaccaaagacgtgaaggcaccaatgttttgtgacacaagagatatgtgtagattgcaaatcaataggcaaacttagctcctttataaaattcccaacaaacataaggttagggatctaccagaaagcaaaatctgccgacgtagaccctaaacacaaccgtggagtaattactcgtgcaattaacttagcttaatctccctctaggctctagtagtttcagtttcagtagtactgtagttttttcaccagctgaatctgacccacagcagcaacgaaccagagcgcaagaacacaacgcatttctgcgttttttttttggctggaaatggatatattccccaagcgtgacaacaacttttgagtgccagtgtgtgtgtgttcccctcccctccctgcttaattacatcatctctaacgtaaatgattcgtgatcttcaacgggaggaaaatgacgctctcttcgacctccagagcggttttcctcccgagacaaaaagcacaaatccaaagctccccaaaaggctgtacaaaatggcaaaaagaagaaaaaaaaaagggagatcgaatgatcccacatcggaatccgacctcgaggcgacggtgtatatgagcgtctgaccgtgctagctccggagcgcgaccgcggcctcgtgcacgagcgagccggtggcctgcgcgacgccgtgcgcggcgctctcggtggcctcccgcggcgagccagactcggacatgcggcggacgaaggcgacgaaccggcgccagttgtccgggtggaagaggtcgggccccatccggaggtaggtgaaggcgaccatccggtcctccgccgcgcggtcggcggcggcggcgaccacctggtcgtgcgccgtgccgtcgtaccgcggcagcgcgttctccccggtgagcccgacgcccgccgcgcgcgccgcggtggacacctgcctgacgagcgcctcgggcatgcactgcgcctcctgcggctgctcgtggtcgcgcatctccacgcaggtgaagttgagcacggcgccgtggcgcgccagcatgcgcgcgatcgggaggtagccgtcgcggtgccgcgtgttgtagtaccccgccgtgagctccggcgcgtgcgaccgcgtgccgtagtgccagtggatgccggccaccttgaccgagatcttggcgccggcgccgttgccgaacacggacgtcgcgcccgacagcacgcgctcgccgtgctccagcagcatctgcgaataccacgacaggaagaactcgccgtactcggtgctccacccgccgcagtcgccgcggaagaacaccgtgtcttccggccagttgttgtagccgccggcgtccgtcggcccgccgtggccccactccggcttgcccctcgcctccgccgccgccttcaggctgctacgcatgtactgcaccacaggacgtcaaaatttatccagataagagtttttctcgaatccatgacgacccaaatggagtttttgctcgtcggagattagttaccctgtcgttgcattggaaggcgccgatgccggggaacctccaggtgccgttgctctccgggtaggacgggtaccgaagctcgccggcggggcccatgccgacttggatttcctgcacaaggagacgcacggatgatcagcgtcgtcgtcgccgccggcgaaacggcaacgatatcaaaagagtccttcctcctacttacgacgatggtgtcgccgaggaaggaggcgaagtggtcgcggaaggcgcgcatgaagtcggtgtagcactcgacgggcgtgcggcccttgaagacgggcatggcgtcgcagccgagggagatgtactcgaagttgcggcgtccccattggtcggtgtaggcgaggtcgttgtccttctccatctgcttcaccacccacctcgggagcgggatgctgcacgccacaccaacaacaagaagaggttagaggagaaggatgagatagatgatcgaggaaggagacgagagatgcgtacttgacggagtcgccgacgttgccgccgcactggtggaaggacatgacggcctggaccttgaggccggtcttgcgggccatctgcatgagctccacgtagccgtcgaagttgtaccgggcggagccctcgatcttcacgatgccccaccacacgtgcaccatgatctccttcacgccggcgctcttcagcgccgacaggctcgccaccaccgccttacttcggttcagcgcgctcccgcacttgctcaccgtgtccagcggcatcatcacgaacaccggcacgctcgatcttctgctgatcgccgacgccgactgcacgtgcctggacaccgcccggaacgccaccaggtagcacgcctgctgcctcttaattctcaggctcgtcgtggccgacgacgacgacgacgggatggcgaccaccgaagcagctcgccgttcatcaccggcggtcgcgaagcacgctgccggcgcggcgctctgagccaagttcaagggcatcgtgtagaaaatcttaacccgaaaatcgaatccccaacaaaacgcgggaaacaaagaagtgatcaacagatgaaccaccccaaaaggaaattgttttttttttcttttttgggatcgacacagccttgatccgaacagaactgggagagatcggattattgggaggttggggattgggaatatatctaaagcccaaaaaaaaaaactaaaattattaaaaataattattcaatgtggggtggaggtcgatgaggaggaggagccgagcgcgaacaagtttatataggcgggcgggagctctcgagagagtgccacgtggctggtgtgaagggaggaaacgagtggtcgagatgaggccggggccgcggcgatggacgggcgggattgtcggagcacgtggcggttgtggattgggctacgtggactggcgagagctagtctcgcggcggagacgcggagtggccgtttttaaccgtttcctcctatgtgggattttagctcgttttttcctactctcccggtgattcgaagaacctaattaccgtggtttcatcggttatttctttttttcgcgaagaatatgttgatttcttctgaattatctagctctcacttgctgaagatttgattcgagtagcaggatgattaagctcaatctagaccactcgaagggaacggaatgattgatcagcgaatctacgagtgtctaaaattctcagatcagggacagattgctgctgctacagcacgtactccggattgagaacaagattcagaaaatctgaacaacacgttgcattcattggagccatggaaacgatgaaccaatcaatcagagtaaggttctgggaggagctgcagattgggagcctgaaactcagccgcgtggaagcccgcccgggaggagagggagaggaccagattgttcagatacatcgccatcgtcgtcgtcgcatgttcagactgttctagaatctgaatctgaactccatttcatacttgcccctgctctccccccatgcggtcctgatggaaagatcgaaggctatagtttgggcaagacgacgagatcttgcagaaggccaatttatgggtttttttttttactttattcacccagcaggttcagtgatatcacgaaccacaaagccatttacaaattctgggagagggtctattttggtttgatgccaaaatgtggtctactaaatcgggagaatatagactatttaccattaaattcgcgtgccttaactttttttaccacccaatccgcatacccctttataatatatcattaggactgctaattagtctatttggtaccactttcaggttttttactgtgtttctcatttcttaattccatttgcatattttttcaagatttgtggacgtttttgcccctaggcccacccgtcagaaccaaagagagatatttctctctagatcgatcgatccctccagtcttgtcaccgtgagcaccaacctcgccgccgggcacggcaaaccccgccgccgagcacccccactccgccgcccaatagccgccgca

SEQ ID NO: 13492 - DNA, 13946 bp, Oryza sativa
gagacggcggcgccggcgaggtgttcggcagaatgccactgcggcggccggcaccaaggcaaaggctgaggagtttttttttttcttcctcacgatttttttttaaaaaaatgcaaagaaaattggcagcggtgcttaaattttttttaaaaaaagataatccgagcatgtgtttaattgatttggcacaaactattgacttttgaaatgaacatcattattatgtgcttcctccgtcatataatataagggattttgactttttcttacactatttgaccactcgtcttattctaaaaatttgtgcaaatataaaaaagaaaaattgtgcttaaagtattttggataataaagtaagtcacaaataaaataaataataattctaaatgtttttaaataagacgaatggtcaaacaatataagcaaaaagtcaaaatcccttatattatggaacggaggaaataccaacactacatgtttgtcttattgaccaaagtctaagctgtgaattataaaccactctaataattcttttgtatatgctaaaaaatgaaaataaaactaaaaccattgaagtaaaagaatgacacgttcacttaaaagtaataaaggaataaagtaaatactttacgtattggttacttctctatagctctataacccatttgagaaaaatatattttacagatctaaaaattaagataagatacacaaatgaaagtctaaaaatttatatattatagatctaattgcgtttgatttgctcaggtcatctcgactaaaatttttactctctacgattaaatctaagagtaaaaagatttactcaagataatatggataaatcttaaacacccatttacatatctagaagtagttttcggatttacaatatatgtatatatgtatagtttgcatcatatattttcctcatttaggatgagcctcatcggccaacatattatacgttttgtgttgagttaaaaagagaccggatgcttataaaagctactaaggatgaaaaaaataactaaaaacataaaaaagcagtagagtggctgccgctacaagcctacaaccaatgatatgctactatggttgccgaatatgatcctttttactatggttggtgcccaaactatgagctcacggaattttcatcactactccttccattctaaaatatgaacacttctggcatttaaaatttacactaaaatataaatacttcaagcgctatttagagtattttctccaccgattatatccctctcaaatatgttcttatggtttcttaaaaaaatatatgttcttatgttgaatcctaatcattatgtcatttcataaatctatcaaaatattttctacttaagcataaattctactcccttcgtttttaaaatataacaacttaataacaaattcaacaatcttactactacggatgagattacaaaaaaaaatagattttagaacagatgaagtattgtattaatataaatttcttaccctcaaaaacttgtcgatccttctctattagtacaaccagcagcctacatttctagatgagtaaagtccatcaccggtccctaaacttgtaccgctgtgtcatcccggtccctaaactcgtaaaatcgaccattcagatcctcagacttgttcgactgtatcatcccagtccctaaacttacagatcactcgtttaggtcctccaacttgttcagttgtgttaccccggtccctaaacaggacggtctaaaaattttatatcaaaaaataattcataactttttcatgtgaactctaatgaagacaatctttatatcaaaattgtagctctagacgtgacctacaactttatagttgaaaagtttttgaattaaaactgtttagggtcccaaaatattggtgcatgtttatatattttgaaattttaattttaaaattacattttgggacaaaaaatgacttaaaataaaaaaaatcaactacaaagttgtagatcgcgtccaggactgtaagtttgatataaagtttatcttcattagaattcacatgaaaaagttataaattatttttaaatataaagcttttagacagttctatttgacccagatgatattcaaatacaagtttagggactggggtgacacaactgaataagttagagtatttaaacgagtgatctgcaaatttagggaccaggataatactgtcgaacaagtttgagaacctgaacagtcgatttgctagtttagggaccgagatgatacaacggtggaccggtgatggactttactctttctatattctaactgctcctaattgattatgcaactacaccatcttttatattggattctcggatgatattcatcctaatatccaatatccactcattagcagtttagcaccgagactttgagattaggccaagtcaaagcggatccatctgctcatcccggaaatgaatccaaccctctaaacccggaaaccctaaaccctctaagagcacgaatgcacgatgccatttccactcggtaaaaaaaaaagaaaaaaagaaaaaaaaaagagcaaagcaaagcaacggcttttcgcccatcggaaaaccaagcacgacgacgtataaaatccacgtttttgagcgcgagaaattaatttctctcggtattttcttctttcttctctctatactccagtactccaccctccaggagcagttagcttctccccctgctttctgctcctgacgcgagagcaagaagaagaaaaggccatggcggagaagagggcttcttcttgaggtgaggttggttgctcgcttctcttctcttctcttcctcctgctgccgattcggttggcgattttgctcgagacttttttttttcttcttctttgttgcgagtcttcgcgccgctttaatcgggagagcatttggagtctgacttggcttccactcgcgcgcggtttaatccccttttttttttctatttttttcttcacttctgatgatgatttcgtgctcttctccctcatcacgatttcttggcttgcaggcagctgcttcgctttcctcaccccccaaatcgcgccagaattcgatcttttccggcggcggctggtggagcgcaagatcgcgctgcgcgtttgatgggcaaggcgtgttcttggtggagtttcttgggagccgcctctcgtcctggatccgtggcggccggcgacatcctgggccggggagggtttctcggatccggttcttgctaatccgatcggaatccgagcggatggggtcagcgatggatgtggtggacatcagctccgacgaggagggcttcgccgcggcggcggtggcggtggcgacgacgaccaagaaggcgtccgtcgactccctcgggtggattgcggaccttcttagagaggaggatgagagggctttgtcggatgagttccatgatctggaggtgatgagtgagctgtcggcgccgccggtgatggcgcagcacaaggggggcaagcccgattgcgtcggcgaggaagacgacgatgattgcgtggtgctggatggggatcctgatgatgttgtcgctgtcgcggggtataaagggagtgagggagatggcagctcggatgaattgcagatcgtcgcagagaaaggcccggtattttggcttaattgcttattactaaaattttgatctgtatttattgcattctgtgcatgaaataggaacagctcaattgttatgtttgtaggctatgtatatagagatgaaatgttctcgtaattgggggaaactgttcgtaataagtcattttgttatgatctgaactttgaattactatattgttctgatttcatttgaaggcttatttactcattgcatagtttagtttgatctcctttgttcagtgatgtggaattcagattcaaatacattggatagcgtggaagtggtttgatttaagtgcatgtgtttctttccccatctgtacttgcctatttgtctatgaatacatgtacctctagttcatgtcacttgtaataacgaaatgataaatttcatgctagctttttaacagaaaccacagtgtggagtggacatgtagtagcattcatttcttttgttattttccttaactagtagttgtctatttatccacaggtagcatgcagggacttccctcattcccgccatttatgttctaacttgcccttcagcaccacttctcatgtgaagtattgtagcatggtaagtaagaaataattttccctccagtgaatctactagaggagcagcttatagattttgttttgacacgatttccatgttcgcttttcaaatgcagtgccactgttttgtatgtgacactccagccccatgcaattattggggtaagggcaccgagatttatgatcattgtcatgctacagataaggaaaaaaagtggaaagcaatgagacatacattcaagagcaaaggtctgccaacatctcatccagaaaagcgccagaatgtcgtatacccaacaacaacgtcatttgtacagcaagatacacagtgcgaaatttcactcatacaatcgcatatgactacttactttcccaaccaaagtcatcttgcgaatgttgtgaaccaggggttaactcaaacaagacatacatcagtaagagtctcaccgagtgtagggagaactgtcagtgcaacaagaacaactcctgcaacaagggctggaagaggtatgagcaatgctcccagcattcagattcctcaatcacgcacaagattcaaacgagtaggggctacttctccaggcatagtaactctaaatgataaccagtttggttctgctgctccgaacaatacccagttgcaccagccatcctcgccacatgcatcccagccagctcaagttgcaccaagaacattgtttggtactgttcagaaaaatccccctcagagatcgctaagtgccccaatagcgcttcaagggcaacaagatcagtcggcgtcgtcctatcaggctgcctcaaacggaacacacggtacaggaccacaattttctcggtgcatttctcttacggctcagagaacacaattactgcctgaaccagcattggatgtttacagcaaaagctggcaagacataattgatagtctggcatctgatctggaggtaccagattacaatatgggcgctgcagagtctcagcagccagacaggactatttctcaacctcttgattccattacattccagggggtaggtcttcacagtgagcctgttgtggcattggcgaacttgatgccttgtaatgggcagaatgtggccaatggcatgataggcagcaattgtcttgcacaaacaacacaaattttgcctcacctcaatcaccagcctagccttgttcccaatgaatcccatcttaataattcagtaagttccactgcggacggattactaatggaagctgctcatcagagagacacgcaaggatcggattctctagatcttctatttgactttgagtttgaggattgggattcagcagagccctgacaaacaacctccgcatttttgaaccccaaggacaataaaatctggcgtcaccgacaagctggttcgttagcttccttcctaggaagaggaagagatgttccttgtacattctgtaggttcagtggtagaaatgttttttttttccttccatgggtgcttgtttacagtagcggctatacaggccttctaggccttagattagcagttatcgctctgaagttttagggatgaagttcaattcccaaactgttgttgatcatatatctatgggccataactccataatcctatatctatggtccataactccataatccaattgccagaatgcatgtttcaggtagcatagcactgaagcaaaatcttctgagcactggtgtggattggctctagtaactgctgatccagcgaagcaatgtatagtttttgcttgataatggcaaagagtgatctgctcttgaaaagccttaagctttccttgcaatgtgaaatttgtgttacaaatagctgagttggctatgcagaataccaaggcaaggaggaagaaaccaatgcttgcgttgttctacctccattgaggtaaaaatctttccttttcctcttatcgtagagatttgtcatttatatgacatgagttactccggctataaatatttgataaaattaagtcaaaaatttgaaattgtgaccgtcaataatttttctccaatacttattagttactttgaaaagtactgccataatatcataaacttatttaaatgtaaaaccgatggccaaagttttaaaagtgtaatcgaatctcattctaaactcaaatactccatttatgaccagttaaccacagggagagtacacaattccttttgttaagagtcagtaataaaatcagcatgtagaggggataataatttctttggtggccccacttgtcaggaagggtcgaaggcgtagtgcatgtccacggcggcggcgatgtgccaggtgcaccgtgtgcccttggggaagacgacgatgtcgccggcgccgaactcgacgcgccgcccattctccggcgagccctccgccgccgacgccgccgccgtcgccgtcgccgtcaccttccctctcacgatgtagcacgtctgccgcgcgccgtagctcagcgccatcctccccggaccaccgccccacctacaacacaagtacatatatacggtacaatacgtgtattttgtacaccgtataaaatacgcgtatgatgtatcggagggagatttatacttgggccaggacctggcgccgagctctgacaggcgagactccggcgggctcctctcgacggcgatgccgccgccggcggccaccgtgcacggcggcggcggcgacgagctcgaagccatggacaatggacgatgcagtggtttggattcgccaggtctctcggagaagttgcaatctcttgccggaaacaagacatagtagcatactttccgacgacttgctgctgtcgtggaccgcacctcgacatgtcggcagcggccgccggcggcggcggtggcagaggacatgtcggccgcagcctgcaggtggcgcttggtcagccacgttgaccggctgccagctggctgatgacgtggcgacgcagcactgggcataaataaatgtgtatgatgctgatgccgttgatttttcgcatagcatttggccatttgttttatttgaaaatttagtataaatatataaaagtataagttaagattatattttatttgatgataaaatatgtgctaacaaaataaataacattcatataatttttagtaagacaaatggttaaacattacgtcaaaagtcaacaatgtcatacattaaaaaaaacgagaaaattgacattttaccatcatcaaaaaggggtttcgcccaaataccactatgcaattgggattcaccaaaataccattctcaattgaggggcttcacccatatgccattttcttccaattctctctttcctctcatcattattgaccaaaatggccctagttgaatcaatttaagtatatcaaaatacgtagattataaagtaaatacgctaaaatatttttacatgctatttttttcttacacagtatgcatcgtattatatccataacataaaaaaaaagacactatcaacggaaactctcataaaaaatacgtaattatttttttatttatgctgtggagatagtgtcttatactctgtaatttggtgtaaagaaaaaaatatattgcatgtcaagatatttggacgatatgtactttgtctgtaatctacatatttgctttacttgaattaattcaactaggggcattttggtcagcaaagatgaaaggaaagagagaattggaagaaaatggtgtttcggcgaagcccctcaattgagaatgatattttggcgaatcccaactgcatagtggtatttgggcgaaacctgttttgacgatggtattatgccaattttctcgatttttgtagttgttaacctttgctatgaaaaatctgaactttgacaacggttattcaacccattcattcaactgaaagtccttaaattcagcagggagctgaagacttttgtttctgattggttttgttaaaccaaacataatgctctagaacttcaaatgatagctccaagggaagaaatcacaagtccaatccttgacctggtagtctatgactctatgttacaaagagatcaccatgtcccaacctgtcgacttttgaacaatagctgaagcatggatcttttttttttttgaaagtagaaacatggatcatttattcaatgacaatcttttttttgtccctcgcaatttcgacaaggtctaacacaggtacttagtcaggcgtggatcggattgccatggtaggccagatcgtgcgccgattgctctacatttgatgcctgcctgaagcatgaacaggaaatatcccaatcaaggtaagaagtgaagaacaaaaaaactagtagtatttttgtttcatttctgtaaatgaaggaagttgttataccacttggcaagcaaaaggcagcatcttttctggaggcatctctgtggatagtcctaagtatattcaatagaggaaacattgaggtcacaataaataattaatgataggcgatagctaactggattttaatatttagttaaaacaaaaatacttgaatagcatcatatatataagaatcatattcttgagcaaagaagtagtaatcttaataactgtttatgtcgaattcccgtctcctcagggagacataatgaagaaagtaaatagttattctggaagaagttaatggctcaccatgaagtactgctcctatgaatgcatcaccacaaccagttgtatcaacaagctctgaagctggaatactttctgctgttcctatgagcagccttgcaaatatattcccagaccctcttgcagtaagtctcatgaactagaaagtaaaatggaaaaaggttaggtaaagcagtaaaagagatccaaagcagtcatcaaattactcacatttctgatgacataacaatgtaaacgattttgattgccagaaatatctcataccttagatgatacacaagttggcaggatatcatctttatctactttcagccttaaggactcagcgacattctctatatctactggctcagtttcataattttcacctatttaagagtggaactgcagataaataggttgaagtcacaaaggcaaaacttatacacaaactttatccagcatgtaattaaaattgtctggacaagatcaaaactaaccatctttgcccctctcaagcatcatgcatccattttctccaagggttacaactgcgaagcatgcacgaggatattgcagaaggatttctagtagtgcagagggaatagatgggactgatgtccatttctgtaggtaaagagtcactgtaaatagtgagtgggaaaaaaaactaatgcagctttactaaagcatgccttttaaaaccattcatgcctgtcaaaatgtatcacaaacctctggaaatttcccattacagactatgtaacttgctaggctgagcaaacctcccaattcttcccttgttctttctggttcggcatcaaccaaaataggaatcttcatctgatcagcctgtacatttctggttttaatcaagcaacaaatcaaaatatgatctaattctctacaggtttatgatactgttactgtaaaacaaaggtcatttacattattgaaatttacctagacagtactaactactaagatgtatgaagattggacaacctagactacatggtgaaagcattacatgatacatgaatggattaatgttgcacactccaaacgaacttacctgcttagcaactgccaaggccatctcatctgaatatccatctaagtatagtaagcttacgtcttgcagtgcagctgacaaacttgacattctcaagtcactaggtatcattggagggtaccctgatgtgattatacacgtacgagtttttctgcaaatgtaaatggcccttctatgaatatgcacagaaacttgctatgatgccagaaagtgttattgtaaaaaagcaataattgagtaagtgtggctaaataaccatattgcttagacaagcttaacagcttcaaccatataaaggatgttcagtaaccagcaaaccaaaaaagtagtgaccaaacatcaaaatggtcaagtataaagggtcagttggagggtaaaatttttatccttatttacatgtatctactaaatgcatatatgccctatttccatgcatttttttcctttatctgatctagatgcccagtcctttagaataactgagcgaacggtgtacgcgccgaaagggaagtttataatgaagtgagaaccatgatttataaaagcaccttgtttttatatataaaaaggtaagtcaggttactctaatataaataggtgtaacaaaactaaaaattggttgaacttcattcgaaatgtacctgattgagtgtgcaaggtgaccagaaaattcatttggaatatttcagaaatgcttatcattacaacctaggagcatgcctttaattgttccatttacatgtattgctacatgaagatacaaactagttctcttatcgtaatgatgcaaaagaaatattcttacgtttgcttatcaataatgacatatacaaatgttgtgtttccaccatcagaaatctgcaaagcagaatcatcaaaacaatgaggtataagataacatggaagaaagtccagtgcattgatagtaccccaatatctttcactgtgcatctttcttttgttaatccttgacattttggttaccaatttattgtaccttactaccttctcgatgtacacatgattacttgcattgcagcgcttgatgaacaaagatgcagaaattatatatttgtaaaccaagccttactataacatgagatatatcaatcccagcttccttaagctccgaaagaacggttcctccaatttcatcgtttgccacctgatgaaaaaaaaaagagaacatcagcacttcagcagggttgtacttgtaactaggcaatgctgtacaaatagatgactcaatttgacaattcagtaaatgctgcactgtaaatgctaatttcaaaatgactctaaattcaatttaccttggagatgagcctcgtgttgaggcccaggcgggcggctcctgtcagcgcgttcccggcgttgccacctccagacacctgcaacaatggcgaaacaccaagaaatcgccaggagcgaaacgtcaatcttttccccatgtttcttggtgaagaactaaagaagtggggggtttggtttggtgtggtgtgtcacctgcagctcgccgctgcggatcttgtcgtcgggccgcgggtacgcgtccaccgtggcgaggtagtccagcgtcaccagcccgcaacccagctgcaagaagaagaacacctcacgccaggagtcaggtcaggtcagaccaaccaaaggcagcgggagagcagagggcgcaaatcacagtagctcaccacgacgcggcctgcggcggcggggagcagcggccggcgccccggcggcgcagcggagaggagggagccgctgcggcggcgcgggagcagaggcggtgacgccgccggcgagcatcggaggaggagcggcatggtgagagcgagtgattaccgctcgctgctgccggtggagccgacgagagttgtttggtgggtagttggatggatcatggatggctcccgttgtcattgtcgcgtcgtcacctctgattgcgtcattccatttccatggattgctcgatcagttcagacattttcgagttgaagaaaaagtttagaaactttcacctcaaagaggggagaattccatctcaaagaaagaatttccgaaactttcagtgcctgtaatttttatttaccggcatccaaatcccaagaactgatgttcttatcagtgaagtttgcagacctatcttagacatgcatggttcttagaaaaactgaacacatatgtcgaaaattttttgggactcttgcctttttaatttcaagtaggattgagctaacaatgatgccagtacagcaacaaaaaaatgcaaatatatttctttcacaccctcaagttcactttataacttaaaaacacacaaagaaaggaaagaagagccctcacatttgcaactttattctgcagaaaagcccctcatttggatcgcacagaaagaatggctgagagccagacgaagacgaacagctcatgggccttaattcgggatgtactatagactttgtttcatggaccataaaaggcccacattgcgagcccagcccaactccgccacggcaagacgcaaacctaagcctaaaccgcaactataaaatgcagcactatctccaaaccctcgcgaaccctagcgccgcacacacgctcaccccacctcttcacccgccgccgccgccgccgccgcgcgaagggaagcaggagtaggagccgccaggatgccggcgggccacgggctgcgtgcgcggacgcgcgacctgttcgcgcggccgtcaggaagaaggggtacatcccgctcaccacctacctcggcacctacaagatcggcgagcacgtcgacgtcaaggtgatcggcgccgtgcacaaggggatgccgcacaagttctaccacggccgcaccggccgtgtctggaacgtcaccaagcgcgccatcggcgtcgagatcaacaagcaggtataacccccgatccccaaacaccccggcggcggcgccgcctctttgtcatagatctgtggttgtgtcgcttaagtgacttggtgtcatgtttttgccccaagtgactttggaatcatgtagtttagttgtgccaatatgaaatttcatttttgcagttgcaggaatgggaagccattgcatactcttgcatggttgtgtaagatctgataaatagtgtagtctagatggtttactggttatatttactggtaacatttgtgcgattttactttgtgctttagtatttggattttgttttctctttaaatgtattgagaatgttgtgtactgaagtagagctattgtgattgtggctttggttcatttcatttctaggtttccattcgtccaagtaggatagtggcaaatcaatcctcaagtttacgtcgattgtattgttatcggttatgtggaaagtttaaccgtttggttttatgatgtagttatgagaagtgcatttaaagatatacttctgattgttcatttaatcctgtgtgcatgtgtagttatatgtttcaatcatataacatgctaccgtctaaacacattctgttggtgtagataaattggatagatatgtagttagctgtcggcatgtgtaatgttcagtcatgtggatatgtagtcttcgggattatttaatttttgaaatcatgtatctgttttactgattgtttgttaatctcttggtaggttgggaaccgcattatcaggaataggatccatgtccgtgtggagcatgtgcagccatccaggtgcactgaggagttccgcctgaggaagatcaagaacgaccagctcaaggcagatgccaaggctcgtggtgaggtcatcagcacgaagaggcagccgcagggtcctaagcccggcttcatggttgagggtgcaacactggagactgtcacccccatcccgtacgatgtggtcaatgatctcaagggtggttactaggattttcaatctatctgcctgcgctaccaattctatatccctgtcactctaatgagtaaaagtttgctcgctctgagcattattagtctgcacctttgttctg

SEQ ID NO: 13493 - DNA, 657 bp, Oryza sativa
gaagttatgctatgattgccccatatgacgtagatggtaaccgtattacgtacccttctcttgggggacgaaactacaactctactacccctgttaaatttacaaaactagcaaaaccacttaaagtcggggatacagaggtttttgtagaagatgttagtctatggaacggacaggcaccgcaagactaccaacgtagtattatcatgtggggttataaaaactcgttcggctatacttatcccgatggaacgtatagtcagctaatgcagatgaggacatatgatattggtgcagttgacaccacagctaacaagattacgttaaacaagccatgggcagttgcaaacccaaatagttcagatgggattttcccagtagggcatacacttagcccaacttctgacggctccacatatttgtatttgaatggtcacgtaaatatacaagtacctactacgtacaccaagtacagccatttgattagtggctcttctgagtttgctaatacaacgattatcccagtagaaacaggttttattcaacttggattcttggtgaaccgtgatacaacaggtgaaaaatcttggctaaatggtttacgtctacgtgactatacagatacgtataaactaaacgatgacgttagagaaacac

SEQ ID NO: 13494 - DNA, 1085 bp, Oryza sativa
tagcaaaatgaaatgatatagagaatgttaaatagggcatacctaaagtgacattactgaaagggcttccactggcaaatactgcattgtctccaacatatttgaatacatcttcaggagtacattcggctgtaataagaaaaatataaatatcaggcatttatgtttgggtatcctagaagtaaatattaatgggtgaggtgaggaacctttagtagttgggttggacattgcaaaaattgcaggacgaggggaatcggattctttcatagccttgagaacctgcagaggtacaaagataaagttaagactccaatgttgaaatttataagagagaacatatgagtataccctaacagatgaaatccactaggatcatgatttagcacttcgcaacaagccggcttaatattattacatttgcaaaggagagaacttttgaaacctaacaacacaaatacatatttgatgctcttgtaaccatggtttactcacaaatcataatgaagcaaactaaaacagtatagaaatggcccattaatgtaaacctcacaaaatcctttataaggttggagaaaatattctaactcaatgtgctaccaatcactagcatcagatttgaaagggtgtactggctattgctatattgaacatataaatattactggtactgtgaaatacatctagaagttgcggggaactaatatgggagccactttttttagatggattatttactgcactgaaaagtccctagtctgactagtcatatttataagtgaggaccattcttcaacttttttttggggtagaattatgaaatcaacatgttaggaattgttgattcttacctcctcattaaatatgcccccaactccagaaagtcctaaaagcacatgaggcttcactttcctgacctgatgatcagtataaagccgtattagttcaagcacaagcacagaagcactggaaaatcttctgttacaataaaatattttagctccagcagttgaggggaaaaaaacaatcccagaattatttttataccacttcaacaagagctagccccctcatggagatattgc

SEQ ID NO: 13495 - DNA, 718 bp, Oryza sativa
tatagggcgaattcgagctcggtaccctccctttgtaatatgtggtttccattatataatcccataccaactggattagagctattacctattaaggggtctgaaccagtataatccctatttcttgtttgcttgatgtcgtattacatagatcttcgtaccagcgtaccccaataccctctatatccgatctacgagtatccatcgtcgacaatgtgtataaactttatatacgatgtgtacaaactttatatacgaagtgtgcaaactatgtatatgtacgtattaaaaaaccaaaaaaaacatcatatgtatacatatacgtatacaagtatacatactttatatatgtacgcgttaatcgccttaattttcactgccactattcatgaaatcaaaaagatgctttcaggatcaccatctatctgttgttctagtactacaaagtacaaaccctcagtaagattcaggcattcagtaagccattttgatacttatttttcttaagataaagcaagcttttacatcaagctgatagaaccacactaatcctgatatttttcttcatgtagaacaaattcagcctatgtagaacaacagttataagaaaaaaatcaactaaaagagttagttatacaaaaagagtagcagaaaatgttagttattcagaaatcgaatatctaatttgctcgaatcctaccagcagggagatgagata

SEQ ID NO: 13496 - DNA, 614 bp, Oryza sativa
ccagctagagctaggttattcagtggttttaagctgtgtttgaatcaactgaagatgaaaataaagataaagattaagtgttttacgtaaaataaggtggtaataacttgtgattaattgagttttaattattataaacttaaaaaatggattaatttgatattttagaacaactttcatatagaaatttttttgcacgaaacgtaccgtttaacagtttaaaaagcgtgccataaaaatccaaaacttaatctcccatctgttgggttctcgaacaggaccacgaatctaaacaggctcatccacatcttagtactacaaatatggactaagagccaattcagattcatcgtactaggatgtgccacatctaacataaatctcttatattttgggacggatggagtagttgattgcggtgtgtaatggtgaactgcgtttgaatcaactgaagatgaaaataaagataaagattaagtgttttacgtaaaataaggtggtaataacttgtgattaattgagttttaattattataaacttaaaaaatggattaatttgatattttagaacaactttcatatagaaatttttttgcacggggatcctctagagt

SEQ ID NO: 13497 - DNA, 627 bp, Oryza sativa
agctaggtagctcgagcaatggcgaagtgggcggcggaagcgacggtgatggtggttctggcggtgacggtggcggtggcggtggtggcggcgcatgcgccaccgccggtgcagtgcgatcccgggaagctgtcggcgtgcgcggtcccgatcttctttgggactgcgccgtcgaagtcgtgctgctccaacctgcgcgcgcaggagaaggacgggtgcttctgccagtacgcgagagacccgatgtacgcgtcctacatcaatagcaccaacgcccgcaataccatcgccgcctgcggcatcgcctttcccagctgctaggctagcttcgatcgccatgatgcatggcgtatattaaatatatggtgtgtgcttgaataaaggatgtgagtttgaatcagtaagaactatcgatcgattaatgcacccccgtacgtacgtgtttgatcgatcgatcagctggtgtctcctgactatttaagtttgagctaaatttcccggatttcccctttttttttggttgggttttgggggggtttttaaacccccctttttcagtagtagtactactacactactactagtactactactataaacaaacatatattttttatgtataaaaaa

SEQ ID NO: 13498 - DNA, 651 bp, Oryza sativa
cttggtcactgctacaaaagtgtggatgttggtaccattaatggggtaattccacatttataacaagccaagaatctgaaattgattttatctgtgtttgaaaagttgtctggcttgaaaataaattttaataaaagtgaattattttgttttggccaggcaaaggacttttatgaataatattctactatctttggttgtaagttaggtacttttccagttagatatcttggtattctaatgcattttagaaagcttagtaacaaagattggaaagttattgaacaaagaattgagaagaaacttagtagttggaagggaaaacatatgtctgttaggggtagactggttttgattaattctgttctttctagtttagctatgtttatgatatctttttttagattccaaaaggggttcttcaaaaaattgattattatagatcaacattcttttggcaaggggatgatcataagaaaaagtacagacttacaagatgggatattatttgccaacccaaagatcagggtggtttgggtgtccataatttagaaatacaaaataaatgccttttgagtaaatggttgtttaaattaataaatgagtaaggggtttggcaagacttattaaaaacaaagtatctttataatc

SEQ ID NO: 13499 - DNA, 728 bp, Oryza sativa
  unsure (1)..(728): unsure at all n locations
cgcccgtggtntagtaagcgctcggatcgaacnnncacaaccgngagaaggtccgccgcgacgaggccgaggcggcccgggaagagcagctccagcgcgaggccgtccgccgccgggactccgacctccgcctcgccgggttcgccgcaaccgcggcctccagtccgccgacgcggcgcccctccctccccgggcgcccacctacgccgcggagcagtgccccgcggatccggccgacccgtcccccgccgccgacgactcagacggcggccacatcaacctcttctccgcccgcggcggcggcggtggtgcaaccgacttcgccgtgctcgcctccgccgacggtgggaggggcgccgccagggagcgggagcctcccgcgaaccctaaccctaagaagcgtaagaggaaggaggaggaggtgagggcggtggggcccgacgaggagaagtacaggctcgggtatggcctcgccgggaagggcgtggcggtgccgtggtacatgtccaagccgtcggcttcatcctccatggagaggaaggatcgccaggcgggagaagggagtgtggggaagaagaatggtgggagaagagccttgcggagctttgggaggaaaggacgaacagtgcggtccaccgaaaaggaccgtaatctctcccctgcttgtcccccatcaatgaaggcaaattctgcgctccggctccatgacctcgggtgcaactctcgct

SEQ ID NO: 13500 - DNA, 2235 bp, Oryza sativa
  unsure (1)..(2235): unsure at all n locations
tactgttaattttattgtacttagtangatgttagcgtacaaatattatcttattacganttatatttagttctttaggcatttttttatatttcnanacannccnnnnncnatgtgncntttagancnctggtcggacccctgcaataggacngntgactgatcttcagacactgtcaaggtttgtcacaagcaagaggaacattcttgacaaccacagcaatattaaggagctagataaattggacaatctctgcggggaactactcatttcaaatctgcatgttgttaaggatgcgcaagaagctgcacaggcacatttggcttccaaacaatttctccaaaagatggagctcttatggaaaggcaacaacaaacaagctgaacaaattttggagcaactgaaaccaccctccggaataaaagagcttaccatttcaggttataccggcatatcgtgtcctatctggcttggttctgaaagctacacgaatctagtcactttgtcactctatcatttcaagagctgcaccgttgttccttccctttggctattacctcttttggaaaatctccacatcaagggatgggatgcattggttaaattttgtggtagcagttctgccaatttccaagctctgaagaagctacatttcgagaggatggacagtttaaagcaatgggatggggatgagagaagtgcattccctgcccttactgagctggttgtcgacaattgccccatgctggagcaaccgtctcacaagcttcgatcactgacaaagataacagtggaaggatcaccaaaatttcctggtcttcagaacttcccatcgctgacgagtgcgaatataatcgcgagcggtgagtttatttggggatcatggcgctccctttcttgtcttacgtccatcacccttcgcaaactgccgatggagcacatcccacctgggttaggacggctccgttttctgcgacaccttgagatcattcgttgtgagcaactggtgtccatgcctgaggattggccaccttgcaatctgactcgcttctccgtgaagcattgccctcagcttcttcagctacccaacggtctccaacgcctgcgagaattggaagacatggaggttgtaggatgtggaaagcttacctgcctcccggagatgagaaaacttacttcactagaaagactggagatttcagaatgtggctcgattcagtccctgccaagtaaaggtttgcccaagaaactgcagttcttgagcgtaaacaaatgcccatggcttagttcgcgttgcatggttctgggaagtactatctcttcactatggattgacggtgaacttattaggtactagtatgaattggatttagatttagaataaggggatgacaactctgcagtacagagtaagttaagcctcttttgtttgattccgtaacagtttcagaatgtaagttaagcctagtgtgcctcaaatgtcctacatgatcttgtttgtggagaaatcatctttcttctgtaatgtaaagtactgtttcatatgtattaacttggataaacgtgccagcaaaagcacaatgccagaatgggaaccaaaatgacccagtatgacatggtatctttctgtaagacatccttaaaccttgtgttttgttgaactttatcatttgcaccgaaccttttacaagcatgtctaatcacatgtgatgctagagattcgtgccgcaatttcaaagtccatcaaaggttttctggcaaagcaaattacacgaactatctttccattctcgctgtttcattataaaatgttttaagtttcctttcaaaaaaaatgttttaagtttgttttagtcaaacttgttcgagtttgattaaatttatagaaaaacataataatatttataaaacagaattagcttctttatatccacattgagtatattttcattgtaaattcattgtgttgaaaacgttagtacactttttataaattttgacttataacaaacgtaaaggaacttataaaatgaaactgaagtagtattagagcttatttggtaggacgtcaacttctaaatttaactttttaggagcggagtttggagtagagctgtggagcagtcagaaccccactctatcccagtagcctgtaggttatttatgtcagatcattccagcccactccactttattttcgatggagctgaaaccgttaggtgatactccaggtt

SEQ ID NO: 13501 - DNA, 6102 bp, Oryza sativa
  unsure (1)..(6102): unsure at all n locations
cttaagttttgtttctgtttttctacgaaaacatcaccccgtcgtaacttgatgttccatcctcgcaggacctcgtttgccttcaagcgcccctagcttcggagcagtgcgacctacagcaccggtttcgcacggtacagttcagcccagatattagttcatttttgtttcagcttttgcacgaatatgtcaccatgttttaactgcacgtttcctcatcgcaggacctcgtctgccttcgagcgcgttcgcaggcacgaccggcgcttccgcgagctccgcaggggcgttcgccacctcttcgggcgcgttcgccagctcttcctctcacggagcgtcgatccctcgcccacacggtactttactttttattactactgttaaatacttgtacgaaactgatggtccttgtccagcaggatttgcagccgggatcttcggtactggggcctcttcgtctcacgccggtaggactggtcctactagccagttctacgacgacgacttgcacggtgcacaccaccacgacgtactaggctcctctcagcttggaggagctccagaggcgcacacttaggagcagccagaggtcacacctgtacaggcaggacgggttggccgtgccgtacccccggaccgactcacgtactctcaggggcacattagggcgcagggtaggagggacaggggtaagaggcctcgtcagtagtgttctacctcttcagtccttatgtgaccgtttcttttggcttacaaacttgtaaagcagtactacttttgctattactactgcagtactacttgtgtttgtctcgtctacatagttcttttcattcatatggtgctagaataacttatgctcacgacaacacactttcggcgcttcacggtagtgtcagatccagtagcgcgcacagtccacaacagcacacatgaaaagcggcagctcgagtgatcactatcaactttcggcgctgcctgttgacataaagtgaatcacgcccacgcgtgatcgtcttgtcacatctaatgaataatgtatctcattgagttcacatatattgcagtgaaaacgacgctatataattgacaatctgaaggcaacctctttatatcttctttcccactagcacaccacacacgaaaatggaagcctattcattggtaatacgtaatctagatttgagattatgtagaacattcttcactacaattttacattttggcagcaaaccaaatatgatcaaatgcaattttaccttaccaaatatttggtagtgccaaaacttgcttatattttggcactaacaaaatatttgtacggtaacaatccaaatatgccctaaaaaataataaaattatattttaccagtcttggagattttaatcttgtatagttttcaatataaaaagatttgataactattgatatttatacaaaaatatagagcacagtataaaatcgccctaccctagggcggcaagggggccgcctgcaaaattccatgccccccctcgccgcccatttgcaggcggccccccgcacagtataaaatcgccctagcggagggcggcaagggggccgcctgcaaatttcgttgacggccgtcgcccgagagcgaacagccggctgccacgtcattttcgccgccctctgggagggcgatttttcccagagagcggtaggcgactacttccgtcaatttttaaaatggaaaattatttttgtaaaacttttaataaaaaaaattctagtcctactgtactagttacccgtggaagcccgatagttttgcacccgggcctcgtcgtctcgtcgtggtcctttcctctcagaagtttgggccaagccgaggcctaaatcgttcttgtttggaagcccggtagcccggtattgataggcccaaccatgtacagaacaagagtacaagactaacaagagacttgggcccgtttgattgtttgtctggcgttaattttcgcgaactgctaaacaatgtttcatacaaaactttgtatgcataatttatttaaaagattaataaaaattctatctgttagcttctaatatctattttcgcgaactgctaaacaatgtttcatgcaaaactttgtatgcataatttgtttaaaagatttaataaaaattctatctgttagcttctaatattttctttttataaagttaatactcattaaacacctaaaatttaatatacaagcataatatttattagtaatcctaaaatttacatacaagcatgctacatcaattcattataagcacacaaacctttccatacaagcatacattaattatatctacaatttatttcattctaaaactaaacatacacatgctaaatcattattttaataatattttaatccaaatcatttttctattatctaacatatatcccgcagtaaaacacgggacaacttaataattaatcatgcactaatcgtttcacgatcagctcgctaacacaatcgaacatttcgcagctctttactttccttcggcccaattgacagataaaaaaaattggcccagtgcggtctgaatgattacacaagtgcgcccagaaggcaaattctacacatgactacgtcgctctacgtgtacgcctttgctcttagtacacggaacgtgagccttgcggcggaagtagaagaagaacatcattaagaccaaatcaggatgagcagtgaacaaaaaatatgttcaaaaaaaatccacataaaccctcgcttccgaaaaaacccgcatcgccgcgcggagcaaagcagagagggggaggaagccgccgccgccgccgccgccgccgtcgcacggggggatggagtcgacgccgaagccggaggacgggagggagctctacgcgctgctccacctctcgccggacgccttcggggaggaaattcggcgggcttaccgccagtacgcgcaaatctaccaccccgacaagtaccaggacccccaggtacagggcgctgctccgcttcctccccccatggccccatctccgcgtcgcaactttcaattcgatcggctcgaagtgctggctggcttagggttgcgcgccacgcttagctccgtgatagattttactgatgaaacgccgatcgattgactcgtcaggtagttgcgagctgtattgggattcggttggagtagttagttttcaccggtttgatcgggtagtgcccggctaggattggtagttgattggtctcgacactgaccttgctgcgcttgtttccagtgaatttttcacaagtttgcattgagagacggagtagagatcaaggggaagatctgggcaatgtatgataactaagggtccacttagtgctcatgggagatcattaggagaatcagtaaacatataagatgataatgggaaatgctgataatttctaattactgcttgtgccaaattgcacacatatctggtctgtttgaactggctatatatcatttgcaccagtattatggtctgcaaagagattaacgtttggtagtaggcattgctctagtgccatgggaatcggagagataccaatatgctaaattcgtctgcatttcttgcttagagaagctgcatatctgaatagcggcaaacatgttcatttacttcatttacaaccatgttcgatggaacaatccctgatgcttttttttggttcagaatgaaagttagggagggatgtgacactaaagtaccagccttatttaaaagagagcgttatacttttgtgaaccgatttatgaagattattaagattaatctagtgagtaatcttgacgttaagtccaatcttcagcttcttcatgcttcacagatgcattcagatgtttatagtgcaccatttgattctccaggctccccattttaaacagtaatttgtcctaagatagattcctgcttctggtataatctatattttgttgaactaggaataaccctttgttttacattgatgagttttttttctgaactgactagtatcctccattttcatatgtgtttgtctagatgaaggatgtggcaactgaaaacttccaacgaatacgtgatgcatatgagatactatcagatgagaacaagaggcagatatatgacatctatggtatggaaggtttaaattctggcctggaacttggccccaagctaaacaaaccagaggaaatcaaagaacagttggaacggctgaagcggcgcaaggaagaagagaaatttttagcccatgctcgacccactggctcaataattgctaatttttccgtgccacagtatttagatggctatggaatcatgagagggtacataatgctttccattatattttgtgtcttctttttttctgcagccacgtgcaatattgaagctgttcacatagagtgaagcaatcacctagtttgatatctctcgaactaattagtaattctgtactcactgagctcatttattaatttgtatgcttatcggtattgtatgtaccgctccacattcttcagcatgttttggtgatggcaacagttattcagcaaatggaaatgtttttttagtgaaaatattagtagtgcttccttagaaatttgcacttgttgtttcctttccggctttaccagttcccacccttttatcttatgtcaatcctgagtgcttagaaacacctaggttggagttactacctccagcttgcaagtacaatttacagactatcatgttggccaaatttcgttgatcgcggcaattgcctgcttgtgaaaaagctccccaaagctctggctttagttctgaaaggattataagctgattttgatgtatgcatttttttttaagaattctcagtaaggctaaatcagtatattgtactgttcccatgaactaggatggcagtttaccaatttatttataacctgtagacatatttatcaagtacccttttgtatttcaattcagcttgatacttcccatattcttctgtagctccattatttaattatttgatttgaaaatgggcagcatgggaatgtccagtgaagttcagttgccagtgtccaagaaaaatactgttgttgttggtggaaatttggttgtcaatggcacagatggaactggtgcagcaagcgctgtgctgcgtcaccagttgtcttctgtggcatcagtagagtttatggctacagctggactacgttcccttattagcgtacaaacatttcggtaagaacatgccattttgttttacttctattgctacttgcttgcatattgcaaattataattccttgatcgttatgcactccagtcaaatttcaccacattcgacagcaacatctggacttgctctttctttgagagatggatctatcaatctatcaaatgcctggactcgccaactatctgacaatattgttgggaatgtatgtccctttattcttgatgctcttttcagttttctgatacactgcttatttcctatacacaactaagtaactaataggctagcaacttagcaattcaaaaacatggtaacatggatagattaacatataaaaagagcacggataatatgtgtacaatctgtgatgtcaaacgccgttgctgaaaaaattactcgagttctattcccaccctacatggaaccatgaaactgatacctgtttattttcaatatttgcagagcctcctaggctccctgctaattaaggctgcatagtttttaggaaaatagcacatcttttagtgccccccacccccatctttccaaacatgacttttggctccatgtttaattcatgtatagaacaacttgtcaactgttcattttacatttgatgcatattatagacactatacatctctttctggataagttacaagaatttttcaaatggcataaatccaaaatgagttttatgtttgctctcactgatttatgctctactaaggctgtgttcgcatgcaccttttcccatcccctctccctcgttttccgcgcgcacgcttttcaaactgctaaacgatgtgtttttttgcaaaaagtttctatacgaaagttgcttgagtngcagtgcaattcaatggccac

SEQ ID NO: 13502 - DNA, 2981 bp, Oryza sativa
gtatttttatgtaatgtacatgtcaattttgccacattgttgttcgcaacataggttaaatacaaaacctacttattttgtgttggtaagctgatggtattttcttttcctgtgtccgttactcgattttgcccccaaactccagatacagcttgcccttggtacagactcaagtatttctgttggatggcaaaagaaggatgaaaaaaattctgcagcaggggatgtgaaggtaattctgaaacaactctgttatcagctaagagttgacatatctgtttggaatttgaagtacttgccattttatgccctcgcacaatttacattgcctggttggattcatttttagtagcacgtagcttcatgttgtttcgttctgtagaattcacggttttattttctttcaaaacagtgccctgtgtacttttatccatgacacttccgaggaggtgtagttacagcatctattataagttcgccgctgtgttcttacttctgaagctagcacagtagttagtataggagtgtttctaagcaatcagcagctaaagtaaccagctccccatggttgccatatggttcattagtacttacagatatctggaaggtcattcaattttccaagcaatctcatcactaaattaacagcacctattctgtgtaggactgtagggccttgaaaattgagaaagttacatctctgataaattgtgaaaaacaggcttcacagtgattataatatatataccttgactgtaatgccttcaagaactaattgttttatagattgtttcactttcttacatcaggcaactatccgatgcttgctttttgaggacttgtattaacaacctagcctttttctttccagcttggtactaattattttggtgcatctgctcattacacccgttatttctccaccaagtctcatggtcgcgttgctggtcgagttggaaggtgtatactatttgatttcacttatgtatggccgtattgcattttttgaaagccattacatgagtttgtaacccctattcctctctcttgaactgttttcttgcagcacggcccttgattttgaaattggaggaggaaggcggatatctgagttcagtactgtaaggatgatctataatataggaatccaggtgaagtgcttgtttcttaggtctcatgtgtttggtgggattttgctctaatctcttgcaatatctgagaaaattctcttggtattttgctaccatatcaccatatcgattctgttgaaataccttgtgttaatgctactccctccatcccagaatataagtattttagagttggacacggttattaacaaagttggtatgattaaatgggagagtattgtgattggaggagaagtggaggtaggtgggaaaattgaatggtggagggttgtgattggttgagaagagaatgtcgatagataagttgttatattttgggacaaattcaaaggctagaagttatattttgggatggagggagtattttttttaagacaatttgattttggataaacagtgttgtataggctgtgttcgggaggaggggttggaaacccctcttctccgggacgcaaaacgatgtatacattaacgcatgattaattaagtattagttttttttttgaaaaatggattaatatgattttttaaggcaactttcatatataatttttttttgcaaaaaacacaccgtttagcattttgaaaagcgtcgtgcggaaaacgagagagatgagttgggaaagtgaacaaaagaacccaacttcctattctatttaggtccgctcctgcttttgtcctttccgaaggtatccctcggggggttaaaacatgactaaacattggttccttattgatgatcacaataaatataggctaattctcctcgcaaaaaaaaggctaattcactttatctcctgagtcaaagcaaattaataaacttaattgctgcatttatgcctatgatatttattcatggataacagtgcaagtaactcatgcacacttctatttatccacaatggaaataaacattttaatctattgctattactctgcgatgagtttgaaacatgtatatggaattattgataatgtattgttgtgaataaataattaatgaatctttattgttcttattcatacacatgcttctagtatgaatgattgtgagaaagacagaaagcatcctctgcagtgtttataatagctctgtaatgcactttggagtatataacctcttaggctctgttcttatctccaagttcccaacccatcttcctcgttttccgcgcgcacgcttttcaaactgttaaacggtgtgttttttgcaaaaaaattctatatgaaagttgcttaaaaaaatcaaattaatccatttttgaaaaaaaaaagctaatacttaattaattatgtaataacgcgtgcttcgttttgcgtgccggggaggagccccttctctctttttcctaagctccacaatccttcttatcacttgttttcccctttttgtcctctactgttctcactctactctgctcttctccatccccctccccagttttcctttccgatcttttttaacctctacaccggtttcctcttagcctaaatatcttttgtctctccgccctcccccaactcagattgccccatctctcgtaacgattaggctacttctgtcctcatcctttcccccaaaggcccgctatccctctctattgctctcccgcttcctcctccccttctctccgctacgtgcccttcttacattctggcattattctatccttcttctccgtcatcttcgccctcccttgtcttctctcttctctgatgcgggtctaacctaattcttcttctttgcacaatgacttatagctcttctccttaggttcgcccacatatctattcttctatttttgccgctcctcctctctgctctctccg

SEQ ID NO: 13503 - DNA, 4656 bp, Oryza sativa
  unsure (1)..(4656): unsure at all n locations
tttccggggtttttcgggggggtttaaaagcggggggaattccaagggtttttgggcagccgccgcgtacggcggcagggagacgtgctcgccggtgcacaggttgcagacgtaatactccgacgagctggcctggaacagcagcgtgagcccgttgcacggcttggtggtgagcacgacaaggtcgtcctcggcgggaaggttgcccacggtgacgagctcgcgcgccgccgatgagcccgatccgtccgacgctagcttgcaggtgtaaaagacggcggtggcgaagcccccggccgccgccggcgcgaagaagacgatctccgggcggccgtcgtcggtggccgtcctgagagcgcggcgcacgcggacgaagtggtcgaaggtgagcgcggcgcgccacgcccggcagaccgcgcggaggcgaacgacggcggccgccgggacgcgcgcgaggatgtggccgacgaccaggtcgtccggcaacaccggatgatcagcgtgccgaggcctcttgcacggcggccgaggcggcgtcgaagcttcttcggattctgccatgatcgatcgtgtgtcagatgagatgaatatgattttgatcgtgctaggaaaaaggaggcacaggccctttttatcgatacaaattaaggtgaagtgcaacatcgtgtaccagtccgactcggattggtagttctaataagaaataagttcaccggagatcactcgacttaatagagagatttttgaggtcccttgatcgcaaaatcagaaatatgtatctcttaactcaaacaaaccgtgtactcaaggtcgtatggcagtacatatgggtggttttgttaacatagtattctagtcagaaaaaaaattaaaaaaaatacatgaggctcacatatcagctgcacattttttttcttatcttttcttctcctgctcttctcttttctccacgacgggccggcataagaaccaggtcaatgccgatgacgtcgtgtcgtgcccgacgaggaggaagttggtgaccacgtcacggaggctctcgttgctgtgctcgccgctcgcagcgaagcgcaacaggaagtcgtcactgcgcgccaacccggccaccactctctccctgcgctccccgacgatccgctcggcgaagccgtggatcgtggcgagcacctcctgcaaccgcctcttgggctccatgttgaacagcctcttgaagcaccaccgcgacttgaccggcgacatgaaccggtccatcacggcgttctgcgcgtcgttgaacgcgcgcatgaactccgcgctctggggcgaggccatgctttcctcgcgcgaggcatgccgggtcctcgtcgaaggcgacatggcagatgttgtcgaacgcaaagcactccagcacgtcctgcacgtccagcatccggccgtcgcgctccgcccgctccagcagcggcagcagcctctcgacgacctcgaacctgacggtgtcgaccacaaagttcctcaacgagcgcttgttgaacttgtagctggcggccttctgctgccacagccactgctcgccgtcggagttgaagatgccatggccgaggaagtccacgagcatggacacggcgagctcgcccttggggtagttaccgaagttagtctttagcgtatactcgacattggccgggttggcggtgatgacgccgccggtgaggccgagcgccttgaacgacatggtgtgcgtggggctccgcttcatgacttttggtgtacgagaactggtggtgcgccatcgatcgccacggcagagtgtggggacgagtcttcggagttggcccatggtggcgacgacagcggtggtccaaccgttgggcgcagcggcataaagcatgcacaagagtggctcatattggttcaacagcggtcgggcggcatcgtctccctcctctcccgcgggacagtctaggctggcggcagcgagctgagaagctcattggcgatggcctcctcgagccagccctcggcagcgccaagccagctagtcgcccgaaaatggcgctcccccttcttctacaccaccggttccccctctcccaccagcgcgacgcgtggagaggacgggagagggagagttggtcgacgggagatggccagatgggggaggggaaaggcggccggctgctgccgtgctcaccctccgccgctctgcccgccactcgtcgaccgctgccgcgctcgcttgccgccagcctnccgcatccgtgctcgccatcgtcgctccgctctccgccggagagaagagaagagaaagagaagaaaagaaaagaaaacaaaaatgtgcagctgatatgtaggttccacgtatttttttcaaattttttttctgactaggatgcaacgtcagtgaaatcacccatatatactacgataggactttgagtgcacggtttatgagagtttaggggtagatatttctgattttatggttaagggaccttaaaaaatctcgctgttaagttgaggaacctattgtgaacttactcttccaaataaaaggtcacagatcgatttaattaggcctgcacgtataatgcgggccaaacttggttcatgctcatgcgggccaaatcttgcagaaaaatgatattggcccagcctgcattgggcatgcccgctaataatacgtattcttcacatgattacgtatttttatctttacgcctttgatcttagttcacggaaacgttatcctcgcggacggcgtccctccctccttggccgcccaccgacgacaaggagtaccccgcggatccggcagacctgtcccccgccgccaacgactcagacggtggccacatcaacctcttctctgcccgcggcggctccggcggtgttgccgacttcgcggcgctcgcctccgccgacggtgggaggggcaccgccagggagtgggagcctcccgcgaaccctaaactgatattatgataaggtttggttaaatttagtaacaagcccaaaccttctatacaaggctaaaccgactttgtaaataaggttggccaaaccgaccttcagcataatgacgagccaatcttagctatagagtagaccgactaacaaactctagagttcgagttcagtttagatatttaccatattttcttggttgaaaccaggatttctagtgtcctattggattttaagaccaactgaacgtggagaagaccttgtaaacacaataccaccccttctataaacagactggggcaaggccaatcgtaaaaaccactaatcaaacgttaaaatcaatcaactacccctacccttgtattctacatctcccttcttctactagctacctgtatctcacgtcatttcatcctcaaccccctaattgctcgttgtctctctcactgctggagaaagggtctttaaccccggttcataatcccctgtagtgcaggttatgcaaacggaagcacgaatccgagactaaagatacaacatactggcacatgcgagtatataacatactggcacacgttcaccttgacgggtctctcacatgtgtttgtttgacaatatctacctcccatgcggcaatgtttgtttgacaatatctacctcccatgcggcagtgtgtctccgagtgctgttgtgggttacacacaacatgcttaaggtgtggtggcgtgttttgatgccaacagtaagactaatttaaaattcgaaataaaaacatttccctagccattaatctcaccgtcattctcttctcctagcgaagtcgagtgatcaggagaggcgacggggctaccggcgccatggccggagaacatagaatttttttcattttaatatttacagaaatattataccagcgaaaatatttacagaaatagatctgccgccaaagtgtatggcagcaaggtgacgtggcacatggcgccccgtgcgcattttgcgctgaggtcccttgctagttgctaccctctgcaagggcggcaagggggtgaaatgcaattttcgccacatgcaaaatttgcatgcccactcagcagcctccagcacttggtcacacacgtcactctaccaccctcggggagggctgcagagcctatttctgtaaatattttcgccggtataatatttatgtaaatactaaaacaaaaaaaaattacaaaatgaaaaaaattcggaaaacgtacgtgccgctaatgggccggagagtgcgggaactagcagcgaattagggcccaattagatgtcttgtgttgggttaggcccacttgaacgaacagtcaggctgaatcctagccgcacgtctccatccaacggcagtcatggacgagaaacgagtgggggtcagagatttcttttccgaccgagctgtactgggcattcctctgggaacctcatgagaagggcctatcttggtactctccgggcccacctgtcggtgtcacacctcgacgttggcgcgcagataaaattggaaaactagagggggttagcgcgaaaaacaccttcgctttccccaatctctctcccggtcggcgaaccctctcgacggcggcggcggaggaggagccatgggaggccacggcgggctgaacatcctgccgcagaagcggggaacgtctacaactttgacaaccgcgagaaggtcgccccgaccag

SEQ ID NO: 13504 - DNA, 639 bp, Oryza sativa
atgagatggtcaagaaagggtgttaaccagatgttgtttgctacacaggggtgatcacaggttatgtggcagctggggaattcgatgaagcccataagttcttcgatgatatgttgctgagagggcagcttccgaatgtgtacacatacaattccatgatatgctgactttgcatagtaagagaatttgataaagcatgctctctgctgaaggacatggagtcgcgaggatgcactccaaactttacagtgtatagtactctagtgagtaggttgcgaaatgctgggaaggattctgaagctaacaatatcattcagtacatgacaaataagggtcattatcttcatttattgtcaaggttcaggagatatagaagatgctgatatgtgaggccccatagtcagttacattgtaattttgttgtattgtttccaacttggaaagatggatcataagggagtactttgtgaggtaaccattcgcactctaactgttactatagcacatacgggtccttatctatttattcagtacagaaaatcaacactgggtacttaaactgggttacgcactaagtgaatgggaaaggatggggtggcctggccgtgtctaaattctaaccgacttatgatggaggag

SEQ ID NO: 13505 - DNA, 2147 bp, Oryza sativa
  unsure (1)..(2147): unsure at all n locations
caaatgtgccatacctcatcttattgatcttttgtttggctctccaggcctgggcgtagcttatggtgtacttgaatttgttctcgatgtgcctaataattgattttggttcaaagccaatgttaccaacaacactgctgtacatattacttgccacaaaagctgaagtgatgtttcggtgatacttctccaccccttgtaagtagcacttgtgctcggtcacaatgctaactttccaataatcattccatttacccttatatgcatggacacgccacggacaatctttcttcatgcacctcacttcatacacataatttgttgacttgaccaccctaaactttctctgcaaggaaactgcccaatgcttcaccgcctccttcatctaatccttatgagcataccttgcaccctcaaatacctcgttctcgttatactcccaagggtacatgatcaccctctgatataacaagtcaagaaaagtcctcatttgcccaatcagtggccattacatcaccttcctcatcggatgatgcgtcgtcgtccgcttcctcattatccaatccttccctctccatttcatcaacaattataccgactctctccccctcatccgccatgcccatagcctgcttctcccttggttgattttcctcattttgcatcgatggtccaacaacatcccctgcattgataggaccctctacattttcggtttgcattgaaacatttatatctttctcttgtaccgacacaaatataacgaggggccatgaccgttcaaaagccatttccacataccgtctccaagcatcagtgctgtccatcggcattagttcccaaaaataaccttctgttgcacgactcactacaactgacactgacattgtgtagacttcttggtctattctaaatcctctcaacaaccaactataaattgactgaaatgttctctccgcaggcctatcgatgcccttagatgtcattacaaaatctgacagatcaacaccatctgaacaaaatctaatatttccttcaccgtgaactatctgaaatgtgaccttacttgacattgtgcctgatgaaaacaataactgcgttaacctcgcatttctgtactacgccctaagttacattctctacaatattgttctctaaatttctaaaattacgttacattctccagatcaaactaaactacatcttacaattaacactactgtctatgtctgaattcatactattatattctatgctatggatctacacatatgtgctgtgtgctacagatgtgctaaaatatatggaactaaaactaagacgcaacatatatactcaaacataacatattagtacaaatgcaaaagatgtatgggagcatacctgtgatgaattgagcgaaccagcagggcttcgccgctccccttctgctgccctcccctctctctctctttcgttttttttggatttttagtgaatataatgaaatttcacagaggagggactgggctttataagggggaggcaaaaatcgccctcccccagggcggtaagggggcccnctccaaaaccccatgcnccctcgccacccatttgcaggccgtccccccgcacttcaacatgcgcaatacccgacggaccccacagcattctttctcttgaattcgctcgacagtcactcctatgcttaacagccagtcaatagctagacctttttttacacctcacctcggacctgcggggaatatcggcccctatttatccgggccggcctcagccctatcccctattagcacatacaacaatttacgcgctgcttccttatctttcgccaaactagacagacatatagctgcatagaacctatttccctatcttgcacgttccacactccccaaatatctcttggccacggatcgggttagattccttcttccccaaacacgtgtacactaacgggtttctggggctcctccgtatcgtacgttcacccccctcacctactccctaggaaggttcccacccccgtggtgttcccccgctcgtccccccctcccgttgggggaaaaaatctctattatacaacccccctcttgtcgtctaacaccacccccatctgtccacataattctctttgtacaccatcg

SEQ ID NO: 13506 - DNA, 958 bp, Oryza sativa
tgtcagtcactgagtcacactcacagtgccactgatccgccatgagctgggtcaagctgagctgcaggaggagtgcagataagagaatccgccttgctttcctcgccgcgcgcattctcgtcgtttcccaaggaagcttcctttcttttcttcttctccggtcagtcgcaatgtggcgggctctcgcggcggcggcggcggcggtggcggtggcggtggtcgtggcggcgcggccggcggcggcgactgacccctacgcgttcttcgactgggacgtcggctacgtcaccgcggcgccgctcggcgtcaagcagcaggcaaaactcgcctcaattattctcctcggtgttcttggctagctcttcgttctcgttgcaagtaaatgtgtaatgtgcactgactatggtttggttggtcgccggcaggtgataggcatcaacggcaagttcccgggaccaaccgtgaacatcagcaccaactggaacgtcgtcgtcaacgtgctcaacgacctcgacgagcccctcctcatcacctggtacgtacgtttatataatcccgtcttgcagcaagtgaataatgtgtctgtatatggacgaacgtatgcaggaatgggatccagcaccggaagaactgctggcaggacggggtgctgggcacaaactgccccatcccgtcgggctggaactggacgtacgagttccaggtgaaggaccagatcggcagcttcttctacttcccttccaccggcctccagcgcgccgccggcggctacggcggcgtcgtcgtcaacaaccgagacgtcatcgccgtccccttcggccgccccgacggcgacatcaccatcttcatcggcgactggtacaacaagaaccacacggtaatcaaatcaacacgaaatcaaccgcaatatgaaacattttggacaggtttttgattttgagaaggtgaaattttggat

SEQ ID NO: 13507 - DNA, 658 bp, Oryza sativa
atcaattttaaggtattattgacaacttttacgatgatctctaccaattttgctcacctgcacagtgctgcgggcgacgccgtcacccttgttgtaagtacccctactatcctccgtccattcgccgtagtccatcctgcatcgaaattcaagctcacccaccttaacaaagatctccaagaacagccatggcggatgtacatagctttcaagctaatttgtgccattgctagctactacttccttcgtccagaaaaataaacatagaattggacgcgatatatcctaatataacgaatctggtcaagagtcagtctaaattcatttcatatgtcacattatttaattctaggttcggtttttatttcatatgtcacattatttaattctaggtttgttttttatgggacgaaaggggtatgtatttacccgacgacgaaaaaggcatagccgtccatgtggtaactctgcatcctggtgtcggtgttctggaaaatgagcctccatgaagccgcggtaggtgccgttgattatggaactgggccatacagggggcccccgcccattggccgctcctggaagtcgagcgagtagaccccccttactccgtacgcttctgttagccgcaacgctgtttttgctgtgtgaaggcaaccct

SEQ ID NO: 13508 - DNA, 719 bp, Oryza sativa
  unsure (1)..(719): unsure at all n locations
aaaaaagatcaaacttttgacagtataatccaatgcacgagatttcttatatctttcgtttgtttcccggctctttcttgtgtatatactgctccatccgttttatattataactagttaatcattttcttcaagttttattaagtttataaaaaatataacagcatttataacacaaaacacatgcattatcaaaatatatttaatgttacatctaatgaagctaatttgatgttgtagatgttgttaaatttttctgtaaattttaccaaatataaaatagtttgattaaagaaaaaaaattaaaatgacatataatatgaggtagtatcaaatttctcatgtgttggttggtttgtttcaggcagcagacccctcaccacaagatggggacgtcggcggcgggggtcgccgtcgtggggagccgggtggcggcggcaccaatgctgctcctcgacggagcagtcatgatctggccgtagagtggcgacgtgttttttctgcaaggaggtgactccgtcgtgtaggattgtttaggatcagggttcaggatcgtagcctgttttctctgttgatatgagtttgtcagtgtgccgcttgattgtgctgaaaaaattggtttcttttcatttttctttttacctcnttttgggttcttttagggtgggtagagagtgttcttttgngggttcgagcgattgtattacaanatacatgcg

SEQ ID NO: 13509 - DNA, 3271 bp, Oryza sativa
aaattatcaagtatgctattataagggttggattacaccaagttagtttttttggatgttgcaactaatttcttactgggaaattatctgcttgatgcagttcacagtgtgggcatctagacagctaagagtggtcctgttctttttgactgtatcagcagtaagcacaattggaatatgaagccttctaagaagacggagaaaaaaccaacttgctactaaaaatttaaaatgaatgacatgttgatttgccagttgagtttctatcgtgataataaaccaaataaggattcctatcattccaactgggcaactggcaaatagtctctaaacagctttgtattaaatcacaatgcttaggaaaaaaaagtatctatctgttccagtaggcacacatgctggtttttttaatggttttcttctttatttttttaaaagatcaattaagcactctttgtaccaagaaaaacataagtagacttttctatttctaaaccatcatcatgtagaatcacacaatggagtaaaacgggagacatggatttaatgtggaaagtcattatgaaaaaagacatgcacacaaagtgattagtccggagcagaggatacggagaactcggaccgtgattaatccggagcaaaagatacgggtccccaagtgacaagggtggctatgggggatctcttcctccacggcgggcgtctcatcctcgcgaaagtgagggcccctcgaggcaacctcaccagttcaccggtgagggctcgtctcgggatcctcaaacaccgcctcactaccccgccgttcccattggttctctttggattcacaccccagagcgggatcagttggtgattcggcagccccacaactggcgcctcaaatctgaggtggttgcgccccagcgggaggaggatcctcgcagcaaccgacgcaccgccaccgatgctcgtttttggactctctttcaacaagatttctatgagactgtgatcaagcacaagtctcatcccacggtggcgatgcagtggatcaactgggaggagttgcaatcttttgatgacccagatctcaactccgtcattgcagtttgtgaggaaatgggggttcgcgcgttcatgacacttcagcagccgtggtgtaatgagattatcgctcagttttatgccacgatgtactttgaccgtactcgtgacgtgcattggatgactcagggcacctggtactccatttccgatgagaggcttgctaagttgggggctttgatttgaactggatgcaacacttcgccaccttgcacgatcatctgatccccctcaacaccgagcttcgtcctttgtatcttcctggtggtgtcttgggcaagatagagggcatcaagccctttcactcttttctgaaccggatgttgtgccggactcctgtgccaaaggatggtgatgctagcaacatcaaccatgtctcccggaatgtcctgctcaggttcaatcctccctcccaccccttcaatgtcttcaatttgtatgggaggaaatctagttggcatcttttcagtacaagaagggcttaatctatgctcctcatcttatgaggatgatcgagaccgtgactcagctgcagtttgagcatgaggcacctcaccctcagcttcacctgcgcctactcaaggttgaccgcccctctagggtggatacttccactgcaaagctggggacattccctccacttcaactcagccacatgctcctgtggctcaccgcgagccttcttccttgttccacatcttgcgaagtcttttttggcctttgctctgcagaggctaagaagaattgcaaggcgcgaaatgaggttaagaagacggcccggcgcgtcaaggacatgcaaacttagttgaacttgcatctacaggtggaggcgcctccttcgcctctaggttttgaagcagagcctgacgagcctgaggaggagattgaggaccccttcgctggctatcctccggacaacgacttctttgtgtttatagtgcacacttctagggggagttctcactaaaactttgcatccacatcaataatttagctcactaaaatagtgaagatggactaaagttttaccctgccaggtggactcgagtggcccagcttagctttaccctgccatcgcctcatcctggagcacgtggctggctatccgtcgttgtgcgccatgcgcctcctgatcccgctgactgatgacgcgctagtttgtggggatcgattattagcatctttttgacattcattcattgattcatcatgtacatttgtgtgttgttgtgtgcgtctgtgattactgattagtactgtgcttactcctgattggctagctagcagtaccagagattgtgtttgttttggggcccggatttgacgacggcattccttcattcttttagtctgtctgatagttggattgacacatgttctttctcctgtgcttaattttacccccttttttttgcatagatagatgttcattcttttacacatgtgcttaaatatggttttttctgtatgcatgtgtgtgtgtgctgcactgctcccgtgcgtaaattatacttgtctctcatcagtgatggaagtgcatgcgtgtgtgcggagggaaaaaagagaggctacattgatgtacattgtttcctctgcttacattgttctggacaagtcgcatgcgctatctcgtcagtgacacatccacgtggcctgcgatgtgcaagacatattgattgttcgagggatttaaacggaaaaaaataaaacattcaacagttctcctccccccaaaacttatacttagattccaaatcttataatagagaaacaacaaaaggaaaacactaaatacccagctagacctgtcatgccaaacaacacactgagtcgatgtagcctgaactcccacacatcacattcatattccatctatctcttaccgaccccttcgccacgctgccccttcatttggacggatccattcgatccagatccgacaggctctataaacgcaataagggtgctccattatggccaatttacaaaagctagatcgccgacacaagaggatgttaatctagagcgagcttacgccagttgcttgaggggtgatgacacggggttgcctagacaacgtctccaagaagagaaaaccaacggtaagaagaccaccccaaccccccgggtttcccgggttttatttttgttttgggaaaaaaaagggggggtgtttttttttcctaag

SEQ ID NO: 13510 - DNA, 4010 bp, Oryza sativa
  unsure (1)..(4010): unsure at all n locations
cgtttaaggctcccatcggatggtctattcagcaaaaaaaaaaagtaaaattttgaattttccaacttaattttaatattgattataacatatttccaacgtaatttcttttttagcattagcttttaaatcaccgagaacccatatatatatatatatatatatatatatatataagttttatctataaatttatttttattctctaataaaccgttttggcttattaaaagaaaagccaaacaatgggcccctaaaccgtatgcatcccacttcccaagctatcatggcaacatagcaaacgtgatgctgtatgtgctatgatcgactatgacattatacggtactagtcacaggtattttattttctcccatatttttttctctcggttcattttttataccgttattggtttttagccctctttttatacgtgggattggctttttttgttttcggttgatcagtttccttacacgtggttatctttttatttagctgttttctggtttatatgattaagagggaaggagaacgatggtgcttttaagttcatagagaagctcacgaaaataggtaaaaacagtcttagttgttactcccttcattcaaaaatataaaacatatttcttttatcaccaagataaagaagtaattaactcacccgttatgtggcaaaactaataaccaataactactaataaaatgaagggagtactaattaatacttcctccgcctctaaatatttgacaccgttaacttttttaaacatatttgatcattcgtcttattcaaaaacttttgtgaaatatgtaaaactatatgtatatataaaagtatatttaacaatgaattaaatgataggaaaagaattaataattacttatattttttgaataagacgaacggtcaaacatgtttaaaaaaatcaatgacgtcaaatatttagggacggaggaagtattgtggggcctgtttagatcccatggcaaattttttcaccctgtcacatcgaatatttagacacatgtatgaagtattaaatataaacgaaaaaaataactaattacacaaattgcatgtacattacgagacgaatcttttaagcctagttactccacgatttgacaatatggtgctacagtaaacatttgctaatggtagattaattaggtttaataaattcatctcgcagtttacaagcggattatataatttgttttattattagactacgtttaatatttcaaatgtgtatccctatgtccgatcgacacaacgaaaattttcgatccaaacacagccactntagttatgacttgtttactggcactgttatctcgttgatgattctttcaggcacagcttccgaggcacattaggccactgcaacggtacagaagaccacacgatacaggcagtggcggcaggcgattggcagacgacccccaagtatgctcgccttgaacaccaagtactagctagcacgggagtaaagccaactcaaggtataagtaaggagcacgcacgcgactgggcctcgaggtgaacacgataggtatccggaggccatttcttattgcgaggtcaaaactgaggtttaccaccgtctctttaaacgtgtgttaagtgacatattctgtctatttagacatattctgtctatttgagcatgtgttaaggaacgtgttttgtaacagtgtgtgtgcgtgtgggtttattgtgtaattaaaaaaaagagtgttatcaaaccgccgtggactaggttatcgcaccccaccgataaacacggttaacatcatagtaacacaccacgataaattatggaagcagataaaattttattgaaaaagttaaaactatttttaaaatctgttttgaactgggggagttaatcgtgcaccgtatcgcggcggtattatctaactttggtcaaaacacacacaagtgaagccacaagcaaatcgtcagagcatgcgtgtgcagctgctgctggactgaagccgaagcaaggaacatgcccaaccccactggtaaagtggcaggcacgcattcttaatgccgcagctgctactatgtcagcttgttcttcagctaaaacagtggcagttaactactgtcacaagatggaggcaatgatttggttaggcttaatctctgaggtgcaagattgacagcaaaatgctggcctttgagcaagttatgaccagatcacccattgaatatatggggtctttttttctggtaagagcattgtgagtgtgctaggagtctcctactagtttgctggcagtacaggtgacaagctgtagttagtttggaattggtaagaaccgggatgtggaatttattagccacgaggcccttcataattgatgggggaacatggaccaactatgaagaattgcaaaggcagcagcagtcattaggaattaattccaggtagtttcattagttttactagagtattatggagtacaaagctttttacagtgcaaaagagttcagtagtagctctgaactttgacgacaaactgtgttgacgggctacaggagagaacgaaaaagatgcagcaaaggacacagaaatgatactgtcccatagacagaaagtcacctgactgacatgaaacctggatgctgccacacaacacacaagtttttggaggcgttgggcattttcctcaagacagaaagtgtgtgtgccacctgactgaattcggaatcgaatactgaatcccaatcatttcagaattcagacaaacattaagcatgtcctcagaataagaaacatcgatcagtgaaaggaaacttgaactgttgttctgaaccattctacttgaacaaacagggaacaaccctagttacaaatgaacaaacagggtacaatggcaagtttgcatttccacaacagatgacaaagtgcagcatctgatcttatactgaaggaagcaaaggattcacaggggcacacaatcataaatataccttttttttatagaactacagagaaataaattacaaataattagataaatagctctttgacaatgttagaacacagctctcagaatctgatggcctttgtacaacactacaaatcacgaataacccgcttttacccaaaccaaaactaaaatgaaagataagtagctatttctgtactactcatcgagcagcaactgtgactctccgaaggttattttggcactgttcttgatcgcctttacacaaacctccttttgttttccaaatgtacagtttcttttttgactatattatttcattcacctataattccttccctcttgccacaatctaggtacaccctacactggatcaccgtcccaccgagccgaaatcccggcaccaccgtgaaaccgaccttcggtcgcatcatctttccgagctccttgcttcctgaaaatccttttgaacgcacaatgttctccatgtaaaccaccgagtactccgctccctggccaatctggaatatgccgactgccggatcatacgcccaagccaatctatgaagtgtccatattgagcttgccattgcaacgaacagctcgtagagtggtccggccacgcccaacactggcaatttgccacaatcagaattcccaaacagtgaggactcaatgccaggatgaatgagctgcttgtactttcggtcacagaattgggcgaattcgcagtctgggcttgaattgataagctccattgggtctgcatctgagtgctcgatgaattgctgcattgactcattccttcggattgcgagatcgattcctttccgtgtggtggcatcagttgaaccaccaaattggtatgaatcgaagccatcaaacatggataggcaaacccgggagaggagcgcgtgccggcagtgaccaagcctggagtagctacaccggggagaaccgccgcggcggggcaacaagaacccaccctgcgcatcgaagaaattcgccagccaaccggtgaaacggtgggccactccgaccg

SEQ ID NO: 13511 - DNA, 1950 bp, Oryza sativa
  unsure (1)..(1950): unsure at all n locations
gaaaaatatatagtttgaggaaattaaggaccaaaagtagtttatgaaacaaattaaccagttctcagaatatccgcgtcaaggtacagccacacatcccacccaacaatgttttcaattgaattgaaggaaagcgagtggcatcttttcagtacaaaaagggcttaatctatgctcctcatcttatgaggatcctccgaggacttgaagtagcggaggacggcgacgccggcgacgcggcgccacacggtgtcgttcaccatgcgcgcgctggcgacgacgtagtagtcggagctcgcgttctggtcggtggtgacgaggaaggagtaggactggccgacgtggacgtccaggttggtgtagttctgctgcgtcgtgtaggagccctccgtctccaccagcaccatgttgtgcccctggatcctgaagttgaggctcgtcgacgtccccacgttgtgcactcggatcctgtacgtcttgcctgtgtccccacaccgacgtcgccgacacacgcgcaaaagataatagactcattgtaagtaggtagtaaccttctccgtttcatattataaatcgtttgattatatttttgttagttaaacttctttaagttttttttctataaacttaattaaatctaaagaattttaataaaaaaaatcaaacgacttataatataaaatggatggagtagttgcatcaatttgtggatgaagcaaacaagattatatccttttcatgagggtgaaagtattcagtgaacaattcgtcagtttcaagtttcatgaaatcggacagggtctctgaaagtctgtatttttggtactgttggattgactactctggcttctgttgtcacatcttttgtatcctagtttcggtaaaaaaaattttggcatttttactcctatcgttgatctgtttaactgaaaccattgcatgatatactactagcagacaaaactggtgaaaattcacgagaatgaactttttgtcagttaagcattagcggacagcttcagtaagcagagcaggctgccttaaggcttaaagcactatcttccacaacactttgtcctacaatcaaattccaaatttactatcacaaaaagcgaaggaactaactaaaccttactcctactagtactactgctatgactatgaaacaagattccaatccaaagaaaacacagtgctcgatcagcatgataaaagcaacgaaacctgctcatccagctgccaaaatgccaccccactgactctacgtacgtactacgtattgacgctgtaaaaaactagccgtagtacagagaagaggacccaaagtttcgtcaaaaattttattttacccggatccacattgatggtctcgtactcgatgccggccgggacaaggctgtcgttgtacctgtacgggcccttgccgttaatcagcacgccgtccggcatcccgaggtccttgccactgtccagcatcttcctcagatcctgcaacgaattccatccaaaatttcaccttctcaaaatcaaaaacctgtccaaaatgtttcatattgcggttgatttcgtgttgatttgattaccgtgtggttcttgttgtaccagtcgccgatgaagatggtgatgtcgccgtcgggcggccgaaggggacggcgatgacgtcgcggttgttgacgacgacgccgccgtagccgccggcggcgcgctgaaggccggtggaagggaagtagaagaagctgccgatctggtccttcacctggaactcgtacgtccagttccagcccgacgggatggggcagtttgtgcccagcaccccgtcctgccagcagttcttccggtgctggatcccattcctgcatacgttcgtccatatacagacccattattcacttgttccaagacgggatgggtaccgagttcgaattcgcccatagtcaacnggttctcact

SEQ ID NO: 13512 - DNA, 3866 bp, Oryza sativa
  unsure (1)..(3866): unsure at all n locations
cctcggagctcctcaagctgagagaacctagtactcggtgtggtgtccccgtgcaagttgtgtcgtanactggctagtagaccagtctaccggcgtgagacgaaaaggcccagttacgaagttcccgactgcaaatcatgctggacaaggcccatcagtttcgtacgagtatttaacagtagtaataaaaagtaaagtaccgtgtgggcgagggatcgacgctccgtgagaggaagagctggcgaacgcgcccgaagaggtggcgaacgcccctgcggagctcgcggaagcgccggtcgtgcctgcgaacgcgctcgaaggcagacgaggtcctgcgatgaggaaacgtgcagttaaaacatggtgacatattcgtgcaaaagctgaaacaaaaatgaactaatatctgggctgaactgtaccgtgcgaaaccggtgctgtaggtcgcactgctccgaagctaggggcgcttgaaggcaaacgaggtcctgcgaggatggaacatcaagttacgacggggtgatgttttcgtagaaaaacagaaacaaaacttaagaaacctctgggctgagcagtaccgtgcgaaacaggtgccgtaggtcgaggtcctgctccgacggtaggcgcgcgaggccgtggttgtaccggaccagctggaggtatgacgtccacggcgctgcgacaggagaagacgcgcatgaccgcacgcatcttctcctgcatccggtcgaaggtcaccctctgctcaacgtcagtcaagtgcaaacctctgttcaacctcacttggactgcggtgatatcggcactgatatcccgtgcggcatcagcctatgcaagatggaaataaaaaattcagtagttgtcctatattatgcaagataaatgaaataattgtaagaagtaatacaaattggacgtaccgccacgaagtagtctcggtcacggtgcgtgggatacgcgtccgtgacagcggcaacgtgcggctctggggcgtctggagtgaaggtcacacgcgcacgagtgcgaggaaggtacgagccaaggtagtcacggtagttctcctccgtgtgtgggaagagctcgttgatcacctcctctgtagctaacacccagtcgtcaacgtactgctgtacacgtggagcccaaagtgcgcctgctagctgtccccgtcgagtcaacctgtgaaaagaggtaaattatatggctcgatgaagtaatccgcctaaaaatttagaaatgaacaatccgaactcacgagtggtcggcagggaggacggtcggctgcacgttgcccggaaacacctgcctaagtccgaactgtctcatcacacgctgcgggcagtgaggctcaacgaaaatgtcgaacaccatcggcaggatggtgagccagtaagcctggtcgcgtgtgcccaaggacgaaagtcctagcggtgctctcgcagcgatggcctcttctgtgtacggctcccagatgacgtcgctcggctggagacggtcaaactcgaacacgaagtccgggtaaccacgtctcacctggacgtgagcgtaacgacgctgcaataaacatgatcggaattagacatgttatgtgaagaaaaaaaagaagacgactgataaacttataacgcagcgaagttgcactaaccccacgtcgacaccagtaagtccccatcgtgggaccgtcctctggccactgcgcgctgcgaccaaccccgtagggtgcgctgtccaccactggtcgacctatggcaaacctctcggctgcccaaagctgaagcagcatagggcagccagcgatgatcgctcccgcgtcagtcttcgtgcacgcctcacaaagggcacggtacgtggctgctagcacggcagaaccccagctccactgcggcacgtcctgtggctgagcatccgcgatggaccgtgcgtagtggaccagccgaaagtccacagcgtgcccgtgggtgctagtgaacatcacccacccgaacaaccacaacaggtacgcctcaagggagcgtcggaccgagtaatcatcagcgtcagggtgcagaaggtccgcctacaattaagaatgaaatgttagtacaaaacactcatccggtcgcaaataagcatgtatgataataacaacttatttacttacagtgaactggagcaaccaagccttgctaggcccgactgtagagtacggaggaagggtgttggccggtcctaggtgtggaaggcgcatcacctgctcgaagcgcgcagtgatatcctccttccacccaaaaacaccgtccacgggaccaactggtgctcccgccagcggtagcccgagcaggtacgacacgtcctgcaatgtcggagccatctccccacagggaaggtggaacgtgtgcgtctcaggtctccagcggtctacaagagcggcaaggagtgaccggtctgcatcccaccgcttcgctgggtcacggtcgtccgccgccgcctcaacaagcctacaaagtggtagaaggcctgccgcacgcaacctgtatagagcaaacttcaaacataagtacaacacaaagcaaagttgagttgaaatgtgaacatacgcataccaaggaacgtgacgggggtcgacacgcaaccactcgcgccacgtgcgtggacggaaggtgccgagctgtgcaccctcgactgctgacaggaacgagcggtggttcctgtcaatcccacggttcaacagcgccggtgtgtcgtacgccatacttgcatcaaataggttgatcagaaacatataaataattagttcaacataagtaataaatgttcataagcgaattactaacacatattaaacaagagtacaaacaaacaaaagtgtttagtccgaacactcatcacgataacattatgatacaacaccgaatagttcgcaatactactagtacaacaatagtcggaggtactcattacaacaacattgaattgaaattacacgatagaagtatttagtccgaacactcattacatcacaacaacattttatttcctaaatcgaaagcattgtgacactatggaatcgcctgctgcgcgacgacgacttggccttgcgcgcctgcttgttgttccttcaccaggtggtcgcctaccatcacttgcctgtccagatggactagcatctgcgccgcttggaacttctgcattcttcgggcatttcttgtaagtatggccgcgcagatcacacttgctgcagcgtaaagtcctcccacctgcttctgactcatccatatcatttctgatgcgtctagtttggcgtcgaccctttttcacccttaacttagatggatctggaatataaaaaacttgggcactcagcgttgtgtaagatcctgagatcccgaacccatatatctcctcactccatgtatgaaagattgcttctttcctgaaataatttgagacgtacacattgggagatatgccacaatcaccggcagcagcaagaacgtgtgagcaaggaaggtgatgaagcttcggcttcatacaactgcaggtacatccaccatccgccttcaagacacattcctgcacggcttgcttgcgatatataacacgcctgctcctatcaacacacattatttcataccgatgcacttgtgtgccttgagcaacaactcgatgtctccgtgcctttttgattttatcttccatgtactttgtcactacgttgccaaacactatgttgttatcggccatggacggaccaattttcttgtatcgatccctaaagtacgcttgcgtgccgggaaggatgaattcaacaatagcaaccaatggaagtacccccgaaactttccccttccgggcccaatttttttttaacccccccccccccaaaa

SEQ ID NO: 13513 - DNA, 1088 bp, Oryza sativa
cataaattaaaaaaagtgtgaggatgccccccaccaaagagggggggaaaaacaaacaaaaaaaaaaaaacttataaaaggggggtttttccggcgaagtaaacaggtccagtaggaacaggttttttttcattaaagtttaaccaaaaacatttttcccttttaaaaattacggaaagtagtaaccacacgctttgtgggaagattcgccctcacaaaaggcgatgaaaataatgtgtaatccggctgttcgctatcgggagaagaccgtaaacgaattttgcaggcgagatccatgcacgccttcgggtaggcctattttaaactgtccaggggaccgcctgcaaatgggcggcgagggagggcatggaattttgcaggcggcccccttgccgccctccgctagggcgattttgtactgtgggggggggccgcctgcaaatgggcggcgagggggcatggaattttgcaggcggcccccttgccgccctaggggagggcgattttatactgtgctctatatttttgtataaatatcaatagttatcaaatctttttatattgaaaactatacaagattaaaatctccaagactggtaaaatataattttattattttttagggcatatttggattgttaccgtacaaatattttgttagcgccaaaatataagcaagttttggcactaccaaatatttggtaagggaaaattgcatttgatcatatttggcttgctgccaaaatgtaaaattgtagtgaagaatgttctacataatctcaaatctagattacgtattaccaatgaataggcttccattttcgagtgtggagtgctactgggaaagaagatataaagaggttgcctttagattgtaaattatatagcggtcgttttcactggcatatatgtgaacttaatgagatacattattcattaaatgtgacaagacgaacacgcgggggcgggaattactttattgtaacaaggcggcgccccaaaggttggaattagggtgggagaatccccaaacctttttttttcaaaagacccttttgttccccccccgcccccttttttttttttta

SEQ ID NO: 13514 - DNA, 6658 bp, Oryza sativa
ttgttctcggtcacacctgaactctatctgaagatcttgtcgaatcatgttgatggccaatgcaactgagttaaaatctacattctgattttggtctgcatcagtgtccatgttcaaccgagctagtatcttcttggtcacactcacacctgaactcttatctgaatatctcatcgcatcgcatcaacggacaatgcaagtgaatttctgctgcatcaatgttcatgcttaacttctgctgctgcagatttgtcatctgtgaactgtgaacagctggttcatcagatgcagttatatcctgagctgtgccaatacagactagtagtagtaactgtgaatgagacaagtaactgtatgattttccttttcctgcactctgacctgttccaaaattaatcttttgatgtgctttaactgatgaactcttctcccctcggtgtcctttccaatgaaagaaacaaaaccgatgaagatggcatccatatttttgttgaaagaaacgaccttcctcagcaacagcaacactgcaaaacaccatccagtgtgagctgaaaagtgggtaaaagagagtgaaacatataatctgatctctaaacaatcagaattacagaacatcagcttgcttcaccactgaccaagaaacctaattttggagtcgatttttgaggttttttcatcacaattttattttccagcatttacattcaaatttctaagaacacacatataaaagttttataataagcaaaactatgacacaactgcattgtgattgaaacaagaaaccagccttttattttgccttttctcccttcccctgtataagtcggtctggctgattgcgttgtgtaactataactttttctaatatattgacaagtaattcttttgtgcgtttgtgaaaaaaagattgaaacaggaaacagtcctcccattgccaaacatttctgtgtatcatcatcaaagcaggattgctggaagcctggaactgtactaggctactggctatggtaatcagtcgctgcagcatggtacagtacaagttacaccgcgtgtgccagttcatcttgcacagtgacaattcatctgccactcatcactgtgctctctgcacttgttctgtgtaggccatgtccacaacaaccctacatcctcaggacacggagccgctggttgcagggagagagacctcttcttgttcagtgcatcaagatctgtgtatccctgtctctttgatccggtacactcccctctaaatgcacacatttaataccaggaccagcacaacatctcgttacactacagcatctgcttattattatcttatcagccgtagccaaaattaaaattttgaaacagttatagagcttataagccactgttatctttttgccatacagcttataaaccggcaagccgttggcatcttttacactacagataaggctcccatttttgtcctacaacttataatccgctgtcaaaatttggatttttaaactaagttgatattgatggtttttcattgaactttatttttcagtattggcttttaaatcgttcagcgttaggtcatctgatggtagtataactttagtttattttgcataattggttttagaaccgttagtaaaatagatataaaagttttacgtataaattatttttagttgtttttacggctcatcaataatggacgaaggctggagtagcagtaaagcagatgaaaaggatcattgcatcagtatccaagcagaactggatgatctgatcctccctctctcacccaagtcattgtcattgtcatatactaattgccagtgttaaacccaaaacaaaaattatcgggaatcctatgcatgtcataacacatatataatactctaatttttaactaataacataattattataagctaaaacagctaaagaatggaattctatctcctgtgacccagactacaatactgtaggagcgccgctgttaattgccaaggcctgtcttttttttttttttgaagataatagaagctttatttagactcagttaattacatcaagatgatacaatcaaactgagtcaccgccggcctctgcataaaatgcacatagccaaaaaagaagaaagaaacaactagaacatctcccaagcacaaaagtttaacagaaacatatatcttagtggctatcaatctgtagactagaccgccacccatgctcctgggtaaaaaacttctgtgccacctggtctaattgtcgagataccgccgtatatcttagtggctatcaatccgtagactagaccgccacccatgctcctgggtaaaaaactcctgtgccacctggtccaaacgtcgagataccaccataatagtatcccgcagtcccagttgatggaggatagcccaggtacgtagcgaaggcctgtctagattagcaacatggttttccaagcccagccttttaggcccatgagcattcttggatactctaacaaaattatgaattcccaaccatgaacagattcctctgaaaaaaaacgtgaacagattcctctataaaaacatgaacagattgacattacaaacttacatccacagtatcagagcaagagacagcacagcggcaactctgcagttctgcaccgaaagtttcagtcttgtcatttgaactgcatttcatgtctcacgtgtgaatggctgtgatcacttttactccataattacaccaaaacctccatggttaagtccccctctatacacgctaaacggcccatcagagtttgcctttacaataagttgagaatgatatggaatttcggcatattcctcttcattttttttaaaacatagtacaaatacaggcgcttataacgcgcgtaaagttacccctatgaacacacacgtgcatttcttcatccaacttcactggatcattactgtacattatctgctctacgtctctaaactatgttctttttttttaaaaaaaaagatcgattgtattgcttggatcacttgctctataagtttactttttataatatttaatttatatctataatcgaatgggtcgttattaggtttcaaattttagatttaacgttagtgtccatcaatcatttttctttttttttgatgaaatgtccatcaattttggaatgtacactgcccacacgagtgcgtgtttagtgcatgatgtatgagtccaaaaagtacatgtactcagaaagaaagttgagattagatgccaccatccattggcagagcaagcaattagcattcagtaaagcttctttgtcatcttacctggcgattgctatggacacttcaatcagcccttgtttatcttcataactttttcttcaaacttccaacttctccatcacatcaaaatttttctacacataaactttcaacttttccatcacatcattccagtttcaaccaaactttcaattttaacgtaaactaaacacaccctcagcttggccttccaaattcaatgtatagtatacgtaaaccgtggtacagatttgctattaggggccttggtttttctaagtggctcgtaattgatgatactatatgtatgtgtgccactgccagggtttcgaaataccgatcctcgctcattagcggttttgttgataaccgtgattactactcgtcctcattgacaatttcagtgaaattcagaaagggactacctactccctctgtcccaaaataacttaacctgtgatctatccgaggagaacgaatcttgacaagcctttgtccagattcgtcattttaggatgggccacattccattattttgggactgagggagtacgtccccatatcacaaggtctgttaattttaaagaaaatttagaattttatttttattttattccaagcgaaaaaatggaatatttagcacatgagaatacacgttcatatcgtcattgtaaactgtattttatatggttgccataattattatcaaacttatctaaaaaaacaaatacgatataaccgaatcaatagattaagaagagggaaatttttgaaaataaatgattgatatcgaaaacatattgaaacacaatggcttatattgaaatatttaggacccctgtgtgatcgaacaattggcacatggccatggatggccttggagaccggacatgaatttgatacaaatttggtgatcgatttcatctctaaatgtttgtcgcctgccatttatcttttgaaagaaagcttaattttttttaaacttggttaggttaaccgagcggtatgtcaatatgaactaccttgacaataccaatacccgtgattatcgtgcggttagcatcatattttcaaaccctggtttatgcctttaaaattgttgacgtgaatattagtggttcgtcgatgatgtgaaataaattgacaagaccaatacccgtggttattgtgcggttagcctcatattttcgattttgtgcatgtaaaactgttgacactgacacataattccgttgaagtgactgacaagctagaaaacatgagaatgaactcagggtgtgtttagtgcacgctaaaattaaaagtttggttgaaattggaaggatgtgacggaaaataggaagtttgtgtgtgtaggaaagttttgatgtgatagaaaagttggaagtttgaagaaatagtttgaaactaaggtggtgtttggatacatggactaaactttagtccctatcatatcggatgaatttggagtaataagcatagactacttataaaactaattacataaatgagagctaattcatgtgacaaatttttaaagcttaattaatccataattagcacatgtttactgtagcatcacataggctaattatggattaattaggctcaatagattcgtctcgcgaattagtcgagggttatagaatggattttattaatagtctacgtttaatattaataattagtatccaaatatccgatatgatagggactaaaaggttttagtcccatctaaacaagatattacactcggcctcagaaacgaagggagccggaaaaaaagaaagaaagaagaagtgatgggaaaagagtcatggggaggcttgaaatgggaattgggaagcatggcactcttgaaagtgttctcttgacctatccttggacaacaccatttgcacctagatccatcagtgtattataacgtatgaacacgacccggttttctctgtctcttgagatgatgtatgaacatcttctatttattggccgatgtgatgccaacttggatgaaaatgacctggtaaccaaaactaaaagagaaaaaaaaataaagaaagaaagaagagggtgtcattaattttgctgaacattataatttggtagtgtgcttattttcaggacaattaaacacagtgatgctatatgccatttgcatgagtatatatttatatagagactcaatcttaatttgattcatgtgtggcaattggttaccactgctacagtaatatcacatgacaaaaacgtgaggtatcaggtgttttgtccctttttttcttgtcgtttttgttcattgaatttgggttggttgtgagcttaatttcaacttgttactagtggcggagcctgagcgaaaattgggctgaatacaattgaattggaaaaaaaaattattacgcaaaaaaataaaatgggtctaaagaaagagcatatgtttaaaaaataatcccgtaaatggacgaaaaatagctatcctccatttagttgagaattaaacggccaccaactacagaagacgtatagtagtacaaagagaaaaattgggcagaagtatcttaaataggttaggaatgtggaccagttaatggtgaaatgctgaagaatctttaggatcacaccattaaaattgagtatacacaaagatatttagtaattatgtacaacaagtcagagaattatttcagaaaaaaagaaatagaataaaacaaaacagcccaatttcttctgcaagtcaaactgaaacttgaagagtacgagtgtcaaggtagaacaagaaaatgtacaactattttgtcaaagcaataccttttgtacggttaacatctctagatacgtctactaagaatcatcaaaagtgtaaacctttttcaaaataacttttatccatgactatgcaaaaccatctatctctctttaaacatgactatatccacacattagctgatcggtgaaggtcgtacgccttttcaacatttacattggtagaatagtatttcgcggtagtttacctctgaatatttcaaaagaagtttacccataaatacatcgataaaaatatgtactccttccgtccctatgaataactcactttagatttttttttccaacatgatcgtctgtcttatttaatttttttataaaaaaatcagtcatcatatataaagtactatttatgttttatcataataataataatataataataatataataataataataataataatttttaaaataagatgatgagtcaaacgttgtatttaaaactgaaaaatgtattttttttatgggtggagggagtagtgtaagagtatagtataataacacacaaacaaaaggttttatttccataaaaaaatatttttccg

SEQ ID NO: 13515 - DNA, 2799 bp, Oryza sativa
gaagtagaccctccttcctgtgggccacaaccccaccccacccaagcaatggcgcctcttgcgacctcgtcaacgtcgatccccccgagctccagttcccttgtaagccgaagctcccggaccctccttggctcccccgtgctagctagcttcatctcgttccagaatttcgccgggtgttcttgtttttttgtctgaatctttttttcttggtaccttgcaatttcttggcgtgcccagtcgagctcgacaagcagatctcctgccccctcaggatcgccaacaagaccgagaggacggtcgcgtttaaggtggtttgcggcccgtttgattgcggtgtaaaaccctagaaatatttttcttgcttgcttgcttggtgtttgaggaattgtctcgctcatggttttgcggtgtcctttttgtgtgaatgcgtgtgggtagtaggttaagacgacgagccccaagaagtactgcgtgcgccccaataatggcgtcgtgcggccgcgatccgcctccgtcgttgtaggtaatgtgtttagtgtttaactgaactaggccagagttcaagaaaccgctcaattttggggattattttgtggctgtcggaatgtggggaattttgatgcgttgtgtgcttcagtcacgatgcaagcccagattgtggcgcctccggactttcagtgcaaggacaagttcttggtgcagagcgtggtcgtcgacgatggcttgtcagctaaggacatcacctctcaaatggtagtactaaattgttgtttgcatgttgtttatggttaaagatttcgttctgaattcatggattggtgtgttgtttagttcctgagagatgagaacaacatggttgaggaggtgaagcttaaggtttcttatgtgatgccacctgaaccagcgatggagattgcagaggagtctgatattccaaagagaattttggtgcctatgcagcggattttggataatgggaggagtggttcggagctgtcaagtggtaatgtctcattgagatcagctgagatggggacagtaagtgcactgaatttttctcatatgatatttctgctcctatgagcctattaaggaaataaatggatgatttgcttaatgtgttttcaggagttgggatcacctcttggacgatttgtgagaaatgaggatatgctgaagactgcaagtcctgttgttgtacgtgctacatatacaatcaaatctttttaattgcttctatatatctctctacatatatgcgccccttaattggtctacaatttcataatctgtacaaaatttaagatgttgcttgtttctgtctttgtgatgtaaaatgttctaggaaacaagagtacatgcaggacctgatgaacaatacctcgaggtgagttcatttagcatctgaagctctctgattttttccctctgtttctcagtcatcctctgtgtggaattctattcattgttctttgtaactaattaaaaatgggggttggaatggtaggtcttctaaacaaatatataaaggaatcattcagttaatttctgtttgaatagtacagtatctagctgcagacttctattgtgcatgcatggctagttaccaacttaccaacacttattttatattccaaacaagagtttttctctgtttttccatcttcataaatttgatttatatacaattgacaggtagcagggtgttctttatatgtgtgttttactaatgattgttccaagcatgaaaattatttttctatttaagtcttaatttacttttgcattctgttctggtcattgacttatacctgcattgaataaccacttctcttctcatttcagctgtccgctttggttgcaaaattgaccgaagaaaagaagtctgcacttgagcaaaataggaaacttcgagaggagctggtgagtatttggttaaagtcatgcactcttacatgcttccatttgaaagctaatgatttgagtcatttacttagttgtaaaagaattcccccttttcaattcaaatattattacaaaaataagcatcacctccttaagtacttgttcatgtagaaaatacacataagccatatattccaggggatttatctgaagggccttcaatctagatatttcaagctgcatacatcaattgattatttgtctttagatgcttttttttctcaatataaaattcaacgattatgcgtccttagatgctacttcttctcaatataaaattcatcgattatgcgcctttagatgctacttgttctcaacacaaaattctctaggttatccatagacgacaatggataacaatattattattattattattattattattattattattattattattattattattattattattattattattattattgctgaatcgttatgcactttgcttacgatggagctgattatttttctattttttccatcgatcttgtctgaataataggagcaaatatattacattagcatgttaaaactctaatttaaggtccattgggaagaaatgccttcttatttttgttgacctactggaaattatatggtagtgaacatctttggccaccccattgtggcgggcattaatattccagaacctgccagggcttaaagcactccacattaaaggagcttcttgctggaattcgactggtgatggggtaactaagcatattttgggtggcttggaaagaatgaaaaactatatttccaccttggcagataatttccccgcaataaaaagggcacccccggggatcttta

SEQ ID NO: 13516 - DNA, 2852 bp, Oryza sativa
ttttgacttataacaaacgttttggaacttataaaatgaaactgaagtagggttagagcttatttggtaggacgtcaacttctaaatttaactttttaggagcggagtttggagtagagctgtggagcagtcagaaccccactctatcccagtagcctgtaggttatttatgtcagatcattccagcccactccactttattttcgatggagctgaaaccgttaggtgatactccaaccctaggagaggtttctcggggaacatatcagtccattttcatcctgctgtgacagatatgtacaactaatcaacttgcccctatcaacttttgtgaaccaatggcctcatgttgtgaagcgaaatatttctgaacgttaattgtgggctagtggtgacacatctttcatttcggcaacaacacggttgatttgtgcttctgaattgcaaatggtgacatgctgcagttgagaatttaaaagatggttcatttaaacagggcgaagagtggtactgatgtgacgtatgcgatgatatacagggggtgtttgaatccagggactaaactttagtctctgttatattggatgaatttggagtattaaacatagactacttataaaactaattatataaatgagagctaattcgcgtgacaaatttttcaagcctaattaatccataattagcgcatgtttactgtagcatcacataggctaattatggattaattaggctcaatagattcgtctcgtgaattagtccagggatatagaatgggttttattaatagtctatgtttaatatttataattagtgtccaaacatctgatgtgatagggactaaaactttttagtcccatccaaacaaggtcataagggggtgtttagttttggcgtgtcacatcaggtattatatagggtgtcgcatgggatattcgggcactaataaaaaaactaattacataatccgtcaataaaccgagagacgaatttattaagcttaattaatctgtcattagcaaatgtttactgtagaatcacattgttaaatcatggagcaattaagcttaaaagatccgtctgtaaattagtcgcaatctgtgcaattagttattttttagcctatatttaatacttcatgcaggtgtttaaacgttcaatgtgacagggtgaaaaattttggggtgggatctaaacagggcctaaatattcttggataggatgaatgccagagtaagcgtaaagaaactacttcctcttctgtgctaaaatgtaagtacttttaagattggcacagatattaagaaagtaggtaggaatgattagaggaagtgtgtgattggttgagaagagaaaatagatgaaaggaaatagttatgattggttgagagaatgaggtagataaagaaatagctttattttaggacaaaatactgtgttagaaataggtgttgacccaactggggaacaacacaattatatcttgtctcaaatgatgcatgatcttgctttacaagtctcgggtgaagattgtaagggcatgtttagatctatttggaatggtaaatggtaaatgacaaaagttttggtggcaaaagttttagcattgcaaaagtattagtcggtgtttagatgcatcataaacttttgccattctagcactttttggtggagagagagagagtggtcccaaagtactttttggcacaatttgctactatggactagcaaatggcaaatggcaaattgtcaacttttgctattagtgtttagatcccaaatggcaaaacttttgctattttggaggatctaaacatgacctagatgttatatcatggggaagggagtacctttcaatcatgaacagaagatccggcatttaacagtcgatctcaacaagcaagccaatcataacatgtttgatgtgattcgggaaggcaaatatttgcgcacatttatagttgtgggcagctctgaaaattgtgtgccaagaatccttaatgactttggagataaatttccaagattactcactttagatttgagtaattctggtatatctgagctgcctagattgataggaaaactgaaacatcttcggtgcctccagttgcaaaacaccaagatcagacaatttcctaaatcaatctgtaatctctaccttctacaaacaccgggccttagaaactgctatgatcttgaagagttgccacgtaaaataaaaaatcttcgcaagctaaggcatattgatttggtgatgacctgtaatccctgccgcaatgactgcagcttgaagtgtatacccaaggacataggacttttgttttgactgatcttcaaactctttcaagctagatttgccataagcaagaggagcgctcttagcatccacacttgcaaaaaaggtattggggagttggctaacttgaacaatctcaatggtgaacttcttatttcaggtctggaacatgttaatgatatggaagaagctgtgcatgcgcatttggcttcaaagaagttcctcgaaaaggtagggttttcatggaacggcagcaatgaacaagctgaacaaattatggagcacctaaaaccaccaaccacaatcaggtggcttggttctccagactacaagaagctaatcactttggacgagggtttgaaatttcggttcaaaatttctaaaatttctgaaatttcagtaatttcgctccccaccggcatgctcaaatctcatccgaaattttcggttttttgcatttttttgtgaatttggccaaattttattaaattcattcaaattcagtcaaaatttaaaataattttcgcccgaaatttccggaattacctaaatt

SEQ ID NO: 13517 - DNA, 1433 bp, Oryza sativa
gacatgtggatcaccatacttgggcttctcgatggaaaatctctggtggcgaacaagcttctcaatgaaatcctcctcaccagggcgactgggaagctcagcatattctgaagcagaggctagaatctccaggagccctttcatcttagtcttttgagttagcattgaactgaacctctcaatagttgtgtagctaatgtagtagtacgaagcaatcagaccaaggttgaggggcttcaggtacatatcctcctctatagccacacacttgcttgattctaggtcattcaatacagtctcaaccaactcagataaatggtccgacaaatgcctgtggctcacgccctgcagattgtagtagttagggttcttggtcagccgcctgtacatgaaggtccaagtaaggtaatccacagcatcttgcttgttttctatgacaccaaccaccacctcagcgttcatatgatcatgcaagaagtggtgaagatggctctcaacagggaaggcctcaaaaaggaacttcttgtagtattccttgcgaggcgcatgacacaatataacacatttccctgagttatcttgaagaggcctgctagcatgacccatcatttggagtagatcagtgattggataatcagtatgagcattctcccggccatcataatactgggttcccatcacaaccaccagatgggcaggcaatgatcttccccagcacacagtgctactcgcaacacacacttggatcctcccaccgagaaacagctgcgttacaacttcctgttccagatcacttaaaccttcatgcaagtagcctacaccacatttcagagtatatttaagtgtttcatcactgataccaccagtgaaagcatccatctcatcttctgaaccaagaaggaaaggtgttccaccaccctcagcactcgagtatgcacacaagtccaatgcagtcaaccttgcatgcttccgtgtaggcacaaacaccagggcaggtttaccattctttgcatgttgggtaatagcagtgtatgtcggcttcgtcattgcctgcatccttgcctcaaaatttgctatatccacaccctgaatgtgtatttctaatggcaccggccggacagctggaggaaagttgaaaaggccatgagaggtagcaccaatccattctccgagatctttagcatttgcaagtgaagctgaaagagccacaatccggatgttactgccgatatgacttgcaatacgcctcatcctagagacgatgacttccagaacatgtcccttttcagatccaatcagatgaagctcatcaacaatgaataggctgacctgttggacttgtttccgctgtttccaccggcgagagagtgcatcccacttctcaggagtactaatcataatctcccctttatccagaagcttcaagtcagctg

SEQ ID NO: 13518 - DNA, 772 bp, Oryza sativa
cagaacattgatctttgcactgggctcctccaagctttctttcacaggaataggcacacgatccaaaagcttagccagctccattttctcatcttgtctaacactgacatacttgaattcttcactgagtgaaaagagccgacatagctcaatatcacccattgtaggcttcaggtactcattgtaagttgaaatagtcccgtggctaatatagtaataactagcaatccttcctaggtcagtaacctggaagtatcctgttttcctgtcatactttatcaaattgttcctatcgagcagatttgcagcagagtgcacctgcagaagcacagaagtacaagaatcaacaattgattgagcatggactagaaggggtaacaaagcagttaaacatcaagagagcatacagagaaaccatacaatatgaacaacacaagcatgaatcaattgtcaactagatgcttcagctatggaattcagccaacaaaaataatgagttgaagttgcgcactttttacgcattttttacatgctaccttaccctgtagttcgagtgctaaattgatgcacaatgctacatcggtagtcaagatgcgcatacatttcaatagaagagactggcttgtatcatgttgctattggtcaaagagagcaaatatacaactattaagtgtccagcaacaaaatataaagctacactgcaaacagcattcggacaaataaaatccaaggccattatcctatttctattatacactagtacatgctaatg

SEQ ID NO: 13519 - DNA, 1264 bp, Oryza sativa
gacggcgagcacctcgtcggcagcgccgccgagcacgtcgagcggctgtccgccgaactgctgctggatgacgctgagcagggcctcgtaggcggcgcgcgtctccttggtctggggcttgtagacgacgtcgtcggtgagcgagaggacgctgacctcacgctgggcggctgcggcgcggcgcctgcgcttggcgtcgcggcggtggaggtcgtcggggtcagcggcggcggccttcttcttgcgggacttggtgagcttctcctcgagctcggggggcttggcctggacggcgcggtcgccgaagctcctggggtcgatcctgccccagagcgtctcgggctcgccggtgggctcgtgggtgtcgcgggggcgcgagtcggtggtgaggacgaggctggagttggcgcggtactcgtactgcttgaagcgcgcgtgcgcctcggcgccgccgcccaggttcgccatggctgcagatcgatagggtttttcagttggttttttcgtgcggaagcgggaggagaagcgggaggaggaggagagggatagctgggggttaccttttggcgagccgagggagggtcggcgcctccggtgataccgccgccgccgcgccggagaagggggagaagaggaggttggatttggaggaaaaggaaaaggcggcgatgggatgggagggactggattttctcgcggaacgaatcgaggcgagccctaactctaaaagatgacgacataagctaagctcaggtcggttcgttcgagagacgacggtttgggcccataagcccatccacaaaatagtactgggctgctggattaatgtcggtttcggcccatcaagttgtagccctcaggctctctcgaaaggaaaacaatttgggccaggtgggctcaactaccgctcaaacaattaggcccagatttcacccgtttctctgggccatatatactctgcacaagcaccctactgctctcctcattcggtcattagagtcatggaaatgtaaaatggcatatatcaacgagaaaaaagttttggagtaagtattttagtaaggtttttgttttagggtgctactttttgaagaggcaagttttgccctaaaaaggaactggagatactctactgaaagaaaaaaaaatactactcactccgtattttaatgtatgacgccattgacttttcgaccaacgtttgactattcgttttattcaaattttttgtgtaaatatgaacatatttatgtcatgcttaaaa

SEQ ID NO: 13520 - DNA, 686 bp, Oryza sativa
attcctgcagcccaggccgggaacccacacgaacctgccttaacccaaggcctacgatgattcagaccgaactggcaacccgaccctgggtcccagctcgtcccaagccaacccaggccaaccattccacattttagttgtttagcaggttttaagaatttaaaacactaacttgggtacattgctcggcttgcccataaccgagggcgcggctattcgaataggttgtactctgatcagaggtgtacatctttacccacaagacacatcttcctcacgtgtaaccacgtgccacataccaccacgatatacagacggaagacgtgacatagtttccaacccatcctagccatagacaagagtaccgacccaatcccacctacggccggaacccccgggacaggcaggtaggactgagcccctagcagcaggacaccggccctgtgccatgacatctcgactaccgggccacagctcgtgtagccttcatttgccctggagaatgtccatcgacccccgacttcatccatctccatccgtgtacttttgtttataaccagactgagccacaaactaagccttacccactagacatgtggaagtacggtagtgctttgcaacagaggcccgaagaccggttcttatatggccgaggtgctactatcaaaaccatgcaccccgagccc

SEQ ID NO: 13521 - DNA, 1818 bp, Oryza sativa
ttttttagctttatgtatattatttcctttagagttttgttccatctatggttgttctctcttttttagttccattggtttctttcttgtattctaggattatataaattaatttatctattcaagtagcatggtgaaaatattagaaaatcagcaacataagaacaattttgatacagtatttcagcaaatctaagaagtaggagtataaatatgagaatcaatgaactttaagaagataattggtaagcacatattgttattacaatccttcacctctatttacattattctttacttttatgtgcattcaactgacattcatgtcagtattattacgtgtctatgtataacttcttaactttattgttgaatattccttactgcatcctggttgttcatggatctatatactgtatggttctggtagttgaagctggcaaaactgactacatgagcattatgcgtttaccatgaaccttactatgccaattctggaactgtttactgtggtatagatgcagtttacgtagaaatgctttggcaggattgctgctgcttacatgatctgtgaagtaggctgaatgtcttcagattgcttattccagtgcatagctcttgcatcttattctgtgaattaccatgtactatctgaagttgtgaattgatctgcatagagtgtttgcctttattttatagatgccttcttggagaccctcacaagtcacaaccagttcaactgaagtgggcgactttcataatgcatctgattctgaacactggggttgcatttagttacaagatcagattccaatagcaaatcgagaggtgatcggtcccaatagattgtctgaaactggtcaggtcatctgaaccttgacaagatctgtagttgtcatttctgttagaatgtatgccgccttggtaaatattccttggcagatagtagctcttttattatgtgaaacagaacatctgaacgtgactttggtaatattccattctgcatatgttctctcgacgccttttcatcttcggtgcttacaatttgcagtctacctttgatcttcctttttccctctcccttgaggtctcattttccctgtctgaaatacgttgggagatcatgcaatttccactaatattggtgcatagaactgcactattttgtaccgacatttgtcaactttcgtcatattgagcggagcatagtaaactaaattttgttactgtcattgttagtatagtattttgttgctgtcattgttagtatagttttcttgcctttgtaaactactagtaaaacagttttcactgtaatggatgaacagtccagatagccgatatataatattttgacagtggtacatgctgtcatgcagaagtgctgacaaaattcagatccattttgaggtccactcccttcgtcccacaaaaaatcaacctagtactagatgtgacatatcctagtattataaatctaaacatatctctgttcagatttattctactaaaaatacgtcacatccaattctagattcattttttttagggacggagggagtaattcacattagttcagcatttcacttggcagaaagtaaatgagtgccagcaaatgactctggctgctaagcccaattcgattgaccatgtcatatctggtatggaactgggatttggtatatttttaagctagctgtcttgtagcgtcccagcataagttcagttacttgtgtcattagattaagaggtaaacatatttaattgagaagaaaataatttgcactctttagaccagcctccacaaacgaacag

SEQ ID NO: 13522 - DNA, 2070 bp, Oryza sativa
ttccaaaaataaaccaacctaaacaataatgtgacatatccacttcgagatttgtttattttgaggcgaaggaagtatgaggtagctagtcaatgcaaaagggaacaacataatcagcatgtactcccagcatgctcactgtatttcatggattttttacatatacttatttatgtatgtactctctctgtccctaaataactcaaaccctaactttccaataagcttttaaggagggaaacaaaagaccacaatgcccttaattaatgtggatgttgtattgaatgatgggtaggtgaggggtattgaagtaataaaatttctcgttttgcggataggtagtaggtaagaaggtagaaattgatttattttgggacaaatttaaactctagaagaagttgatttattttgggatcatctgcaaagacaagtctcttttgttactttctcggttccaaaatataagaagttcaatttataggttcaaattttgtatcgcaatttaaggatttccacactgattttataacttccatcatttaatgattacacagacagtcatatggttttaaagggattatctataagctgtttaaaaattgacagcttaagtgaatgaaagagaatcttttgacctaatattattatttgttaaacaactataaaatctttatattttggaacggaataagtactttaatttgttttttttacaaagacaatcggacttctacttctagttcacttactccctttaaactaataacagagttcatctattatttgtgttgggatgttaaaactaattaataacacggaagttaaactgtgtgtcgttttaattatggttgagggtttgcagacattgctaacaagtaaccgcacgccatatatatacggttgacacgccgatgtacgtatagttctacgtataatactcctacattaattggaacaaaatcgcacagtacattttcttaaaaaaatcgtcgtacatgcactaagtgagattggagagactttgagggtagaggatttaaagataaacaaattcaggggaggggatgtgtgctagttaattgcatgtatatatatatatatatgtgtgtgtttatattatgaaatatctaagaaaaatatttgtgatatgtttgatctatatattaggatcaatggagctaaggagtatcaatgagtggatttaaaccaaaatggaaagctaacagaagggaccattatatacataaacttcaattcatctctttaattagttattatatatgtgatggtaatttcgaccatgacttagcctttagttcattagtctgcatatacatagatatatatatgtccactcctactagtactagttaaaattaagaagtcgtaatacatctacgtacatgtacgtatagataagtacaatcgataagaagtacatatgtactgttttcctcctttttcaatatagatagaagagctcaagaaaagaaaatatatttaggcagcgagggggcggccattatcgtctacacagtacacgaagaagtacacgtatgtgtttgctatatgaacatatgtacggatcaataaaatcgaaaatactccgaatatatttcatgctcgcatgcatgcatgtatagtactggagtattaattaggagtagtaataacaaattaattaagtggagtaaataaagtaagtaagtaagtagatggatgtgaaagaaagaaaaggttaattactcggaggaggcagaagcgaactggtagaggcggccgcgaggggagaagacgatgagagcaacctcggcgtcgcagagcaccgacagctcgaacgccttcttcagcagcccactccggcgcttcgagaacgtcacctgcctgctcgtcgcgtcctcgatccgccgcatctcccgccgcccgcgccgccctgcagatctcacctccaccttcttccgactcgcctccgccgctacctgcaccactgtcgtcgtcgtctcctgatgctgcacccctcctccgccgcccatgcctgcagccgccgccgccatgagctacgagctcttg

SEQ ID NO: 13523 - DNA, 6232 bp, Oryza sativa
gatgagagcaagaaagaaagaaagaaagaaagaaagaaagaaagaaagaggagagaggttaatttgttacttagaaaggaaaggctccaaggatgactcgggaccacaattatactgccaacacctggttgccatcatcacccttcaccccatatgcccctttcccatttttcctatttttattttaccatttttggttgcgcctgtacgatctttcttgtggtacaccgtaaaccgctagtttttatcgtaaataaggcgccgcagtttatggttttctctcaagagacgctgtcacaatttttatatagtagtggatgatggctatagtcatcctaattttgtagtcattttctttttctcttagttcagtaaatcctagcttgtaaggcttagagacggaaagatggtctggaaaataccttacacatgtatagagataacactttggtgatgagttaaaatcaagtggagcggcgctacaccataccaatatacaataccaagcaaccttattttatatatgataatcttcaactaattcattgttatttattttgtttaccacaaaacaaattttaaaaggttaactgttgtgataattaattaaggcaactagacaagacatgaaggatggtaagtgtagcggtcaaggagtacatactgtacgtatgtgcaaaatgaatcgtgtcctatataaatgaaattaaatgcccataccataatatatttgctcagttcaggtacatatatgaaaggtcaaaataattaagttaaacactaggtaagttgtaaccagcctttttaaacttattagttattatagtatgaattcttaaatactaattgaactgctctattttgtttttcttattttacatacaagttgccgtgggacgagagctagcttacttgccacaccaacaccactcttaactataactattcagccgatagtatttgtcgacttgttgcaatcaaattaaacaatctaattactaagatcgagtgacatatggagcatgtatttatgatagtgcgcggagccaattaatcatgtggtggatcccatatactccctccgtttcaaaatatttgacaccgttgactttttagtatgtgtttgaccattcgtcttatttaaaaaatttaagcaattatttatttttttcatatcatttgattcattgttaaatatacttttatatacacatatagttttacatatttcacaaattttttttaataagacgaacggtcaaacatatgctaaaaagtcaatagtgtcaaacattttgaaacagatggagtagctagcaaaatattcatatatattactacctccatcccaaaatgtttgacgccgttgacttttttaaaaatgtttgaccgttcgtcttatttaaaaaatttaagtaattgttaattatttttctatcatttgatttattgttaaatatacttttatgtatacatatagttttacataaatcacaaaagtttttcaataaaacgaacggtcaaatatgtttaaaaaaatcaacggtgtcaaacatttagggaaggagggagtaattgtttggtggattttacagtggttttcaccaacaaacaagcgttggttactgtgaggaaagggttaccggacctagcagtgacacggtcaccagagtggtatcaccattgacaccaaccatgcatgcatggtaaaaccaagcggtaccattacaaacacaagccaatataatcgagctagctgtagggatcgatgtgtgacgcaacattggaaactgctcgtctacttgtctgctaattggcgtgtgcaaaccatagagactatcaatgtatataatgcacagtaaaattataattcaagatggataacaccaaaagcgacaataaccacatgaaagatttttccgtgcggatagaatagattttcgcgtgcggagcttccacccgtctggaagggtgcgtctgcgaaaatcccgattttttcgtgcgggtgacgcacccgcacgcgaaaatcgattttcgcgtgcgggcgcttagaccgcccacacgggaaaataaaaaaacaaaacaaaaaaaaattaaaatccacccgcaaaccctaacctagctgccgtcaacaccgccaccgccgacgatgctgccttgctcgaggcccgtcgtcgtcgtcgccgccaccaccatctgcggtcgccggcgacggatccggcctccccaccggccacagatctagaacttggaggcgtaggggaggagagagtcatagcagatgtccgggtaccgcgtggtcacgcagtgggcgcagaggaacgccgtcgccgacgaggacgtcgtaggctggccaccggcgtcgtcgagtcgttgtcccagcggtggcaggccgctgatccggcctccccgcggcggccggcgacggatccgcctccacgcggcggccagagacggatctgctccgccgccaccgccgcgctcgccgatgtcgcggctgccgcgcccgccaatgccgccgtcgtggccacgcccgccgatgccgccatctccgctgccctaaccgagggcgctgccgtcaccgaggaggagaggaaggatggggaggaggagagggaggatgggacgatggacaggagggaggatgggaggaataatggtagcgcgcatgatggggaggacgggaaggaggataagagggagatgggaggttgggcagcgcgtgggttacgctattttcgtgagtggatcacttaattagcaagcccgcaagcggcttatttttgtgtgcgagactgttaagtgaaccgcacacaaaaattgattttcctgtgcaagcgacggcccagagcccgttcctcattttcctgtgcggttgcacttatggtccgtttggaaacaaaatggtttggtgtctaggaaaatcttgcatgtactggtgcttgaagaaacagaatgatcatgatgtgtagaattaacatatcatgtgtgacgtctcaaaagaagtactccatatacggtaatgcatgttagatgcagagatgtgcatcaatgatatatgtagacagccctgcatagaaaatgcgtttgtgctacactatagttgtacttatactagtttgggggcaccgatcatcgtgcaagtgagctgcttaatttgagtgagaaatgaagggagcacgacgcttgtgtttctaccactggctccacgtgtcgacacactacttgcttgcgcttgcccgttcgtacgaggaccaggtggcctcgtacggacacatccactcatgcgccgacacgtggaagacctgggcccaccgccatcaaaagccgcggtggggacctccacgtggaccatcttgcagaccgagcctcgtactccctccgtaaaaaaaaaagacaaaccctggatttccgtgtccaattttgactgtctgtcttatatgaattttttttataattcgtattttcattgttgttagatgataaaacatgattaatattttatgcgtgacttgtctttttaatttttttcataattttttcaaataagacggacgatcaaatgttggacacggaaaccagggtttgtctttttttgagacggagggcgagccaaccaaaatctgatttttctttccccctcctttttcattatttttcaaagaaaaaagatcacacatctgcctgattgtcagattccacacctatcctacttcaaactagcaataatatccatccttgttctgctttcctgcttgcaagttgatcctgtttcagtttcctagctccataaaaatatagtgcaaaccaactctcatggttagctttatcgttgaattaatcaagtaaggtctaaaccgagactaatggttttgatgagcgcgccgtggcgtctaaaagaagaaatgacgtgttgagtatattaaccattcatgcttccttgtccctttagagaaacaaacaaggggcaagaaaactagggagatgggaaagggaggtgtggcccttatcataaaaaaatcatattggaaactcacccaccctaactaacctaaggtaacacaagtaggtctctttaaaagccgatcacgaggttagaaactatttctttaaaaagtagggaggatccacttggtccaattggatcccttaacaaaactatgctaccagacaataaacttttggagataaaatactagatatatgcacccaataacattacttcaagctttcaaagtgcaggtttcctagatcccacaaaacctatttgatgattatacagtgtttatctcatactaacagtatcctataatatacttcctccgtttcatattataagactttctaacattgcccacattcatatatatgttaatgaatctagacatatatgtgtgtctagattcattagtatctatatgaatgtgggcaatgctagaaagtcttataacctgaaacagaggtagtaagagattttgactaacaaatgcatcgccaaatttcttatattgtgggacaaaaatagaatgtagctagcatggatacatattagatgttacacctagaggacacgcatagagagcacacagatttgtggaggagttttgtaggatccaaattatataggactttttcctttttggtcatttgaaactaatggattagagctttccaaatgctataaaattcctaagaaagggctaaatgcatgtaaagtttggagaaaagttagaaagaactcaaaccccttggaaagctttcttcgagcatatctctctcttctggtttcctgtgtttctcatacggtttattgaaatgaccattcatgtatttttccatgttttgcaattacaattctatcaagattttgtgtttttcttattcgttttgttttctcaatccagtgtataaaacgagctctaaatgttgttataaccatataaagtaagtaccaacagactgcactaattcgataagataaaatgattgatttgtgtggaaataccttgtccttatgtatatttatttcctagacacttgtaggctagcaatcaatattttttatttttctccttatcacttatatgtgggcctcaagtctattttttaaaacttttttttatactgggttgtcatatggacatcatgtaattaagccaaaaccaccctaaaacagccatggatttgttttgtatatagttttttaatacttgggaaagcgagctacggggtatctagttttgcggaattgctcaatcccgggcgaccggcgcagggggagccggatcgggcgctcccccacgttcgctctccccccacgtgaccctgttgggccccacccacttctccctcccctttctccacaaaaagatgtttcacctagtgtcctcacaatgtttcactatgtatagatttaatgttgcagtgaacgaaacattccattgcaacaaaaacccaaatattttggaaactctctattaagggaatttggcttattttttgttccaccaaaaatgtttcacctaatgtactcacaatgtttcgctatgtataaatctaatgttacagtgaattgaaatattccattgcaacaaaaaacccacatattttgttattttctgttccaccgaaaaatgtttcacctagtgtactcacattgtttcactatgtatagatctaatgttgcagttaactgaaacattctttcgctatttgctgaaacattgtttttatataaggtgaaacaacacccgatttaaacgagtgaaacattttcgatctactttgtgaaacaatttcgatatacctggtggaacatcgtgcaacatttaaaaataattcaataataagcttattttttttcgtcaggatatatccatgcgtggtcttgttttaaagatttaattgcaatgaatttaatggtgcaatcggatcatgatttggataagtaatttaagagaaaaatcagtttaaagtagttttacacgtaaatcgggcgctgacgtcaattttaacccgtttgcatcgggcgcccgagccgagggaattttttttatttatacttttttttattaaaatatttacaaaaataatttgttgtttcgaaaatttacaaatctaatcgcctgccgccctttgggagggcgatttttaaaaatcgcccttccacagggcggcaagggacctaaatgtaaattttccagcataacttgttagctctataattttacaa

SEQ ID NO: 13524 - DNA, 2568 bp, Oryza sativa
tgatgagatctataactttgtagtttatcacttttccatttaaaatcatttggagtatcgaataagcattattagtttttaagcaattaaaaccggtgggaagggtttgaacacaaataaaaattttgtatttaggtcccttgccgccctttgagagggcgatttttaaaaatcgcccttcttaagggcggcaggcaattagatttgtaaattttcgaaacaaaaaattatttttgtaaatattttaataaaaaaagtataaataaaaaaaattcgagccgaggcgtcaccctagttttgcggtggaggggtacgaattagactgggtcaatagttgagggagttgcaatgacttcattctaacgggcctgcacgtatgctacagttgtgcgtaaggaagctacagtccagttctggcccagcccagcccatgtagaagaatagaaggtgacatctttccttcctccctcgcgggcggaggcgctcacacgcaaaaaccctaaaaccccagtctacccttccttccccgccgccggcagccgggacatcaccatggcggacgccgtgcagtaccgcctcgagcggatgtccgacgagctcgacgacctcgagcgccggggcctcttcacccgcgccgagctcgccgaggtcgtccgccgccgccgcgacttcgagttccgcctccgacgccgctccccgctccgctccgacttcctcgactacatcgcctacgagctccgcctcgacgccctccgcgacctccgcaagcgcgccatcatacgcgccacccccgacaccaccgaccacgatgctgacgccaccgacaacgacagcagcaagaagaagaagaagaagaggaacaagggcaaggccaagaagtggaagaagtccgtctccgacatcgccggagtcctccgcgtcctcgacatctacaggatggccaccgtcaggtacaagggggacctcgacctctggttccgttacctcgagttctgtcgcgacaagcgccatggtcggatgaagcaggcaagtctccccagaaccttcccaccttcctgtctcatcctgcccattacttctttctccatactatgtatgatactgcggcattgccttgttcaatcaattttgttagcttttctacatgcggctcttgattgatgtagcaatggtttagtactgattactatatgtcgccctttcatttcttggccacaccgtagtgagtgagggacacgggcaaccaactttattcacttatttatgaatgcataggttcatttcatctctttgtctctgtttgatcaataagaattttattacggttgaagccttcttgtgctctgaatttaagtttggcattgagtgaagtcgcatgactcacattgtgattatcgggcagcaagttaggccatacgtcttgctgatagaaatttatagattacttgacaatttcacatgaacttctggttgtgcatcagaaataatacgctataaatagttgaatgctgaagataataaagtcatgaccccacttattgttgaaatttattttttttcctgggctttttacaccgaataaccattgtctggttcatggtagattaccgcgcaatcctgaatatgacataggctgcactggtgtcactggctatgcgtcgcgaaaacggtatgagattacactacagtgctgccactaaacagaccccgcatccagctatcactggagctgttgtgttgtgcactgtttgttaaggcggcggtggggacatggtaagccatagaaaaaagaaatcgttcaatgctcaccagtccagatccggtaaacgttaaataccagtcattaacctattgaagggtaagacagaaaagctgtagtgtaagcgattggttttatgtttcatatggaattagttgtttaagttttcacaacattcgagctaagaaagaataaggacttccccagtccagtgtgtacttgtttgagatctgattgtgttccgaaggctactcagtatgcatagaaatatagtcataactggcaaaaggttggagcttttgaagtttttgaaattgtgttttttttccttttgcaaatatataatgtggccagagcttgaaagctatttagagatgaaacttttcttttcttttttttggttcttggatgtagatttcattttaaatcttagtatgagttgatgcctgtttgtccttcttttgttgtgtatttatgtgccccatttcatgccttttttgtttgaacttctcctccgatgatatgtaaacatgcgtatatatatttttggaaggctaacattgaattgatctcactatttactaaatttacatatctcatgttcattgtattatttttcaggctctggcacaagctattcgttaccaccccaaggttcctgggctctggatctatgcagcagcatgggaatttgatcagaacttaaatgttgctgcagcacgtgctcttatgcagactggtcttagatcttgtccagaatcagaggatatgtggattgagtatcttcgcatggagcttacctatcttaa

SEQ ID NO: 13525 - DNA, 10300 bp, Oryza sativa
gagtcacctcctgtgacagtgaatgaattattgaaggaagcacaaatcaacgctggccttctccatttttggctcttctgtctctacttttttttttctcttttacaatagaaatatagtacactaccaccattcacgcacatggaaaaaggggaaattttattattttttcattctatttatcccataatataagatattttagtgtgctacttatcgcatccatcaactttaatttaaatttttactacctacagtatatattttaacaccaatctacccactcaagcacaaccaaatctcatttaatagggtattctagtctttcttgctatcattaatctactaaaagggaataatcccttatattagggtatatacaatgatgtttaatatccgttgccatgatgtaaatttgatgacgtcgaagagagaaggggaaaatgaaatatggttgctccgcataacaacaactcagagttgattcttagtatttattaaaggaaattttattgcattagagatggagaaaagaaaagaaggatataaaaaatattttggtgcattaatggttactcatatatattagagagcttgttatctgaacaataagagtatatttctctaagtgatgtgtactgtattaactaagagctcgtatggggcggagggagtactatctacttcatacttgatccctccgtcccaaattagatatcgctttcgcttagctttttttcttgtaacgtttgaccattcgttttatttaaaaatttaatgcaaatataaaaaatgataagtcatacttaaaatatttttagtaataaaacaagtcacaaacaaaattaattataattccataatcttttgaataagacgaatggtcaaacgttacaaacaaaaacttgaaatatcaagtattttggaactgagttagtataaagaatgggcacacgactattgtagtatataggatgctcctcttgcgaagaactgtagtatcctatcatcaaatcgtgtagtaatatttagaaataataaaatagcacgacttaataattttgaaattgtaattactaattatcgagttgcattcaagtttgcaattgtaccctttattatgtttcgataattttaaattttggaaccagtaaaaactgagttttgtattctttgtacgtacagattaaatgggatacagtaaatatttcctataacgtgcagattaaatgggatattacatggtccacgatcataatacgtttcatctcatcaacgccagttctttccgattgacacgaagctctaaaaaaatgcttaattactagtagaactataaatggacagttaatattgaatcttgaatcgtcctagctagtctaccgtcgtccttgtcctctcaaatgcacgtagtacgtactgttgcctgccgaatatcatcatcgcatctgttaattgctggcaatggtcaccggaagcatatatatgcacgatccaacgagcaccattggagcgacccatcgatcgagatgaattgaagagactagagatgtgatgatgtcttaggccagtcacaatggctagtgtcattgcacggctacccaaaatattataccatcttctctcaaatgaaatcttttatgaaacaatccccacagtggaggggtttcactttgacgtttccaagactaagcaaagcatttaattgatacaagttgctgggatcatttgtacccaaaatccggcgcggcgcgggagaatgcggaggtcgcacggcggaggcggacgcaagagatccggtgaatgaaacgaatcggcctcaacgggggtttcactctgttaccgaggacttggaaacgacgctgacgagtttcaccaggatgaaactctttccttctctctcatccccatttcatgcaaataatcattttttattcagtcttacccctattaaatgtgcatgacacaccagtgaaacccccattgtgactggccttaggcgttggatcgaaatccaacacagctgtatgtattttggattaatttctctcgctcaatgagaatagcaaattaagctgacaatcaattaattaatggattgaaaaaccgattactttacacaaatatatatgcatgcatggaagtagctagtactactttattaatcaaacttgctttgatacgtactgtactgtgtacagtatgtagataacgacgctagcttctaacacaacgtacgtattgcgcacgatgaatacgtgattcaattgattcatatagtagtacgttcttcatagcatagataggattcgttgattggattcattgatggatgcatgcgtatacatatatcctactgtgcgcatgtcgggatttaaattgggcttacatgtgcatatatgcatggctcgattttttttcgaacgcgcaaaaggattgcacgtcaatatattagcagaaaaaaagcttttgttacacaaagcaatcagccagactggtttatacctaaaaaaggagagggggaggcaaaataaaaaaacttgaagataggaactaccacgacggttaaaaacacaactccaaacagatgtgacgattggtggctagggttttaatttgctactccctttcgttccaatatataagtacaatctaaaacagatgtgacgatatatccagattcatagttttaaatatcacattatactcggttaaatttatattggaatgaaaggatactgcactagtagtagctatacttaattagaggttaattgtactatgtgtatatggttccaacctttcaatcctgtccagattgactcctccctctctcaatcaggcaggacgatcagctagtactgctctctccatcctaatcaaggaacagcatcttactaatgttataatacaatacgcgcatacatacatacgtagatacaattagctaacacatttttattctctaaattcgtttctttaatagagtgaagatctttaattttgttggatacttatatacattgtgtttattgggataaaagaaatgataagataataatattattattttattgatttttaggatagtggtagttgcgtattttatgatagagggtgcaatgacatttctatcttaatcttcctagggacataggatctcgggtaaattattcaattctaactaatttatattaaaataaatagatatatcggttaatagttacttcccccgtttcacaatgtaagtcattctagcattttctacatttatattgatattaatgaatctagatagatatatatgtctagattcattaacatcaatatgaatatgagaaattatagaataacttacattatgaaacggatggagtagataattaataagtactatattgaacttggatgtttctttgattggtcactgggaggaagtaatatagagctaggaaggagagagataggcagtagtactacacctatatgcatatcgatcggtatcatggatggatcgagatgtgacaataagtgcaatgcatgcattgaatataatactatatataaataaatgaatatatatgttggggccgggatggtcacgcacaaattgccaaaatattaatggctagcttagctagcatacaaacccggccagatttaaacatgcatgcacgctccccctctctctctctctctctctctctccttgcttgcttgcgtatatgcatgtatggtccatacagtatgcatgagagagagcgagagcagagacacacatgtacacacagagggagagggatatattgatgcatgtggctaagctatgctaatctctgtcatatcgatcgatcgatgtactgtttatatatatgttggtctaatggtctggtgctgggctcacaccggccggccggacgacgctgcctgctggccggctagctacagtagtactggtacccgacaacgacatatatgaagtagtagatacccacactgcatccattgttagagtttgcatcgaatatatgtatgtagtcggttacagtttaaaacttggagttgtaataggtgtttggactaaagtaacagtcggattctattataggctctctcataaatagaggagcgtacctgttataaccgcatagcgacataacatagcgagagggagcggctgccagcggcgaccggccgtgagtcattgtaactctaatatgctggatcggggaggagtgccctttatcaataccctggagatgtaggctacgactgaactccgttatcaaatatggtgctcggtgtgtcatcgtgtttggatctcctatagtgttttcttccgcggtttggtttccaatgtgatttcggggccagtcttataacaagtggtatcagagcacttgttagagtgcgcaggccagcccacacactgtgggccactcaggtttcattgggtctactccaccacaggcccaacgaagtacaactttagatcctgagtctacacaacctaaaagactagtctgatggtacgtaccccatgcaacaacgacatatatatggagtagtagacacccacactgcatccatccatccagctagctattgtagctccatcgatcaatcggacgacactacgcattcaaaagatctccattcaaaaacccgacatgtacgatatgatgcatggagtgcgtacatcccaaacaaatgacatgtctatctcaaaccccgccggcccccattatgttaatttctctcttccatgtctcaccgctagatacatgtatagataacctaggacataatacttcctccctcccaaaatataaataacatttgtatagcttttttttcacgggaattagataatagattattgtaattagtaaggatgagtaagcataagtagctagctagagaaattaaacgacacatgcaggtctgattgctcaagatgacaagaagctagcgggtggacaagtatatatgtttcataacaatttttgaatgctgaaataaagcttgtcatattttgggtccacggaaagagtatatgataagtttagtctctaaacgtgggcatttcagggctttggcttattaaaaaaaacatgttattaatgttaaaaaagaataattttagtaaaacttttgtacttctgtttttaacggaacaaatgttaaggttaagtgacacaaaacgatttaaaaaaaaacctaaattatgtttctgaatttcataattggacatgcccttataagctgcagcttaaaaatagaagaagaagcaatactacatctgagaagatgaatattaatggatagtttatagaccaccatagcgcttgttaattagaggtgtggtgggtgtttgcctgcagcttttataagatcaagtagctagtcggtcggagtagtaataagttagttgttcggacagacaagaataatggatgttttcctctcttttttctttaacttctaggcatcctatatcgacacttgctctgtttctatttaatcatcatataataaataaattctttcactaaagatcaaggaaggcttaacgtccttatacacttaatttattatgagtatattgtaaaaaaaatatcaagaaatatatatgcttaaactcctccacatacacaagaaactgcatatcaagcaaattaaggagctagggttatgtaatatcaattcggagattctaatttttgattatgtgacgggctgaagtagttttaagtgataacctatccaccggtaagaatgtactctatctgtactaaaataactttattttttatccatccacacataccaataaaaaaagactagaatatttctagtttatcagattttaatgcaattattttatctgctccaaatgtatttatcatctgctttcacaaactctcatgcaatgattatttaaaaataaaactattttgtgataaattaatgggaggagaaaaaagaacttattttgaatagaagggagtactcatgttcttaaagttaaatattaattatttgtaattataattgaggaggcaaaacaaaaccttggtgttacatctatccaatggagcagaagtagataggtataggtggacggtggtccagtttgatgcgtggaaaagatacggatggaaatgagtggttgccgcctacaattgatgatatttgttttgtttgtttgcaattgaattgaattggaagggcagggttggtggtaatgataatgacagtggccggccgacatgtgggcccgtgttggattagggtcccctattaatatactattgtacgctgctgcattgcggtgcccattctggtcgaccgtctcctcctcttgtgcatatctattgttttctttctggtactgttgtatgctagctaggctagcttctttccttaatcaattgattaattagatataattaatggctatccccctaaattacacaagaatcctgctaaattcatgaaagagcgatgattgctaattccttctaggatatcctttatattatgggtacgggaacgggatacggcaaaattatacgagcaacctccattttttgattcattgtagtacaacccctctgctttagttcatatgtaagaattaggaaagtaattttggtgcaaactgtttcgaatatagcattataaaagactacactaactacgactaactttgtgagcgagatgacatttagtatttgacaatttgaacagtcggaaaaaactggagtacattgagattggaggagtatatacttacttgagtgtaaattaaagctcggcctcagagcattagacgcaaatggaactgatgcgcgcagtaataaaagggatgatgctgcaaagagaaaagaggctactccagtaaatgtagagtataactgaaaataatttccaggagaattgaaggacaatatataaaggtacttgtagctccaagaaatgaagtcaaaattaagggtgagcagtgcgtgttatgcaaatgcatatgctgccgattgatccatcgatgcgtctttatcagtcatgcacctggctgtatgtaacgtactactactgctgtgcgtcgcgtcctctttcacagagctgcaacccctgccctgccctggccctggcagcttgcatcgcattgccaccaccagcaagctctctgctgcaaaaggaagaagaaactgcattcaaaaggaagtctagacatagaaagatctggagagtaaaaaaggaaggaaatttctgtaccttagctattgctttgctattgtagataaagtaaaccatgcagctcattaaaaattgaattaggagctgataggaattgggaaaagtttgttttacactctctgaataccgaactattaaaaccattcacttcagtttgaaccttaggccgggtttagatcccaacttttttttttcaaacttccaacttttccatcatatcaaaactttcctacacacaaacttccaacttttccgttacatcattccaatttcaatcaaactttcaattttggcgtgaactaaacacacccttaatttgaatcacattgggtaatctatcaatgacttggcaaagtagccaaaggcagaagccattttattttattttaaaaaaagtagtagaaagacttaaaagacctacaagaaattccatttccactaccaagtgcttataatgcacgactgacataaaacatagatggtctaaaaaaaatatttactacttaaaaagaccatagtggtgatggttgttcctacaacaaaaaaaaagttagaaatgaatacataaaacttatttgttgggtagcccactaaactttgttcacttcccacaaaatttatcaagtttggagtactccaaccttgtggaatgacagaaacttactgtatcgatattgccaatttctttatttgaatcttctgcaacaatttgtactgcagttgaagagtggaagcatgcagccatgcagggggcatcaggtctgtaggccaaaaaggattgacaacacatacatgttattaccgggttccattatttgacaatactgaacggaacaacggcctatgctgatgccagcgttaagcagtgttagcagacacggtaatactgtttagcttcactaaagtgctagcggaggcactggagttaaacagacttggggtacatgtgtgctattcaaccaggaaaagctagctagcaaacaatattgttgcaacaggaaaattaataatgcagttgaaccccatagtacagctaggaggtcagcaatttactcatgcatgacacgcttggcagacaagaactgcaggtgttgagttttttaaagggaggaaaatgtacctcacaactcaccagggcaggagatatcatcatctactatgggctatggttacaaacttacaatcacccaaagtgtcagtaggcagcaactcccctgcaaatcaaaaggttgaacaaaatttgtgcaagccaattattacaaaacaaccaactgtagtaaacaacaatgaattcctcctgctagttaacaatgacgcaagtttaagctaggtaaatcactccatcttatgtagccctttggctctttgcacgtaccttggtgacattaccattagttgcgacgttgcttgggttcgccattttgtttgctcacccaaaagaagtttatttcctggcctgactatccagttttaattacattctaggcagctgcccttctctgttaaactgacatgtaacagtagcttctaacacgaggcaaggttacagctgctactgttctctgggccttcaggtcagcacctacagtgccaatctgaatcaaaagttgatcaactttttatcaagatcgtacaaccatatagacagaaagcaaaaagaatgacatctcaagttagatatagtaatagttgtaaaagaaagcacaagagcactgtacagaacatcaagtcgacacaggatacattccaagaaaatcaacagggaatcaaaacaatatgttcattacaataccaatttgactgatataagatatccttttagactcacagaaacagtaaacaaggtgttctatccaattcttctttggttatgagatatactgcaggcaaagtagtcaacacaagtttgatgactatatacaataataatatcgtgaagtgtatgtttttatatctctctgtaaaggttgagcctgttggtggcaccaagcatcctattaacgacagtcgctccttggcttggagaggtaatatctgacgaatctcctccgatttgcaaggaggagaccgcttgagctgctatgaaacctgggcatgcaactgactggtggaacattccttggtagcacggtgcctgcaactgcaagtccttcacctctccccaagatggcaatggctggccaatcccccaatcaatacacctccctttgggagcataaacatgatcagcgcactgtatcagtccatcaggaggataaatatcagcgccttgtgcatccacggcgaaatcaaaaccagctgagtgatcccaatggttgcatcttctgtgcttgtttagcatcaaatggcagggttcatcggagtcctcaccaatgaggacatgaagagcaactgcttcagctatcgcagcaccttcctcatccagcctttgctgttcttccctcttcttctgcttcttcttttccagctcagatataatggcagcggagtttgcaagcgctttctccagccgccgtctcttcttctcagcctgcttctggcgatctaattcatccttggcttgtttcttcttacctttcttcaagactttgcccgcctgattggccgcggccttttccatgacaactatgtactattttcagctaaactccactagtgactgtaattgtaattacgggaaagcaaaagcttcaaagttcattgtttggagtgatccaggccagaaagcaaagcactggctagcgctaaaaagaaacaggcagtgcaggatgctacacccactcaggtctgaatgagtatcttatcttgcggaagatgcagtcccaaaaggagacgacaggtgagaggaggagggagaaatggtaggcggttgctatttcatccgttggtaagagggttgtgagaggcttgtttgtggtgagctcctgacccatcttagtagcaccagaattgagggaaaaccacagccgaccagctcataagaatcttatactgcatcaggaggaaattaaaagaaaaagatcaatcagcttagtaaaat

SEQ ID NO: 13526 - DNA, 758 bp, Oryza sativa
tgtaaatctgggtaccctttattataacagtgtgtgcaggcaaattgacaccccatgcaagggtggctgttgagacaaggacctgtatatgcttatcggcaaaaagctcctctacaagctcacggtctacccttgccaacccagcatgatgaatagcaaacccataaggcaaaaggtctttaaggtcactgctttttactagttctgcctgactcccaagaatctcttggcttgcactatcatccttcaagaagcggtttaacgtgtcattagccaatgcagtatctctgatggcacgggcagttttcgctgtctccttcctcgagtgcacgaatataagcacttgatgctttccagcagatgccataaccttctcgtagcaaatctcattcatcagctgaaacctctgtagtggcttcctcacagtgatcccaatgtattgctgagcaagggggcaaggtctgtagctgttatcgaaatggaagaggccatcagagcgaacacgcaggaaaaccgcgacatcttcatagttcggaagagttgctgagagaccaactagacggatatgttctttggtcgtctcaatctgccggacagttctagaaacaatgctctccagaacaggccctctgttgtcatgaagtagatggatctcatcaatgattagaagctttaccatttgagtataggttctgtcacctgattttcttgtgacaatgtcccatttctcaggtgtggtgacaattatctgtgtttca

SEQ ID NO: 13527 - DNA, 559 bp, Oryza sativa
agaaataaatttaccataatcaccttcttgtcaacataattctaatcccaggatacatgctccatgacaacttactggcggataaaatcactcatccacgagctattacactgagggacctttcgaagagccagagctgcagcctgcacatcaaattaagatcaattcagatctggaggtcaggagaaaattaacagtctgtgaactgatatacatcatacacccaatctgcgacaactcaatggttggtagacataagaaacaagaaaacggcaattacctttataacaagatcgttaatagatatcttcttaccgccagatgactcttgcaacggattcagttcccctcgcaacctggattagattgaaataaagaactattttaaaaagctacaaaaccagcagtatggaattgaatcattacataggtttcctatgtaatataggattgctttaaattacaaagctaggcttcaacatacttgataagattatcaacacgggcgtcaactgtcaagtaataatgaggaatagtttgtttagagcttagcaggcgg

SEQ ID NO: 13528 - DNA, 9224 bp, Oryza sativa
cctgcagccctgtttttacccccctctctctccccacccttgttctatacggtataccgtatacatacatcggcatattcaggactacctggagcagaattttgtgaatatatatagcagtagggaacaagaaataactgaaatggtactacaacatccgttctaaaatcgacatccatgtcaaggttattccatgacacacttgtatgtacacctactactagtttacaccttaattttaattttaacacgcctagaaatgttttaagatatgaaaagaaatacctcaaggagatcaagcaggccagcactcgcgtatactcttatatacatggtcatcatatgcatatattcgcatgcttcccgtgcttgtagaataagtgatttttttttaaaaaaaacattttatatatactatgttcctaaataagtatctaacgtatttttttaagatagagagagtatattttttggaatatcattttaaatccatattttgactttatagtagtagtagtgtataacatcacaatccatttagatatatatccagctatttgaaaaaaaaaaacccacataattgggctggagaatacacgcaccagcatgcatctctagccacctcgctgactgacctggctgacctgacctgcagtttccagttccatgcatgaactcaaaaatggggggaaaaacgctgtgctgacctctccctgaacatgtggcacgcacaaatcccttaatcaaattcatcgagatgtgggacgaaacgaaatagtggtagtaatacgtgtgcagggcaacattattatgatatgtttagattgatacggagtgcagaattaattagtcactttatttatataacagacccctgtggtgtgtgattagagacagacagcatcagcatggcccatcacctgacacttattttatagtacctctacacatgctcgcatgcacgtaattgtatattgttcgcaagattttagttactccgatcactcacaagttcccaaaaaggaatcgccccactaaaatatactgcaccacagctgactggtggattaaactatagtgctagctacacgtagcacgtattttgcttaattaattgtgtacaaatatttatgcattattcgtaattttgtttcctacaaaatgtaaacaccgcacactccctccgttactttattgttggcactattgaccagtgagtatcatttaaaccttaactgctaataatttttaatagtcagcgtatgatgcatactagtaaatgttactcgatccaataatataagtatatatcgtttcaagtctttacgatgttttttttaataaaatgaaggatcaaattaagttaaatataaataatgcgatggcgcagccaaatgtcatcttgttttcttcgcaaccgatgctggtgttgtcggcggcggtgcagcttggcattgctgtcgatcacctcctcccttggccagcatagcaagcctcctctccttgttcgtcagttgagttgatgccaccagcttatccctctcaatgcaaaccatcacgtgacgtgcatcatgcggccggccggctcgccggatctagctcgagtagtcctagcttgttgatgatgacacagcgagttaaatttgtatctggccggccacacaaactccctctcgtccgtaacaattaatgtagattaggcaacaatatatatatggtgagctcgacagcgataagagggcaagcctgagtacgatcgatgttggggtaagctcgatcggcaatggtgtcgggaggacgagcgcgtgcacagtggccgccggcaggagggagaggacggcaagtgctattgtatttggtgataaccacatgtagagctgagacacccgtgccttctgcaatacaagggtggctctgtgggatgggcaccaacggtggagctaagtggtgagccgagaccactactagctaggtaggagacgagcattgtggatgtggattgccatggtaggagtgaagtatactgtaggaagatactcgcctcctggatctggagtatgctggtgggtgccaggaaaaaccaaccgtacccatggaacaaccgcctagcagctggctggcgatactgtgagctcactctctgcatattcattcagagtgatgtgtctgacttactgacagcctttctacgaagtaccagactctccactccacacacgtgcctaaaatggcttcttcttcttccataatcttgacacggccaacggaagaaataactaactaacttccataatctcatggcgataaactttgcttatactcctgtccttgtccattgataccccgtctgaatcttcttctcttacaaacttgcacggatttccacccctcttctgtgcattgttactactactttaaagttggattttttttttgtctatgaaaatttactttgaattttatagctataccgaattgactcgctgaattgttcgagggtatctgttaaatgcagttgaaacatcaatgatatgttgttaatgaaactcagctgatagtgtcaattattattatgataatgaacaaagcagggagtgtgataattccaccatgaggagcgcacacacaggtagacagtcaaagacgacgactagctagtactccttccgttccaaaagttccaaaagataaaagcttttttttatccttacacgatttatgagatgttattttgatcaataatatctataaaaataagatacattaaataaaaatagctgtatattataatagtttatttaataataaatctagtaatatcaattttgcaagattgatttttttatactaatagttaaagttaaaaatatttgacttatcaccgtactaaaaatgcttatattttacgccgagggagtacctgttttgttttaattaaaaaagagaagaaaatgattaaaacatgcatctaccgacacatcgtctgacatttgactattggacggcctcctgatcacattcacatctagcattgcagggacaaattataaaccacaataatcctcctccttgaacagtgagagatgatgagtaggagctgattaataagctaatctgttgtagatgatcatatcatatataagcgaaaaagcagtactcactaattaacatgtaaggattaaggaataatggatatagctaagagagaccaacagaagcaacaaaagaagaaaaatgctgtgacttgtgagcccagccaagctatcactatctctctctctctctctttgtgcagatgagaatgagaggagacgatgagacgagagagagagagctattaagcagcagaagaagcttaattgcatggctaatgatgagaaggaaggagagagagcaataagcactaaactagttaattaatggccgtcatggctctcatccacttggtcgtcatgatcatcggtcgctctcccaacgccaacgccaacgtcttcctcgtcgccgtcgccgtcgccatcatggtgcgcctcgtcgccgtcgtccttcgtcctcccttcctcgttctgctccccgtcgaacgggaaacccggcggcgcgcaccgcacgtctgggtacttcaccaccgcgtccagcagctccgagctgcccttcgcctcctccccgccattgccgcccgccgaggacgacccaccaccgccgccggagccggagcgggagtagaggcggtcgagctcgtcgaagtaggggcacgtcttggcgtgcgccggccgcttcttgccgctctccttggccttgcggaagtacttgttgatgttctcccacttctccttgcaccgcttcgcgttccgccggtagcccgccgccgccatgcgcgcgctcacctcctcccacagggggcccttcagccctggctcctggaacctatcctccagccccgtccgcacccggatcagcgcctccacctcgtgcttcggccaccgcgacgagctcagctgcagcgacccctcgccgtcgtacgccaccacctccttccccacgccgtcctgctcgtcggcgcccggagcggggttggcggcggggggtgggagcgtgatggtctcgccggagatcttttccaggtaggcgatgatggcggactcgcgtgcagcggcgctggcgcggtcctgcgcgcgcgcggcggcctcgcgcgcgaacttgtcggcctcctggcggcgccacgcctcgtcgcgggcggcgcgctcccgctcccggcgctccatggtgtcgaggaactgacggtggaggctctcctggtgctccatgaggcgctgcaccaggcgctcgaagaaggaggccgacgcgctgagctgctcctggcgccgccgcttgcgcttgcggcgcgccgcgtccgcccccgacggctgctgcgtctgcggctgcggctgcaccacggcgtgcgcgtcctccccggcagacgtctcggacgtgttgaggtgcggcgggttggcggcggcggcgtcggggaggtcagccatgggcggcgcgagcatggcattgtcgtccccggtgaggccggagccggagcccgtctgggggcctccgctgccgggcttgtagatggcctccagctcgctgaagagcttgtagttgacggcgccagcggaggcggcggatgcggcggcggcattgtcgtcgggcttattcttgaagtaatacgctgggggcggcggcgcaggggagtcgggagtggcgggtttgtccttgggcggcgccctcttgctgctgctgctgctgtgtatgtagtcgatgtcgagtggccgcctgcacagcaaatccaacaaaacaaaatcaatgtcagcaacagctcgctccacagctaattaatctgcacaatttggctgcagctctgttgctaattgatttgcaagaagaatatggcgtgcgggcggggcggggcggcgaggaagaagaagaagaaatgatgagtgcatgcaatggcgaattgaggggggcggttgggttggcttggcgctttttggtgagtgaggtaatcatcaagtcgaaaaagggggagacgaaaaggtgatagctttgcgttgttgtggatgtggctgtgaattctgttgatggagaagaagaagatgagatgagaggaggaatcgcgacgcatccatcatcatcatctgtgtgctgtgcataaatcagagagggaggaggaccctgcgcttgcgagcgatggctccctttctcaatcatgacactattattggccgtcctctgctcccctctcccgagcaaagagagcatcctaagcaaaaaaagctctcctccttttcctctctgttcttctcttctccaccatggatggatgcatgaatccactccaagcacgcactcactcactccaatttcaactcaattttaggctgagtaaggataacttgtacgtaccaggtcggttctttgatggaagtttcctcgtcccccggccaccgccggagcctgctctccgtggccgcctcgtcatccccgccaccacctcctcctcctcctccatgaagcatcatgccgctgcccgcgccgcccccgtcgttcagcgcgtcgtccgttccgccggtggcgccgctgccgccgccgccgtcgacccccagcttgaagctcatggcggcggccaggaacggagggacgcccggaggggcggcggcgccggaggcagcgctcccggcgccggcaccggagctctccggaacggccgcctcgacgtcgaggccgagatggtggtgcgggtggtggtggtggtggtgctgcggggcccacctagccgggggcggtggctgctgctggtgcttctggtggtggtgctgctcgtggaagagctggaggtgggggtggtggccggcggcggccgcctggtggagcagctgctgcgtgaagggaatcccaccggcgccgccgaagtgcgccaagtggggaggcatctgaggcggcgggtggtggtggtggtggtgctgaggcagggcgtggtggtgcagcggctggtacctgaacggcgcgcccagctcctggccaccggccgccgccgccgcggcagcagcagcggcagcggccgcctgggcgggctgcggcggcgcggacatggcgaaggcgccggggtccatgatgtactgctggaactcagagacgccgccgtagccggactgcatggcgcctgcctgcagcttgctactccactatcttcacctagcttgctaccgagtagagagtgtcactcaccttcacttcacctagttcgctgcatcaagtggtttacatgccggtcgggtaattaagaaggtttgacctgagctaaggaagaaaatgcagccagccaaaaatctcactcacccctcacaacggtctgagctggagctggagctggaggtggaagaagaggatgaggcagggcagtgcagagtgcaggggtgaagagaggaggaaggaagaagggagagggtagcacaggcacagggaaggtagtcaggtttggtttccattttgcatctctggtggggtgctcggctttatctcctgcctcttttcgaaaggggaccctgctaatatccatatttgtatctccacccatccaggccagcccagggtgctcattattattctccttcaggtccttgtcccggtttgaatggactgttgctctttcaggaaacccctcctcgctttttctttaacaatcctgtccgggttttggggcgactcctttttttttttttctctctctctttcaattcctatgttcctatctattactatcgtcttctctcttttattttttacgctgctccagttattagtatttctttatttgtttgtaccaagggctcattcgaatcacacgatagaaaaaacataggccgagtttagttccaaaatttttcttcaaacttctaacttttccatcacattaaattttttctacacacacaaactttcaactttttcatcatatcgttgcaatttcaaccaaactttctattttagcgtgaactaaacacccccatactttagggaagatataggaataaaaaatgaattcaaatgtaaaattgaggatcgaaaaacagagaattatatataatgggagaacttgaaatagaggataagaatagaggaagatttataaggaaatgagaagtaatctaactctacttttccccggactcttctttttctagctgacgagcaacacacctttgtcccgttgccattgccaccgaatgcggcccaacacgccacaactacgtggcccaactccacgctgtcgattgtgctgtccggcttcttccgccgcctagcttcctctaggaccccttcatgctcttcccctcctctctgacttttgcgtctgcccaactttgagagtgagcccgtcggccgctatgtcgttgactctctcatgcatcattcactctacgtcgaaaaccgacctaaaaaaacaataatagtactacgaaaatgcagttgtaagtatataacaactttacaatatatacactatgggtatgttcggtagctgtttctgtggcagcgctacggctgcgatgcatactgtgtgtggttgtggctatattgcttgttgctacagtcctgccagccgaatagaccctctagtaattcttgtgtttgttcaaactgaatgttagtgtcagtgtgtcactaccattccaaatcgagatgatgatttccacacaaaaaataaaaacagcagcgtcctatgaacactgcaatatttaaataatgcatgaacaaggggagtaaagtgaaaaagacctgtccataaaaaggaaaaagggaaataaaagtagagaagaaaaaaaaaggggggtttagtacaggctacagaggggaagcaggtgacgtcagcgccactggcaccacacacgtgccatgcacgtgtgaagacaaaggacgatttggtaatgtattggtgcatgagtatgatgagatgcctagggcactgcagttttattactagtactaatcgctctgcttcttagaaattgatgatccctgtctgccaaacccagattttccatctctaatgatcttcttgaatcatctgcttgcttgtctgcatgcacgcacctcttcatcatcgtataattggtttttggctcaacgattcaacgaattacgcataacagtttggagaggaggacactgtcactgaggatgcagcggacacatgagattagaggagatcaaccaaatggtgacggactcattagattggtggtaggcctcatgcatgacgactcgatgaatcgatcgatcattatcgttgtgggatacacagtacggagtagataaagacgggcgtcaagtggtgattgggctacacagttgactaccggtccgtacgtagtacacggtggcatctgcctccactattacgtggcatgacatgctactttacgtgggtcaaatcgacatgacatctggccgccacgcacagctcgaccttctcctataccatgcgagaaccaacatcttttttttttttttacaaatgttattacttaataatgatatttataacatgatggcattacgaatgacctcatgctttcacgtcggagctaagcggctttattaaacgggagagtggcatcacatacaggatacatacgtcttgccgaagatatgggggtccatgcatgcttaatagaaagtgcctgtggcacaaaattaaagccaccacacaggatttatatctcatcgcctatctttcttatacattcgttctctttcattgtcctctatttaattaatgacgatactgatgaggatgacaatcaacgctcttccttcgctcgtccgaccaccattgcccctatctccccgtagctcgggcttcgggcactaccattttctttccctatggatttgacttacataagcccattctcattatacccaaaatgttcccacttaccatcggtatcatcctccatacctccaaccatcacaatcgtcaccaccacccatttacggatcttagacaacctcaatggttggtttgctctgggcgatagactaagtgaaaaatctaactagtgcgatggcaaaggggataaagtggattggtgaaacgacggttttaataatagagaactagtgacatagcggcctagtcaatagcgtctataacgaaagatcgacgacttatcaatttgcacattcgttgcctt

SEQ ID NO: 13529 - DNA, 3459 bp, Oryza sativa
atctcctacatatccttaaagcaaaccatcctggaaaatgggttcaactcaacccatcccttgaaccaaacgcatgactagagactgctaggaattaaagttaaaattccaatttgcaccatttctcaaaacatattgctgcatttgtatctccacgttctagctagctagaagatcgattatgatcagctccaacaaaaccgttcgaatagaggaagaagacggatgagaagcctgcacggcgctatctatgctctacacacactacagtagagtgaaagctagctagagtccaacgaaaaggaaaaagaaaaaaaactaaaggctatatagataggagtagctgctatatatgcatgcgcaagagacgctagctgccacaacgagctgatgatcgatcgagctcttggcctccgtgcctcacaaagtaagctacgcctacctacgggctacgtatacgtacgtacctgtagaaatcaagaaaggaggactcatcagtcaacctctaccaagctaattaaattcagctcaaaattaaaggtccaacatccaagaaaataagtttagcgtggcttagctccattccgctgcttggagtctgttttagccgccgtagtttctctaagcttaagttttttcttattttgctttttcttccctcccctagcataaaccagtctggctgattgcgtggtgtaactaaaactctttttttcctaatatattgatcgtgcaattcttctgcgcgttcgcgaaaaaaaaaacatccaagaaaatagatccttcggcaaagtgccaccatggctgtgtttagttggtgtgctaaatttttctaagtatacagacacacatttgaagtattgaacgtagactaataacaaaacaaattacggattccgcatgtaaactgcgagatgaatctactatgcctaattaatccatcattagcaaatgtttattgtagcaccacattgtcaaatcatggcgtaattagtctcaaaagattcatctcgcaatttacatgtaaactgtgcaattggtttttttcgtccacatttaatgctccatgcatatgtccaaatatttgatatgatggaaaagttgaaagtttgaagaaaaaagtttgaatcttgcatgtatcaatcttcgtcaagaaaaaaaaatcgctcgactaaatatcattgcattggtttcttatgtactatcacttaaataaatatagcatttttctttataaaagtggtaagataaattagtatgagatagatctctctacgaacatgcaaattcaactcacttcatttcgtattataaatcgttttgattttttttaatcataacttattaccaacatatatacaacaccaaattaatatcgttgagatgtaatattgaatatgtttgtttttattaaaaaaattctatattttcctacacatctactagccccacctaaagaaaatatggcacatgcacacacataggattgttcatttggggactaattagggaaagaagcaacaatggaaagcagggtcgatgttaattaactattgatatcctatgtgtaggtactgatttgaggtatagacctgacctaccaatcgagagttggagacagtattgtcatccatggtcaatgtgtgtagccggcctgcttgctgctcgatcgatcgatcgatctctgtccatatttatcgtgcttatgcatgacagcatacttcatatatatactagctattgcagcgctcgagcagagaatttgtcctgaacgtgtacagtatacaatgatctgtcatatttaccagctgcatgctagctgccgcaagcatataggagcacaccggatgtgcgtgtgtgtgcacgcagatcaggcggccccctagctagctgtacgtgcagcctccatagacagatctagaggggagagaagggaggccggggaagaagatcgagaggaagacgacgaggctccctccaagctaaagctaaatccacctctgtttgtagcattcatattttaaatttttagatctaaattcatatgtgttcttaccctaaaaaaatcatttgtgcttgcctcaagattacaagatcgatatgtattgatccgtggaagaagatctgtcaggcggagcaagctctctctcgttgctgaggtagcagtcaagagtactgttggttgggagtttgacggtgggccttcttcgtggatgttggctgggcatattggatttccctccttttgagaggagcttcatcggtacgatgaagacggtggctagacaaaatgaaaatacttaggatgctaatgtagaatcgaaacacaagaactaagctaatcagaagggggtgaatggttggtatacctaaaaaccgaaaacttttagcgaaaataaaagttaccctccaattcgacggatcacggtctgaccgaagtggatgcgctggtctgaccgcctgatgaacgtcggtctgaccaatgtagatcgatcggtcgaaccgccgaaatcgcttgccgccgcttgtctgtgccgccggtctaactgcccttgcgccgtcggtctgaccgccgcttgttgccggtctgaccgccagtgggatgccggtttgaccgccgaaacccggtgaaacacaaatcgaagaactctcaaattagataacaactttattacttctctctgtgtttacaaagtgcaccaacaatactccttacaaaaatctcgactaaactcgaaaccctaactaaactagcaactcaattgctctcaaaagcgataccgggaagcctcacgctccccctctatttacacatgaggtaggcagcctaaagccacgaaccaaactcatactaagagtcctaaacaccttaggaaaccctctagtacaagacacaaactttacataaccaatcataccaaatttggactccttccaaattcgactccgcatcccatacgcacacaatacctccatcgtatgccatatgaaatcttcaccaaccacgtgcatcaactctagccatgaaacaaacaaagaaaccatattccgaaaccaagctatccccaacttgactcattagtagcaaacaacagtattacatacgtatagtatccatctagaagccatataaccatgaaacaattacggatatccaaagaaacaacccgaaaccgaaaccgacacagcgtcggccggtcagaccgcgggccggccggtctgaccgctcgatcaccaccggtctgaccggcatacacagcccggtcgaaccggtcacataaaataacagtaaatccaatcatctctgtcggtgacatgggatcaggagtatcatgactagaggtttgaggcagacacaatcgcacacgtggcctggtacccccgagggacgtcgggcccgagggtgatgcgttcgccctcctcttagtccccccgagggggtcgggccgcacccccctc

SEQ ID NO: 13530 - DNA, 8469 bp, Oryza sativa
tcccttatattatgggacgggagtattctctatccaagctttcatcatcctcttcctccacctctcctccttcgtccttcttttttccccttctcgtcctctcagctacagagagctatgtgtaggcatgacgacggtggagcaagccacgaaaaatggatgtagaggcctaaaccctcctcactgctggatctggcccaggtgcatgttggctacaagggtggcggccggcaccactcatgtggcctcctccttcgcctcatgcttttgaggtatggtggcacccactggatctagctctcatggccaaaaagggcaaccaagaagaggggaggccgtcgggaaggttgctggccggcatggggtccttagcctccttctaggcatgttgttgatgatgatgaaggggcgcgaccaatgaagcttgtggatctagagctttcatttggcagcgacatgatgacgacttggtgagccatcatgttcctcgctggagtgtgtgaaggtatgccgtgcaatgcatcatctgcagtcgatacccataggtatcatgtctggtacctttggtataatggctaatacttaggtatcatggctgatacccatgtatcagacccggtacctgcgggtatcatggctggtacccacgggtgccaagtttagtacatgcggtatcatggctggtactcacggatatgagacctgataccttaggtactagggtcgatgcctacaaagtatcaagtagcaacgtttcctctcattttcttcctttccctcggttcgatcccttgctgctactgttgtgaccagtgttggtacctacattgttgtaggcgctagctccagacgtgggggcgccaaacatgtggagtaggagcaggatggctctaaatttataggaagaaagcaaatacgtgggatgacgtcagccttcttaaagtgtcccgtttggacggaatcccgttctctaccagccctcaatcttcctttctcctagcatgcatggcaacatatcaaaattataaataaatttcaaaattttccatggtagttcccattcagttttaaacccaatattatatcattatataggtgcttctaacctatatcaattgattaaaaatttgaaggaaaaaaatcgagacattcggtataatgctactccatctcatcctgcaaacattcagtacaaagtatagtggatcgattttaaaagactaggaggtaaaagtgacctacaaggtcatatgccctgttggaatagttggagggaccgagagagtaaaatgacaccattgcaatttgcaagaggaaaagctggatctatggaaaagactgcctccctccatccctaagtgcagttttaatataagaattcatcattaaagatagtagtctactttcagatctctttaatgcagctacatctttttcttcttatttttagccattgaacctccctcctcattctcttcatattattattttttttagggaactgttctcttcatattattgaaggacatggtaattcttaacctcttccttaacatgtcaaaatctagggatggatggagtagaaagtctgatccattaaaagttcagggaaggattaacagaactgaactttttatacttgttatgccatgaatccgtgtgtgccaggagttagcaaacggtcagcgcaacctatgagtgaccagatacacatgacgaaggtttttccttcttagcatcaggaaaatcaatatccgcttagataacaattttgaagaaccacaaactctactctgtaatggttcaactctaaggcctaagctttcacatattcacgaatgaattgctcaactgctgaaacattaccagtcagaccagcccctccgcgactgtcaccctgttctggcattgattgaagtaaaatgtttctccagggttcccaagcttcacttcatcagtggtgtcagcagatgatatgtcttttcttgattctcggagcttgtttctacaaagtaataaatcaagacttgttagaagccttgtggactacagatttacttcaattattgaacatgtttgtggcaagctcttatataggtggttcaagtatgttaccctatgtactccagatagtacttgtgtacacagtaaagttgcaacgttacttatagcaaaacacaccaaaatcttagtgattgattatagatgacatcacaagttgatgcactagttatgctagtatgatacgtcaaaaagaaaaccatacatttctttttccaattgcttcttgatgaattcttttgagtgagccgtaactttatctgttttgttgcagaatatcagaacatgaatcctcttcttcactacagttgcctttgtcagaatgtcatacaggtacctgtgataagggaataaatttgagacaataccaattgcaacaataaattgacacaacacacaatttaatacttgtcctggcatgaaagaaggtcctagtcatactcctaaattcaatccagtaagagatgtagactgtagttcaattttagctaaataaacaccactacactcatttttagtaataacatggattacgtcagcaaaattactctgcaacgacttgcatggtggacaagaaatcttgagcatcaacagcaaaaactatcccagctgcttgaggcaggacttcatcaagcttgggtttgagccctgcatgaccaggaacatcaacaacatgaacaggctttattttgcttttctgcagagaacaagaacagagatcaagccatctgttcaattgcactttagtcagcaaatacatgtttctacataaccagatagtcttcctttcgctgaaaatatttctctgtaatgagtcgtcttaccctctccagctctgaatgaagcacaaacgtatcattgttttgttccattgaaatcacagttccttgatgtgattatccatcccgaagctaagggaaaagcaaaattagcacagagacaaccagaagaatctttctctctattcactaccattccgcgtattcgacttctattagtttcttttcttctttaatgcaatagctatagtttgatatagaatccatttctcaaagtaatggaaacctttctcttataggaaatggttcgaaaatcgctattccaccttttaggtatcgtgaaaagtgatacctgtgaagatcgtgcagatagtctcaaggcaaattaactcgaaagggcaaaaatgtgctctgtctgatgttgccatacaatatatatcacagacgaattcagatcggagcatattaagtcgaatcaaggaaacaagaaaagtcaacatagatgcccaatagactacaacataacaagcagaatgggtagttcattcggaatagtaatttactgaattacactggagttccaaattggtggccattaaatgtttagtcattattcatcaatttgacaaaattccatcttcccacttcaatccaccagaagttgaataggatgcctctcagggaataagaaacacaaacacaaaaatgccacacatagtcatacactgaaatagcatgattgaaatagaaatttacctggtagaaaagaatacttttgccaccaccaccgagcccagataggcagatagcacgaaactgcacacacaaaagcagccagacattgctcattaatttatgtgcttgtagcaccagcaaaataacatagcacaggtgcaactttagatttagaagttccacttgttggtgacggtgacttcaactatacccattgagaattttctgtgttcttaagccaggaatcaaatacgtgcaatgcagctgatcagataaattaaagtcaaactaggcagtacgagttactcaaacattatatcaacatgttcccgtgacaagggtgtaaaaagataaactcgggctacgaacagtcttcgcatcatatacataagcttaattgatcatagttgttaatataaatagctatagagctcagctacccaatcagatcaacagctagttcattcatggaattgcaggggagacaacttcagcaagtttttaactccggaaacctgatttgagttttgattacagggacagaagcacagcgtacaggatgcaacaccactatttacacccaaatttggcacctaggattaaaataggaaagattgccaaaatttggaagtctaccggtttccttcgagtgggccggtctgaccgccgtgtgttgggtggtcagaccgccagttgagggccggtcagaccggcggtgtgtggccggtataaccggcaggtccgagtccgactgtgtttcgtcgggtctcgaggtttccttgcttgggaaggcatgtttcgggtttcctttggtttctgtcccgagttggacgtggagaagggcttgtagagggcaagaccaacccctatataagggacatggccggtttttcatattgcttttagtgatctcttagtttgtccatctttgtcggtttgcgccgtaaaccgtctgccgccgttgcgagagtgcgacatctctttgtaggtttgtcctgaaaaccttccattttgcccacgagacgggtagttatttagaatcggctccgctagccagtttatttgtcaaaacccatctaggtctagctcttgctagatcgaggtggttggcgactctagggtcaccgcaaggcataaggtgctacgatcgtagttgtcaacttgtcaaaaaaagttgccaacacgatttttggcgactccattggggagatccgttcagcgtcaactcaactttgacttcgccatgacgaagcagtcatcatccaaggcagaggtggagccgaccaatgtgataccaatcacattggatgacttcgaaggggaagatcgcaagtccatggaggagtacattaaggagatcacacaggaggcgttgatgagggtgtgcactaggacttgtcaaggcgtgatcatcaagcccgggccacgtcctaagctcactcccgatttggtaagcaatgaagaggtaacacaatctatccaacaacaagttgcatctacaatagattcatccatgattatttttaaaagtaagttagatgcaactattgaaggtcgatttgatgagtttttaagaactaaattcggccctctcatggccaattttatgttaaaagataaagcctctaccagtgctagccaagctcctatagatcaaacaagtaatggaaccgatggagcggcgcagacagccggtccgaccgggcctgatggccggtcagaccgcaacttcgccgtcggtccgaccggccaaacggccggtccgaccaggtattatcctggcggtcagaccaggactcatgccggtctgaccgcacctctggacgtcggtcagaccgggccctggaccggtcagaccggcgcaattatttcgattcaggggatagatccaatgactaatgctagttatttgtatcatcttagaacatttgatcctcctgtatctactgctgcaattaatccccaagttcccccacatgttcctaatgcttataatgatgttgctaggggatttcctcccgatactaggcaaggccaatataatcatattgcgccacaaacacaacctattaggccaccaaatccaccaccaaatcaatataggcctgataatatggaggaaataattagtgggattattagggataaattcgggattgaagctaggaatcgtgctaaggtataccaaaagccatatcctgattattatgataatgtaccatttcctcgtggttatagagttcccgaatttaccaagtttagtggtgaagatagtaggcccacatgggagtatgtaggtcaatttttagcgcaatgtggtgaggctaatagtgatagttttaaattgcgcttgttttctttatctttgtccggtaccgcttttacatggtttacttctttaccggcaaattctattcatacttgggctcaattagaacaaagatttcatgattatttctatactggaaaaactgagcttaggttatgtgatttgacatcgattaagcaaaaatataatgagcctgtcattgattatattaagagatttagggatgttagaaaccgatgttatagcttgaatataactgatagagatttggcttgtcttgcttttaatggtttaattgctcctcttagagaaagattagatggccaacaatttcttgatgttagtcaacttatgcaaaaggctctggctcaggaaagccgggttaaggataataaaaaatttattagaccatatgagaaaaagcctaatgttaatttgattgattaccctgaggctagtgatagtgaagatgagggtgatcatgatatgtatgttgctgagtggtcatggactaacaaaaataagccctttctttgttctaatctaatgccaactcctcgtaaagatcggcaaagtgagattaaatatagttttgatgtggccaagtgtgataagattttttattatcttttacaagaaaaacaaattagattacctacaggccatatcataccatctcaagaagaattgaaatgtcgagcttattgtaaatggcatgattcccactctcattctactaatgattgcaatgtgtttcgacgacaggttcaatcggccatagatgaaggacgattgaagtttaccgatggttctaagatgaagcttgatcatgattcttttccagtgaatacaattaatttcaatgataagaaggtgttgatttggctggagcaagccgaatctactaagggaaaaggagtaatcattggtgaaccgaggccaaagatgatagtgccaaagaagccggaggttggtgtttggaaggaaaataagagtgaagcttcaacttttaaagctcctaggaagaccaaagtgacccttgatatgcttttggaaaagtatgaaaagcaaggtggtgagagagctcgcaacaaagggaaaagaccaagatcacctcctagggagcaatttggtcactcaccaagacggtcgcattcacctccataccatcattcacaagacatgtcatggggtccttatccaatgccgccgccgggttatccttatccttattacatgccatggggggcaacaccgccaatgttcaaccatgtgcctccaatgcaattcaaccaagggtggggaggactaaggaggccaatctatgagcgtttgtcttcgccaaacaatggccggttttatggtaggaaccgggccaatgaagagaagagggaaggaaagcgtattaaggtggaggcaaggacttcggaagtgattaccatcaaagtggggtctcatgatgtgccaataccttctggagatgaagttggagagtcttcaagcaacaaacccgaagccggtaccagcttatcgcagttggccggtctgaccgggccttctggccggtctgaccgcagccatacggccggtctgaccgggccatctggccggtctgaccgccgacccgacaatagtccgaccgacgcctcaggccggtctgaccgcccaccaaatgtcggtctgaccggcgcatctggccggtctgaccgatggtctacgtccggtctgaccaagctccagcgccagtttgacaggaggtttgcaaaggacaatgcgggggcttcatcgtcatcaagtaaactcaatagggggtactatttacctcctggaacagagccgaaacctaggtggatgcctaaggatttaacggctactcaaagaagaaggttgcaacttcttcgggcccaagaattgagagaaaagaaggccgaagaggaaagagatagaaagttcaatgagttgcgaccgccaccggtttggagacgtaaatccgtagagaaggaagaaccggttgttgtagagaagaaggaagaacaatcggttgataaagatgagtcatctccaaaagaagacatggatatcaacatggtatgtatgttgtctatggagttttgtgctatggataaagccgaggttgcttagttttctctaggtcctaaagatgcggtttttgagaagcccgatgaatcaaaccgtcatatgaagcctctctatctcaaaggtcatattgatgggaagccggtctctagaatgcttgtggatggaggtgcccccgtgaatttgatgccgtactcgttgttcaaaaagttggggcgtggagatgatgagttgaagaagaccaacatgattctcaatggcttcattggtgaaccaacggaggcgaagggtatcttttcagtggagcttaccgtgggaaacaagacgctaccaacagctttttcatcgtcgatgtgcaaggtaactacaatgtaattttagggcgttgttggatccatgccaattgttatgtgccttctaccttccattaatgtttaattcaatgggacggcaatgatgttgaaattg

SEQ ID NO: 13531 - DNA, 12565 bp, Oryza sativa
ccttcaactacaaacccatcaggttgatcaatataaatctcctcatccagctcttcaataaaaaaagctgtcttaacgtccatttgatgaaaaagaagtccatgtgagactgctagggaaagtagcacacgaattgtggtcaatctagcaacaggtgaatgtcaaagaaatcatcgccttctttctgagtataacccttagcaacaagccgagccttatgcttttcaatagtaccatcaggcctaagcttcttgttgaacacccacttgcaccccacaagtttacacccatagagtcgctctgtcacctctgaagtcccgttagcaataatggaatccatttcactacggacagccttctcacagtagtctgcatcaggagatgcatatgcttctgaaattgacttaggagtgtcatacacgaggtacacagtgaaatcatcgctaaaagacttagctgttctttatctcttactcctccgaggagcttcattgtcatcctcctcaatgacatgttcatgcatatgtttatttgttctgatggtgtggtgtgattgaacagggaattatttcagaggattggctagaagtactatgtgtatccttcattggaaaaaaaactctcaaagaagatagcgtcacaagactaattgtaccaacatgtatgtcaggtaccacagatttaactattaaaaatctataagcaatgctataatgagcatatcctagaaagacacagtccacagtcttatatttaagtttgtgattcttcgttactggtacattgactttcgccaagcaccccttgtgcgcaagtaagaaagtgatggttttctcccaatccatatcttatgattcgaggtcaacaatgtctcctcgcaccatgccttagatagtctcgcggtgtccaacatgacattcttcttttaagttcaaacatttttatcccattgtcacgcacatgcattttttctatttaatattaaatgacccatgcaacgctcaggttgacagccagaggaagtacctgcttacttcctccgtttcacaatatataagtcattctactatttctcacattcatatttatgttaatgaatctaaatagatatatatgtctagattcattaacatcaatataaatataggaaatggtagaatgacttacattgtgaaacgaagggaatacatcattagcaaaatattagacacactacttgacattgaagatagcctctaatttacctcaaaaaatagagaaaaagaaggtagtagctgctagataaggtgatgtacttccgagggacagagtcagcactaacattacttgagaaactacttctttgcaaaataggaaagcagtgatgcttgtccaaccgaagcaggtttcgggccttttaccttctttttcacatgaacaggagatctgccactcttctccatcactttatccgcatgaacttcatcatcctcgttcttcctcttcaatcttaaagcatcttgtttctgtgttgcttcgtcagtaaatataaggtcgtcattcttcatggttttagccttctcgacatcatgttccaaagtgataggttgatcattaaatatagaagcatcttgctcctcttccacttggtgctggtacgttttatccaattggttttctgctgattcatgccattctttgtttgcagctcgaaaggcttttgtttctgcgtgatcctgatctttcttctctgatttcactggtttcttcatgaagaatgtcgagattggcttttcactgggtctcatctgtacctgcattttgaagtggaacaaaactaatcattgcacatccttttgctttacagaaaacacaaaaagaggaaagctaagaaattactatccagtgaagtcgaattgataggcaccacgcaaggacatggcatcatcttatcaatgcagcgtcaacaacagaaaacaagaaaaagctactgcttaattgtatatacttcacatattgtactttttgatagctctcattttagaagtaagaaacctgtagatctttcattcttatcatttatgacatcatgagcattttatatttaacggaggtattcaaggtacatcactgaaccacatttacatgttatctgaatcactccatcaggtacaagcgtggatccaccatagaatcattgaggtggtcatgtggccctaatgactattgaaagtgcagttgaaaaaaaatgtaactttgtatattagcgacagattataacacatctgagagtatgctacagctgatgatcacacgactacccgccaaatacaacaattatgggtgtcatagaaagtcaaaatttctgtataatttactctcaccattcagtaaaactcaatttcttgaacttcacaaaaacaattatttgacagaacaaagcagagctttctacctgtttgatgcactcaggaccatcaaaagatattttgcctattgcagctgtgacgggataccaaacctgcagaagaaaatgtttaaaaaaaatcataattttgatttgatcattaccgagaatcttagccactgatctttgttctcttactctcctaggtttcaaatgggccagaggtcttaagagattttcaattcaggtcaaagtgaccatttgagtagcatgccatcctcacatatgactactgatttaacgatgcagaagctcaccacattcatcccaaacttgacaaagtcttggtccagaaaattggacacacaacttagcttccccccaggaaacttgttttgtggtttggcagcggctccaaatgacgcagtgtgaccgagtcctcaatgggagggcaaggcttaatcccttgccacctaagggcccttttatggaaatgcgaatagagaacagaggagaatgttaatggaagctcgctccttgattaacaaatgaatcttgccttccatcctcttttataggactttgtctgaacaaacttaataacctcaactgtcttgaacaaaccaaacctaaactgagagaaaactgatcctgaagcagcacaattcaatcgcagtgcaggtgacttgttcggttgcttcctgcgctcagtgtaggcgattccccacataagaacttgcaataactaattgttcctatggcatgtgcaacctacttaggaaatagtttggtatgtttgacctctggtcaaaatttgtctttgctacttcagccgtaatagtagacgctaactcatgcagggaagtagatcaatcagactgtcataaatacctcgacaactgctattctagctttttacatgtctcttgaatgaaagaacattcctctatgctttgcttcaatctcttctcggcaactttagtccaataatgaaaccaggaatcagcctccctctagtattggataccatgaaaataacaatatgcccccctcccaaaaaaaaaaaagaaaaagagattgtttcgtacaagcatcatggataaacttgcctacgtaggaagtcacacatcgttaggacccacccggataacttaatgcttcatgagctcggatgctacaaatattttctacaaagaccatggatgaaggcaaagaaacaagcaaaagaaactgagagtccaaaggaaaagtacaatgaagttctaatcctcgagctaagatgaagcaagacaatgcaagtctcgtgaaatttgctttatgttcatgcacatgtatagcatgatctaactttgattcataaaaaaatgaacattttgatcattacctaaatacagcaagctaaagaggctaaagctatcaaggaaatgttggagcaaagcatagagggatgttctctgatacgacaaaaagcaagagcagttgtccaacaataagaaaggtactcataagaatatgatagatatactaatcaaagttacaagaaattagcttttattggctgaagtggtcaaggaaagtccagagaatccctctgtgcaatgaattttttttattttttagacttatatttttattttttagacttatttttttaatttgattaaaagacaattccaaaaagtatttccaaatctagaccttttggccacaccagcccgcctagtgtggccaaataactttgtcacgccacgtgcagtttgcgtggccgcattgtttggccacgccagcctcttgccacgccaccatggctggcgtggccaaacaacgctggccaaaaggttcagttttcgaaaatactttttggaatggtctattaataaaattaaaaaataaaaaatttcctgtgcaaactcaagttgaaaattaagaggcacaagtggataaagttatgaaagaagtgacttcaacaaataatatctttaactccatctaggtaaagtactaatacatcctaacaaggttaagctagatcatcattatgatgattctattgatttgaagattgctcacaacttcacacagtgttgaaaccagagtaaattttgtagcagagacaaagtttgacatttggtgaatgctaccacatgtaccaaatcacaaaacatgacacataattggctatgttggtagctaaaaaggccaagtagcatttcggaaaacttccagattgggcatttgtcgatttttatggtcggcaatgtaatttgtaaggtgcacaagatcaaggagagatggtgatagatttatactggttcaggccctcgagtgaggtaaaaccctagtccatttagcatagattggatctatgttgaggtgtgtgcaaatcagcaatggtgtggctaatggcgcgtatcaaagaaagagtgtaaccctttagggttcctaccgccaccctttatatagagctagggcggcaggcggcgtgcatggtacggtatacctcataatcaaggtacctaccgtctaatgatatgggataggatagactttcttatctcttatccctttctatacattgatgataccgcttgggcctaggccacttggcttaccctacgcagtacggcccaaaggcctctcgtggggcaccagggtaccgtgccccccacaatatcccccgagtacttcgcttgatgtagagtctgaagatgacgacgtcgttcgacaggatcaaatccagctgagtactcaccccaaaattttggatatagattactttagttgggtccgagtggaattgcgaacggccgatttttccttcttgaaggatggaaactgaacttattttccaaaatcagagtcctttcatgggtcggcccgtcaagaatacctaatggcataagtacgcccgacgggagtgttgttgctcaactttccccaaatggcgttgcatcctcctcatctgctacgttctcgagtcagattgggcgagattttccaccgccccacttctctcgccgaagctctttgctttccgcggccctgatgtcgtagtcgatggcagaatctgtgccaatcccgaaccaggccaccgcctggacaccgtcgatgatagaggaagcagtaggagtcctcccccctgcaggagctcatcaactggagggaggctgtcgaagaggacttccaaaccccgaacacagacgagatcatggtcttcctccccttcttccggttcggcctcggtctgcctgccggcgattttctccgaggtctgcttcacttttatggcattaatattcatcacctcagtcccaattctatcctccaaatagccatcttcattcatctgtgtgaggcatactacgacatcccttcccactttgcgtttttccgttatctgtaccaactcaaaccgcaacccaacaagaggaatcctatggtagttggggaagtggcaactagacccggaccaacaggatctggaattttttgatctccccctcaggtccagcaacaaaggttggcgatcaagatggttttaatgctccaatccactgccaagcctacctctatttaccgatcatgctcccgttgttaaagattgctagtactccctccccgacggtggcgagatggatcaagtccgagggttgttgaagggaatcaaatatatgatcaacaacggcttaactggggtcgccgtggcctgcaactttgtcacatggtgaatccaaccattgaaaagccacgcttacccaacataggaatacattggtaagaccgatgagacccgggagaggcaacaaatcatccgcaagagcgaggtcgctaataggatgatttaagttcttcgaagctaggactccgatcaccacggagggatgtcctcatcccctcaaacatggcatggagcgcccaaaggtatgctttgctttagttgatctttggttcacatcttttgctcaaactggtgatagacaatgatcctttgcgttcttctcttttgcagggagttgaagtactcatctccaaccctcctctgcccaatgcccgaagcaagaggcgtgtcgacgatccactgccgagtggtcgcccaactaagcgcgctaccaccgatgagcctagggccagctcatccaagaagccatccggtggtcccaaggtccacgaccgccacacggatcccggaggcctccaagacctccggcaaggggaaggacgttttggtgacctctgatccaagttcccgaaagaagaacccgacgggcttagggggttcacccgggactcctcaagcgacgacgaggacggcgactaccgcctccagggctgctaaggcagaggatgcgactgcaaaggtagcctcccatggcccgaccaggaccccgaagattggggtccacaagacccgtcaatccaccaggtgagttatgattgtgatccttgtcatttctctgattgcggtggagatcgatatatattaatgctggttgatgttaggtgaatcgttgcagggtatcaacgcaggacaacccaggtaagcttgactcgacccagggcgcagacgacgcttctgaccaagccaaatcgaggtcggctcaaccggagactgggccaagagccgagcccagtgccactcaaacctagcttggggccggtcgggtggcgggagatgctgagacggcggcgggcaacttaggctggcccagcggtggcgtatcgacagacgctgcagctgactcggcccggccgagtggcggagatgcagcgggagaggaggtaggtggtggtaacgagtcgacgggcgccgcagctaactcgatccggccgagtaaaggagatgtggcaggagcggaggtaggcgctggtgacgggtcgatgagtgccgcagctgactcagcccaactgagtggtggaaatgcggcgggagctgagggaggcgctggtgacggggttagcggccagggcgatagtgccgccacacccggcacatcgactttctcctccgcccagcccacaaactccacccaatcgccgacctgggaaagaaccgaccggcagggaaggagaggccaccggggatgaagaggatgccgaggagatcccgcggtgtccacatgccttgccatggacaaattatgtctccccccttcagaccttctggttccagggaggaagggagaaggaagctctgaaggagggcttcgatgatgcagctgataaggcctatgccactgttgatgtgaaaacacggcggcctgggagatctgcttaactccagtgcaggtccaaggctagcctcgagtgtgtcaagggcgtgccagctgatttgatcctgcaatcagtaagaaagacaaaagcagaattagtcagccgatagccgatcgaccgaaaggccgatagcgtatcgttggtggtctcagccgatggagttagaccaaatcggctatggactgattatatcaaagaatattaaatcctaaatatgcctaatcggctgtaataatgtctatcatgtttaataaattgattcggagacaatattatgaaaagtaatcgatctgacagtatttagagcaagaaagataatatactagctaatactctagtacaaacctatataaacaggttgatctatataaacatgtcaaacaatgatcaagcatgatagtgcaaaaatctagccgatactgactaaaacttgatatgcttatataaaacaatctgtctatataagtggcgaatacacatgaaacgaataaagaagcatgcatattaggtaagatcggctgaaaccccaatactatccgtattatatctaattgcaagctactttgcatggttctaagcacgactagagatgatgcatctcaaagtatgaaaaggagcatacagtctatacaatcaagcaattaaacacttttcaagatggtagatgccttagctaatctaatctagcaagacaatttagccgaaatcagcataaaccctaaagcgagcagcagccgatagagctaaattgagaagctaagaatagattaactaagacatatgatagcaatgactcgcgatatcgagcttagcatgtcaaaagcgacatgttagccccgatagcgcgggccattgagacgggttacctcttgcaaataactcgctgaaaacgaagaaaaataaaaagggtggcaatgcgccgaagttgtattggattgtctctcgtattacaatgctagggggttcatatttatatcccgagtacaaacttagtccattatggacacgactcaaaaccttctaaagacaaaacacaaacaagaccatatacagcggtctcttgccaaatctctaacaaaccaacataactaacctaattaatagatacaattgccttgttcgagctccgtctctaattggcaatgacggttatttcaatttaggtccatgtcaagcccaagttacaccatatcggctaagtcaatcttctgtccggtttacagccgatacgatactcagccgatgtgtagtccgacttggagatcaactcgattccacaccaaatccgcttcgaccttctccaaatctgatgcaaaattctgttgttaacagccacaatcatgtacaagtccgggctgctcctccttcaaaagatgaaggttaggagctatgtcccttagcccccgacttcaggacaggtgagttgtcagtcatcatgacctaaattgtgcatcagcatgggtagccccccgccagcatggtgtgatgttgataaatggcgtgtcgtgctggcaatgtccttgtgtttgttttgaagccggctagcccccgactccatgctgggaagactataggcgtcgtaggggtggagttgactcgtgttcttgatgtgtgatgcaatacattgttgaacactcggaggccaagagcgacggcgaagttagcaaggccgaaaggcaacggagaagtcgtggccagtgatgaagcacgatgagtcgcggtcggaggatgtcgaccttgttggcggtgaagtccagatctccaaagcggaactcagttccagaagcgaaactgatcgcttggacaaatccaacgatactagggctgaactgttgaagttggccggagtcatcggcaatgaagtcgaaggcgctgaaggagaaaagggtggcggtggggaaagcggtgagattcgcaaaggtgactccataagatgccatctcctcctttaagaaaaacgatctagcgcacccctacctagcgcgccaactctcgatttttatgatcggcaatgtaatttatagtgtgcgcaagatcaaggagatggtgacacatatttatactggttcaggcccttgaataaggtaaaaccctagtccagttagcatagattggatttatgtcaaggtgtgcgcaaatcagcaatggtgtggctgatggcgcgtatcaaagaaagagtgtgtaaccctttagggttcctgctgccaccctttatatagagctagggtggcaagcggcgtgcatggtacagtatccctcataatccgggtaccaaccgcctaatcatgtgggataggatagactttcttatctctatccttttctatacattgaagatagccgcaagggcatgggccactcggcttaccctatgcacccggtaccatgcaccccacaacattcaccttatattattgaatttttaacataaacataactgtgctattagcataaccaaaagtagattatagtacatcattagattggaattttgacagaaaaatattgtttaaattttaacataaccataaatgagacactacagatagatattattataaggtaaagaaataaaatcacagtacaccatcaggtaagaatttggtaaaagaatatcgtttttttaaagagattgctaaaaaaggatagcatattcagtactaatagtaatagcaaactatatgggtctgttcaatcaacttgaaatctctaccaaatttaaggtgttggacgtccgtcatttattaatcaagttttaacacaaacatagtgtgccagtagcacgacaaaaatgggaacaaatgtttcggaatgtaaattacaccaggtaaaagatttagtaaaagtacatatctgtactattataaaaactgaacatgtttccactggaattttgatacgtcacctgtgtttgagttggttgtacgttgtcgtatccaattcaacgtgactctacaataactattatacaccctcttccaacccaacccctcccagcccaaccaaaccaactcacaccaatccaccaccctgtcccgcgtccccctctcctgatcagcgtctttttctctccattttcttgtttgtcctttccttttcttccaatcatcccgatcctctccctctcgttctaatcacctctcttttctcctcttttctgtttttctcctttttttcctcttccaaatttcgctcctcataaatatttttttccttttgaaattatcattgtttaaggtatgtatacagtaagtttgttactttgtaaatgcttttcatctacagtaaaacaaaaagactttcactaattgaataatcaaaattgaatctttttttttcgaacacgcatgagatgtgcatatcatttcattaagcaaagaataaatgttcggacttacaaaaacaaaaacacaaagaaacacacccacattcgcccccctcctagggcacaagagctattgccttggctaacagctcttggagcctagaagctcccgccatacaccatagtgtgccctcattagtgatggacagaatcacatccgccatgctaggagtaacaccattggaaacacaagcatttctgtgtttccagattgcccacgtgaccaagataataagagagttaagccctttcttctcgctcattcgcaacccttttactgcctttgacaaccaacacgaaaacttgcgtgtcatggttcggaagagtggagaaatagcccagacttcaaagaactagtgaccacacttgtctgttgaaaacacaagaaaccaaagtgtgttgcattgtctcatccgcttgatcacaaaaggggcaagcggctagatgaggcaagtcacgcttggcaagacaataagtcatccaacaatggttgtgtatccgtcagccacagaaaaaaaacctacatttaagaggtgcccaattcttccatatcattttccaaggagcaaacctgaccgtctgggataaagaaggtcccatgtgcggatttggaagtgtaaacccctgactttgagaacttccaatagtgctggtctgaaacgcctatttcaatctttggttgatgaggtatagcaaaatacccatacatcaacttacggcatagccacccgatcgatttgtaaggctatggaatggtgtatataaaggattcttcatgtgatgatgcatgaagcgagcgcgaccagattcaatgccattgttacgtttgtttttttttatttgctgttaaattggtatagtttttaaaattgtcttcacatgttgcatcgcacatgcatttttgctagtcattaaaaaaagttaaagacaatgttcagttagcaaataataacatccaaaaaggatatcagccatatcacggaaatcccaataaaatgatgaaagcatgaacttacaagatctgctccttcatagggtactgtaatttcttcgagtttcacagatgcaccgttcaaccaagtactaatggagtctttgtcacccaagattactggcattctatctgttaagtcacatgcagactcagaaggtgccaaatcaaatcaaaaggtagcaagtcataaaaacattgtgtgcaacagtataataagtactcgtatatcaagacctgatagacttggcaaaaacatttttcatacatccattaccagaaaaaggtataatctgttttctcaattaaattgaactacaaggacaacttatcatataaagtaaaatacagatgcatcagtactgttaaaggcaatattgtactatcatcaatgatatatactatcttttaattgaaaatcaactggctttctccttgcctgcctctaaataagatattgtaaagtgaaaattaataggaacagtgcattaacaagctaaacattacaaacttccagtaatgtcactagcta

SEQ ID NO: 13532 - DNA, 14981 bp, Oryza sativa
accatgaagccaattcaaaggcacccttatcacacatgtatcgaaatagtaaatatatgaataatctgagatcatggggggtagagagatctagttaaccacgaaaccctttttagagaaatcgaggcccgagtagtcaaaatagtaaaagtatggatggtttctcctggggaaatagcagataatattaatactcaaacaagtaaattatcattttaccgattggagcatcaaaagtctaaagtggcataatcaattaatccgaacatgtgataaactgacgtatgtgaacagcagaaagtgttttgaaatatgcatcaataattcagctcaataaaaaatgcattaataaaatggttccttaaaatgtagacaaaaggatagcagataagagttggtagtgtgagtgcatgctagacaatttatatactaaatctgtcaatatttgtagagcaaaacgtcgtattatttttacaatcaaaaagccaaacaccaaacatgtagttctgggacattgtacagtggaactcgtatctgaaagcttttccctatcataatgatatgcatattgtactattcagaatgcagttcttctatgtaattaataatgttaggcatttaatgcgcagcgcagcgcagcgcatggcataaattagatttaaaaaatgtgaaacacttgatgacagcactacttcaagttcagtacatgcctgcaaatgttcattatcacagttcatccatatttgcaattttgatcacaagacaacatgaacttgtcgcaccgcttatgataagacatgatctagatataaagcaggatgtggatataatatgtttacaactatgtgcagacagagcaggcacaaagcaaaactgagcaaccatgttagatctttacaaacatggcgttaaaccagtacaaaaatatatcatactacaacttgtttcatttacaatgtcatatatgcagataaaaccttttaggaagctaaataagaccaattagtaattacaaccacagatgttggaataaataagctgcagcattaacaggacaacatatcttttgcagcaactcccaagactactttaagaaaatgtgattacactgaaacacattcttagtaccataatcatggcttccaaagactagaaagttaattgacaaatgtgcatgctaaccttccgagtttgtccaagtgtcaaagagggcagcaaagacaagaggcctctgatcttggaaatgaatgtaatacggcatcttctttggcccatcctttttccattcgtagaaactgagctcatataaaatattaatgcatgattaatacaaaaatatggtcagcttattgtctctctaaatggacttttcaacaaagacattatgctacaaataagaacctaaatattttttatctaccaaattgtgctgcacaaggataaaacaacttgaatgtgatacactaacaactaattgagtcctagattgaattttgtctattttaaccagttcaactcagattggtcagggcaaaatcaagccccagtgtcacatgtgaggattaagaagggtagctggagtttttcctcggaaacgcaggactgtacttcatttcattaagaaaataaaccaaatacaaaaggagggatcaaaactgatccaccactaagaacacacctcacatactcatcacttaaaggtgatgcataaccacaaacgaaaaaggaaggactagccatccggggtaaacaacctacaaagaaacacatgtaggcacaggctactactatcattttccgctgtctttaaaagcaccaaaacgtttgttgtggcaccactgaaaacacagtcgttgccgtgcttccaaatcacccaagctgctaggataatcccgataactttgccaccaccatcctggaaaatgggctgccgacagttcaggtgcaggaccagccagccccaactttagagagtagtaaagtccaaacatggccagagaaaacacgagatacaaggatatggtgaacagtttcgccgctttgatcatataaagggcaggcagcaggatgtggtagaccctgattaaaagcaagttgatctgaagtccaacatctgctgttaatagccaaccaaatgaaaattttgcagcataaaggaacccaactagtccatattcgcttccatggagcaaacttgatggatcccaggaaataagcattgtaggttgacttgctagtgtaggagcaggaccctgtaagcttccaaatgtgttagtcctgaaccccctgctgcaagaccgccccctcaaccaagtcccaaatcaacagagaacttgaacagtgaagccaccttttatatttctcacccaccttttgttctccaatgcctgcaccacagtgcgctgcttacttgacctttgagtgattaattcaaaaagattgggggccagttcagctattgttcttcctggcagccatctatcatgccagagcatggtgttcccccttttaccaattatagttttcacagccactccaaacaaagagtgaacattgtgaggtacttgtataggaaaaccaaaacaagcccaaggtctagaagagtcaggtgtttgaagccacaaccacctcatgagtaaggcccatcccatcttttccagattatgaatgcaagtccccataagggagaggtcagcaaacgcaatcccaagaaacaaggaaattagcaccattagccctctcctgacccttccaaagaaaacctctgtaccttttgtcagtagccttgatcacccatttgggtagctgggttagggattgaagaaatagtagattagatgtgaacagcaagaatacagaagagggctttggagggagaataggagacaacatgaaggagagaggtaattttttaactctttgcttaatccccaatgatgatgccaatgccctactgatctaaccaactaatgagtaatgatatgatacaaaagctaactaggaataataatcaactaaactaacaaatgatatcagataatccaacgccttgctgctccagtgtttcattgggccaaaggacctactagcagcccgcatgtcgtatggccatgacacctaggactgtaggtgcttttcacataaccagtaatccaagtagaacagcttatttagcagtgttatacgtctttgatatgattctagctgtatacatataagaccaacaaatgtactcagagcaaaggcttttggagccaatctatgatgataattttgggagtcttgatatattcgcgagttgtctcatgctctcagtgaaggtgtataattgagtacttggtgattcacctttggccaaaggttttactagaatagatcacaagcaacaattagtggtttccctatagatttgctcaatcaaaataactagttatctcaattcctgagatgaaaaacaggtaacccccagattcggtacaatgtatttaacatgtcatgcaatctatgcccccatgatttatattcaataaatataattaagatacctcatagtttggaatgaggaaaatcaagcacatctaaacctacagtcctatgtcaaatcctacaattggcatgtcactcatcgattagcaccactatatgacagaaggatggagcgagacacggaaagcaagaagagcaggacagaagttatatcaaactactataaatccagatgtcaaattttacatccaggtgcaaatcattctgtagccttttagcctctatcaatgcaagcaaatattgagcaagtacatgcatactgtaccaacttcaaggggtaaatcagagcatgctcatgcaaaactttaacaaagcatatgatagttggaagttccaaataaaaggagacaactattttgtgcatacccttctactgccacaagacacctattatttgggataagtcgccgaaaggaagccttttcctttatagactctgaccgtgcattgaactgcacaataaaatatttcagtgattaaatcaatttaaagaagcacagtaatgggacataataaaatgtaaatcaagctctatagcaggcagtccaatgcataagcaatgtggagtaagacatcagttttagaggagtcaaataaagaaatgaataattttagctataaaatgaagcagctaagctagcgtacataggaacagattcccattctgatgtccatagaacatatttttaagagaacattccaaataaatgctagaatttgaaagatgatagacaaataagcacacagaaaaatcaagaatataaaatatatactaggatgacagcacaaatatttcatgttttggaaaaaaattgcaaagcattacactgtgttcaatactccctccgtcccaaaatatagtcgcttctagcgtttaaatgtggtcccatcatatagctacttctctacctactccatttcaaccaatcccagccatctcccatttaatttctccacctactccctcatctcaaccaatcacaaccatcccctgtttaatttcacctctctccttaatctctgtgaaaaactctagaagtgcttatattttgggatagatggagtagctttgagtgtactaacaacctgtcctttcaaatggggcattattaccataaatgtgacactgaaaaccaacatcacaattgcagaagccgtccaaattgcctaattggagtaaacgtagtaatcaaacaggaatcaactaacttggatggttaaaatttgcagctcccccctgccactcatcgccggcccgccacggtggcagggggacggcgccagagatgttggcgccgtcccgttggaccacggagctagcgactctggcgtcccaaaaaagaccatttctgggataagttttccaggggtctatttgcaaaataagtttttcaaaaggaccaagttgtgaaaaatccagagggcgagaaggggccacctgcaaaattaacacggcatacccctcgcccaccctatgccacatcacatagcccaccctaccatagggcgatttatatgccccgccctacgttgcggtgtggaggagtatatttttgcaaaaatttgaaatagtagtttgtttatgtaaatcattaaagaaataaatataaaaaaaatttccacgtccacgcgcctgttcatattctattttcttcccttgttgctcctgttactttccttatgcaatggtcctgacgccatctaacaagacaactataacccattgttagatgtagatcagtgctaagatctacaggatgttcccgaggtcgctttccttgctggccacgtcgtactatcctccaggttccagcctcttctccctatggcctttatccacaactggggaaacaatagctaggcaaggctttggcatccaatttcctgtattctccctaattattttgacaaataatttattacaaggacattcctgcatttgaaaaatattctcatgtgcgggattctgttccacaggcattgtgatggagccgaacggcggggcatgaacacaggacagagcgcgtgcaacaatggacagagcacgtgcagcaacgtctagaacacggaagactcagcattgtttaaagatgaagtttaaatgtgttacctttatcctcattcttagagataagttgttaggaagagtttgttacaagatttgttagattgggtcttatttaagcttgtaattcgttcattgtgatcaatgaagaagaattaatctaaaccctctccctctgtcgtttcttctgtcccacggtgtgcccttctgcctgtgcacttctttcttactttgttcaatcttaatgtcgccgtgcctcgctgccatggggactgcggcctagggcgccagtcaaccacaactacaacctccgatcactgtcagggcatgcagatatgttctgaattgttttattgtagttgatatatgactagattttattgttagggtttagagtaaatttatatacatatattctaccattttgatgctaaatactgcacaatacctatatttttttttagtttgactacatggctgtaaataataggtgaatttaattatggagaaaattcttaaaaaaaaagcagcagatagcaccaacaagattggggtttatcgttctacgaatatgaaggagcataaatatgaaaaagtaatgtactccttccattccattttaagcgtagccatgaatttctgtgtccaaatttaataatccgtcttatttaaaaatatttttaaaaaaataaaaatataagtcactcataaagtacaattcatgttttatcatctaatacaataaaaatactaatcataaaaaaattcaaataagacggacaatcaaagttggacacggaaactcatggttgcgcttaaaatgggacagatgggacagatggagtatgtatttacacataagtacatgtataccagaaaggaaatggcattctttatgtggagtggcttttcctagaggcttatcttcttcgaaactcaaacttttggtttttgaaaagaaacaagaaaaataaatgagaagctgataaaaaaatatggatcaaagaaaagctaatgcctccatctaccaaagcttaattggaagcctccatccattgccattgatgcggtcctgctggcaaggcaggagatgccaacaaggagtgagccaaagctcagttcaggcaacaatccaaagggagcaggaagcacacgctcagccgacagcggacaaggacgtagctgtctctggcagggcagccctaaaggcggcagatccagcagcagcttggtcgacttcaaatcaaaacattgcatgaataacaacgtgccttggatagtgcaaacaacttgacaagactgttggacttttaagacgtccacgccgctccaactagttaaccttagttgccaaatacctaattgtctaagcttgagttcatctcactttcttataagaaaatgacttttaagaaagatattgacaatttggaattgtagttgtacaaatcaaacatctcatcccacgttaaagaaatagagatggtgttaaatgataaacacccaaccaattagtcaaaacatagtcatcaaatgtggatcaatcggtctgttgtttgtggtttatctagctgttacataggcaatcaacccactacaataaactgtaatcagcaatcataacttctcaagactcaaaaaaagctattcaagggataagaacaagattgtatagaaagaacaaccagtccataccatcctgaaatgatcgggcttctcgttcttgccggtgaagctgggcacaagcccccacttcatgcactggattaccgacacctccccgtccatgtcccctccaccatcataccccgccggccgcgcccgaacggtgcccaccggcaggtatgtccctggcgacacattgtatgatggccgatacctgcatctcacaaccagaatctcatgattggcaaaatacagctgagcaggatgaccccatacctcaaaactcccttcctaccggtccatccggagcaacggcacagcgggtgcgtcacctcctccgcagccgcccccagtcccaccgcccgcgacagaggtcgtggtcgggaagccgaaagccctagcggcctgggacgggctaagggtgcagcgagccctgccgcacatctcgtactctgcccgggcacatgttaattaagattagctttgcatttgaaatgtaatggttgaaggaatggaatcgaacgatgattaccctgggcaaacctgagaagaacagtgtaaaatggtcagagcatcgcatcatcctgaacataatgccattttcttcccatccctatatacatcaagagcaagcaaattgttctcaattctaacaagaacactccaagtgagataattattcagtccggaaagattaattcagatgaacaactataacccagaagaactattgattctctatacaattttcagagaaccaatatgagatcattcttttttttttggcaacttggaagtgtaaagcataaacatgtacgcgggcagtcagatagtgtgaccagtgacctaaccaaagctgctactatcttttttcataaatcattgttatatagaaaatagtactgattggtaaagctcccactgtaattcaccaacacagagaaaaccggatgttttatggcttaatcaacactatgtcatgttggcaagccataataatgaataaaatgttagcacgtgcatgttactaacgttacgcagatgactgtatctcaatttcccctctgaaattaacatcacacgagatcaatcaatccatcaatccggggaggggtctcctaaacctgatttcaatctagagtataatctatcggctaatttactattgaacatctccaagaatcagtatctcacggttcttagaaaagatggaaaatttataatcagaacatgatttcttgcaggtcagtaacaagggagagaaaagtgttctttttttcgaatcaagatccaaacttccgctgtggaatagaaagcttacctcttttctctcatcaggatgtgaaggagcaaccgggcgcacggaggggaggccacgacgggcggcggcggcggcggcgacggcaatggtggtgcttgcgaagggcgtgacggagattagggcgcggggtggagcgagcgcgcaggtagtgagagagagagaggagggaggcggcggcgtcggggtgagtgcgagagaggatggagggaatagcgagcaagagagagagagaggagggcggcagaggcgtttgcgtctgcgtgaaggtatgggtgcggccgtgcggggaggcgagtctgagggaaacgtggaccgatctgagccattggatcggatgattctggaccatcagatttgatgaatgaggttcgtaggagtgtaaggtcccgttcttttctccaatataagagttggataaaaataaaaattaagattttcatgttacgcttttcaaactgctaaatggtgtgtttcgtgggaaaaagtcgctctaaaatatcatattaatctattttttaagcttgtaataattaaaactcaatcaatcatacgttaataccacctcgttttgcgtaaaaaatttaatcttcatctttatcttcaggagaaaagaacaccacctaattggtgaattatagggtagaagatagaagaataataatatgtacaaataagatgtaatttgattatgaaaactaaaataatttgatataattttgagcctaaaaataattaagattgcatatttttaagagagaagaaagaagagacaatttgtgatgtgaccatgtctactacagatacaaccatttctcacatcatggatgaacaagaagatatcaagatcaagtcctccaagtgctgaaatccgattcggccacctactacactgctgacttcaaacggccgccgaatctgcatacgacctccgttttcagcccatgagtacttgatggaaggctctcggaaccctctttccaacagatctagcctcgccgccaaattccatgtcgtttggccgcaatcacataaacaagatgttgcatcacctggcttgggaccccggcccaagtgggtcccatgtggggtgcaccctaaccaggtggagaacgacccttggcaccccttggtcatcctccctgtaggatcgaatcacaagaactaagccaaccaaacgggggtgaatggttggtatgcccaaaaaccgaaacttttagcggaaataaaagttaccctcaaattcgacggagatcggtctgatcgaagttgtcctgccggtctgaccacgcctgtgccgtcggtctgaccggtgtagatcgatcggtctgaccgccctgagatcgcctgccgcacctatcaatgttgccggtctaaccgccttgcgcccgccagtctgaccgccgcgatgctgccggtctgaccgccggtgagtcaccggttagaccgtcgaaacccggtgaaacacaaatcaaagaactctaaaagtgaatgacgactttattgattctctctgtgtttacaaaatgcaccaacagcactccttacaaaaatctcgactaaactcgaaaccctaactcaactatcaactcaattgctctcaaaagcaataccgggaagcctaacgctccccctctatttatacccgaggtaggcaggctaaagccacgaaccaaacacatactagaagtcctaaacaccttaggaaactctctagtacaagaaacaaactttacataaccactcataccaaatttggactcattccaaattcgactccgcatcccatacgcacacaatacctccatcgtataccacgtgcatcaactctagcctaagtatcccgcatgatctctgaccaccacggacgtcgtcttatccccaagccgactcacggtccatcaccgcaaatactctcccgaggcatcgagtcacctacacatgaaataaacaaagaaaccatattccgagaccaagctatctccaacttgactcattgttagtaaacaatagtattacatacgtatagtatccatctagaagccataatcatgaaacaatcacggatatccaaacaaacaacctaaaaccgaaaccaacacaaagtcggccggttagaccgcgggctacgctagtctgaccacgcatataccaccggtctgaccgacagcaccggcccggtctgaccggtccagacaaaaacagcagtacctgaaacacctgcaaatccaatcatctccaaaaccacttcgtaaataaattccaaatatcaaaaccaataatctccaatgccaattgttcatcacataataataataatcaaaaacacctttgattttacattcccacccctataattagttaggtaccccctcagggtttcttgggttgtttagatgaaagtttagccattgctacttccttgcagctcgcgtgtcggctagaccgtccgtctgcttgtattcgaaaccctaacttatcgtgtgtattcattcctatttgtaattcagatttattttatcttgttcttacttgtttcttcgatttgcttgccggaataaggttgatctgcaccggcaagatcaacaacccacgaagagttgcgtcgatcgcaaaggcgcaacacaacgtcttgtacggttgtagttgggtcgtcaacatttctcccaaatcgtagttatcattaactcaccaaaagatcaggccaaacaactgccttgagtgtcgattggaacccagggttcatcaatttggacaatagatctatcatccgaaggttagaaataattggagtgatgtggtttaatgagagaagaaagaaatagcattaactacaattagtggggatgagctatatgtgaggggagattaccgataaggaagaaatacagatatggaaagcgtccacacaaatcaattatatcctaatataactcttctggagattataggtaccacgtactcacgctgttgggctatccgattggttaaaggggtaactcatatagatagaatatgtataggataagattcaggtgttatattacttgtgtattaagcaatatcacgtagtcttagtcggctacaattgtaaagtagttatagagctttaaaccataagggataaagtctctacattgtaatcatgctttctttgactatataaggagggtaggggaccccttgtgggcagaatcacacccaagatcgtcatatcaataacacaatcggcggaatatttctccggacataagtagggtattacttctcattgagaaggcctgaacctgtataaatccttcgtcttataacccatccactttcctagcttgttcgctacccacttttagtattgccaaaatctagttttgacagttggcgtgccaggtagggaagcgtcaagtttctcgccaactagtgcgatgggatctacatcaggcatcgacgacttcgtcttccctccagggcagacgttccgtttcggcagcctcgacttcatcaccgacatcctcggcaagatttctcttcacgactcgggatcgaatcagttgggaagagatggcatctaccccgttcgacttaccgaacttggccaagatctaccccaagacttttctccgtgggacggcttcaaaccactcaggagagaccaccaagatctcatctccttcgtcaagttctgctcaagataagccgacgtatccaccaatcaccatgtggcttctggacgacctccccactgtattcggataaaggtagccttccccctaggtcgacccaatttggctttcggccaagatcgtatctagcttcagggaggtcggcgttatccttcaaccactcggatcttgctcatccatagaaattgctagctatttcagctcttccaccaacagctcccatgcgacactaagatcatcgactacgacgacttcaacgacgactacgacttcgataattttgccggctttgatgattattataacgacttcgatgatgactatgctctactctacttcggcgtctttatggccgaaacgagacggatggacagagggttggacaactcgtggacgaggaacgagcaagattggagcaggagcgccgggagcaagaatgactcagattggagcgagaacaccaggagcaagaccgactaagatcggcatgtgaacggcaagagcaagaacgctgcatgaaggaagacggagggccctggccgaatccagacgccgtgcccgacagctgattggccagacagtcattgatgacaccaacgtgttccttacccagcagcagaaatgtagttggagcaattactcttcttgataccatcatccccaataccctagatcatgtgacaccaacgctcgacaggatgaagaccatgatcgccgccacaattccgtacaacttgggagacagtcgacagcccaccgcttcgacgtatacaccttcgggaagccgactaccatctctcaggtaaagggattatcgtgagcccgaacgcagcaggaccaattctcgcatgcctcatgcgggcagggaacaccgggagcagttggttcactcaccagctgtcggacacagaggtcatcgtgcagatgcggagtaccagaactcctctcgagcacttgtcgatcttagggagaccttgaacgcacgccgcggagagagaaatgatcgaagacaccaacactctcatgcttttacaaacgacctatgtcgagtgaattggccggctggtttcaagctgactggtatcgagaagtatgacagtaagactgaccccgaatcatggctcaccatctacacactcgcaaatcgcgtagtaggaggagacagcaaagctattgtgaattatctgaccatagcgttagctgacttggccaggaactagctcaccgagttaccgtgaggcacaattggttcttggagcgagctccgcgaccacttcattgctaattttcaggggaccttcgaacaactaggaacccacttcgagctttacagcgtgattcaaaaacctgatgaacccttaagggattgcagtcggcatttttctgaaaagcgtaacaagatttctgatataaacgatgacaacatcgttgctgcattcaccaaaggagttcgcaatgagctactcattggcaagtttggacgcaagcctcctagaacgctcaataattgataccgactagagagcaccaataattaagtttttgaagcaacaagagttagtgtcaagcccagaaatttagtccaaatttccatactattttgtgtattaagtccctgtccaggaatcagctagggtacacaaaacgataagtaaatatatagatccaagcataaataaagcgtaaatacttacagaagagacacttagtcctcacactgaaaagacaacagcaacagcggaaaaagtgatcctagcggggcttcagctccactccacaggcaaaactcaactgaggtatgagccatggtcctctaacttcgtcttcagctcagaagcacttcacttctgaaaagagggaataatagcaaaactgagtacaaccaacgtactcagcaaaacacaccaatgaaacattcatgcaaggggagacaaggagaggtttgtggctatttgcttaaaggcagttgtaaacattttatagttgaaaacagtaaaacagttgattaattaaggcaagattaaatatgcactgaacaacgccacaccacattgaacatgcccgaccaaaccacctgaactataccagttcattaagtcaagttattaataaagtgggactaatcacggtaaagctggtcgatcgcccataaccgcgggcatgactattcgaatagttttactctagccagaggtgcacaactgtacccacaagatacaacccaccggcatgttaccgtgtccgaccgaacacgtcaccatgtcaagtgattatgacaagacccttcgcataactcccctaaccaatcgcaccacacctcaggtttcgcccccacccatagaacggtagtgggcagccccctctcatgacacggtgaatccggcagccaatcaaccggacaccccggccggccaaactccatcacgcccaccctagcctgggtacgtcagctagaggaaagttatactacaagcctagcagttgcccatacttgcttgtggtaagcgcggtaagtcttccaggggtttcccgcgaaccggtccttaattaccatgggtgcgactagcaaaaaccatgcactcacagcccaccattaagccatattttagttggattattacgaccaaagaaacatggctgaatgtctcgagcatgcagctcatcaagatactagagtaaataatgtgattatcccattaggtaacct

SEQ ID NO: 13533 - DNA, 1913 bp, Oryza sativa
acacttcatgaccatacaaccaaggctaaataaggaggaataccctccccaggaaattaacttaggactatatatacgcacggaggaatacccgtactgagctgtcaccatcagcggcccacctctcatccgcagcatataaccccaaataatgatatcccgtagtctagacaccatgcctaaactaccagatactactctaatatcagcgtcatgacatagagtaattgcataagcaaacactatacacgtaccaaagtatctcccagataagctagcagtataattagcataagatgaacatattgtaaagttggcattcatatagtcgggaagtattccaataccataaatgtataaagaagaatattctaaataaagtacaaagcttacaaaagaggaaaggaaagctcctagagccatacccgaactcttccaaaggcttccagactgcgatttctactctattcctattccactagcttaagactactaaactaacttgagaaaatatgagagagttcttgcttgagatgcgtgagtgaagtgtggatgagagctccttttatagcctcccaatgacggttgtggcagttggaaaggtcggtaatacccaccaaccgtcattggggagccatcttagccgtccaagagaaacctggatcgaacggcgctgcgggggttcggccgaaccatgtgtcgggccggcctggcccaaaatcggcaggtggcctcctccgttgctctcctatgcagacttgtgaactttggcccaattggtcatgtgaattctgagttctttgcccattcatacataagtctgattctcgacatcgtccaattgatttattgtctgatttgatgtcgattctccttcactttatggttattctctacaaaaggttagtgaaccaaatactagtggaattttattattctaatatggatatgcattgcaagcatgactagttctcctctattttggtaatattaacagacgaaactgatcgctaacgaccgtcaacactgggcttgccagcgtggcggtgacgctagtggtggtggcggcgcggcacagcggcggctatggcggcggtggtgcgcggccggaggacaccagtgagcggcggcgatgcgtgcggtgtagaaaggacgggagagctagcaaggacccaaaacaaggtattttgcaagtagatgatggtgctagtgttgccacttggaagtttgatcctgaattgcttaagactgccttttgtataatggtcatagaagatgagcttccttttatggctgttgagaagtctggttttaggaagtttatggctgttgcttgcccacagttcaacttaccatctagaagaacatgaactagggaggttgtcaaaatatattatgagcagaaagcaaaattgaaaatatttctcaaacataattgccaaagagttagcctcacaactgattgctggacatcacagcagcaagaaagttacatgattgtcacagcccatttcattgataatgattggaacttacataagaagataattgccgttttcaaggtcaaaagtcataagggggaagaaattgggaaacacttgcaaaaggtgttgttggattgggagttagacaaagtaatgacagtcactgttgacaatgctagtgcaaatgatgttgctgttagttatttgagaaaacaaatgaacaatttgaatactagcattgcacaaggaaagtacctacacatgagatgtgctgcacatattgtgaatttgattgtttctgatggtttgaaagtggtggacatttctatcaagcgtgttcgtgctgctgttaaattcataaaaaatggtacggcaaggttgggtgaaattcaaggagtgcaaaaattggaaaaggtggacagcaaggct

SEQ ID NO: 13534 - DNA, 2051 bp, Oryza sativa
catttgcattgaagtcgggggctactgtcagggttatggataccacatacctaatagtagttggctaaatctcggcaggacccaccacataccatgtcttatacggaaacaaccttcggatataggaggagttccggataaggaaagacaactagagttctacatggaaacgacaaggactactcggattgtatccatattggttttcctagttctacttggacaaggggacacatatgagtataaatacaaggcccctaggaggagaggggacacggaacaatagatcaagacacaagatcaacatacaagccaacatacgccaagacaagacgccaccggatatcgacatcagagatatgcttggactgaccctatccagtacctacagaggacgactgtagggatctagcgctgtctttgatctcctcgggcacgggttcgaggaggaagactaccctgttgtcgactacgtgatgatacttcactccgctatgtcaacaatagttagataggctaccctaaatattgtactggtgtgattatggtgaataagagcaacgaccggcttcggccaacaggagtacagttattacctgacaattcaggggcccgaacctgtataaaaatccttgtccccatctcttttactacaatctcgcatatatcctagtaccaacgatccccatactatgtaaataccggaatcgcgatatcaaacgtcgacaccatgtaattagcaaaacatgcaattttatttgtaaaaaattataaagtgggttcaatatgctcaaggggaatgtgtgacttgctcgaatcttcaaacaatcctccgaacactcatcctcgcgaacgcgatcttccgaaacggtggattctagacgctggcacgcaaaacgaggaaaagctctaataaaaaccaaataagtagtatgtgaaagtaaacaatcatgcaaatctcaattttagatgaattttgcaagatgaatggcccaatttggagttcgtatgaattagttgagaattttagaagttttgagccatttaaatgaatttctagaattaaacttgattttttgtgctattattaattatttttcttaaaggaagtcaatggttattgcatcagcagtggggcgggtgtggaccgagtccaccaaaggtgggccccactcgtcagcggtacaaggggcagcaggccaccgtggaccaagtccacggcgtcgatcggacggtcgagggtggccgggcggcatagccagcgaggaaggcaaccgtgcaagcaaggcggctgcccgacaagcagcggagaggagagcggggagtagagaagggtgctctccgagcaccaacgacgaaaaaggcggtgcgcggaagctcagctgtgagagaccgaggcggcgctccacgaggaaaacggggagcgaagctccgacgacgaccggtggtcgtggaggagcgtccgagcacctccaagacctgctaaaggtggagaaggggttaggggaggaatgagaggcgtgaagcggcgtgaatcaccagccagaggaggaataaatggagaagctcaccggcaaacgcgtagggtaggtttttagcggtggaagacgacgaccgagcgatcgcctaggcgcggcggcgctgcggagccgaaagtggaggcgaagtcccccggcgtggtcccaaccgccagcaacgagcggctggagatggcaatggcgaaggtggctcggggtcgtggtttaagcggcgctcgggtggtggaatggagcatcggtgtggtggtcgggtgttggtattttttaatgatgttactagaaatataattcccagcaatggtgccaaaaatactcatggtatattatggttacagaattcatccgtaagcgcatggatataccattgtggcattttacctgagagtattctaagggtatcgtatttatttaatcccgtgggaagatcatggtagagagaacctgactaataatttatatgttactcgtaataatcatagtctaagcaggggttaatataatccaagggtagag

SEQ ID NO: 13535 - DNA, 2052 bp, Oryza sativa
gatcaggatcttcgtcaagctttgccaagtcatcgtcactatggattttttgacgagggatacttcaactactttggatctgggaagtctaatctggccagagtatgcgccccgacaaggtcggaaccatcgtcatcaacaattcgatctcttgagatcgaccaagcctcaagataagcggcgtatcgaaagatgtcagaccgtatgatgtcgaacgagtacgcaacaaggtaattggtagattggttttttaaattaatctactaatttcgtaaatacatccggcatgtatctacaaaggtacgcaatattttatatgcaatttatcgtacctattcagatcatacaacattgtcagatctataatttattatgtttacctagagcatgttttttatacaatatctattgtgcgagtgcttccgatgttaggccaactacggtctaatgctggggactcgctctgttctcttctgtatgaatcatgcttgtctacgatatacataatgcctggtatttaatttgctcgttatatcctgataatactataagattcatgcagctttttgagtacatactcgatattatctgctatatatcttgtcttccagacgatatttttcaggaacaattgagcacgtgagtaggttgtggtcgagtacaccccattatcgagaacattctcgacaaatgcggagttgtcgcacccaacctaccaacgaagaccgacgacctatctcatagcgccaaccatggctgcgctattcgagaaaaggttgttaacggataaattctcgtgaacgttgtcagcttgatcacccgacatgattgcgagcggacatctggatatgctataagttgggtatgtgagtcatgctggccacatgagatgcagatgtaacaaaccaactttagcacccctataggtgattgagaggctcctactcctggttctcgaaccagtaggacgtagcgatctctcgcgccttaacttctgatggtcgaggtacgactacggcaatagcgtagcggtcctcgcaccacgacttcagatgacttcagatggttgaggaacagctacgactagtcttcgaccggcagcgtagcggtcctcataccacgactccaaatggtcgagagacacctactcactggttctcaaccagtcaatcgtagcgatctctcgtacatttacttctagtggtcgagttacgactactatctggtcctcgaccaccggtgtagcgattcgcccactacttccaccgggaatgctattaggcgagcgatcgccctcgctcgcccagggcgatcagttttgcgcacccccccttccctccctccacctctccaccttgtttccttttttggcaccgcattactttcctattttagtaaatttatacacctaaagtttacacatctaaagtttagagaccaaaaatttataagtcaaaagtttatatatccgattcaaatttgaatttgaattcaaatatttatatatatatatatagtatttctatacatctaaagtttatacacctaaagtttatagacctaaagtttataagtcaaaagtttatatacctatttcaaatttgaatttgaattcaaatatccgattcaaatttgaatttgaattcaaatatttttcatatatagtatttctatacatctaaagtttatacacctaaagtttataggcctaaagtttatagacctaaagtttatatacccgattcaaatttgaatttgaattatatcttattcaaatttgaatttaaattcaaatattttctatatatagtatttctatacatctaaagtttatacacctaaagtttatagacccaaagtttataagtcaaaagcttacatacccgattcaaatttgaatttgaattcaaattttttatatatagtatttctatacataaatttttctaacttttatttttcaaaaaaaattgtgtagtctactgtagtagaaagaggagaaggggaggaggaataggggagaggagggaggagtatagggggaggggggcc

SEQ ID NO: 13536 - DNA, 7563 bp, Oryza sativa
gcggggatccctttttacgaagtggcggcgggccggatggacggcctgcgctccaacatggacgacctgccggggaacatgccgacgcccagccaccaagtcccgcggatgtcggagctcttcgtcaagcgcggcctgtcgcaggaggacctcgtcgtgctctccggcgcgcactccatcggcggcgcccactgcttcatgttctccaaccgcatctacggcttctcccagggcgccgacatcgacccggcgctggagccggcgttcgccgagaagctccggaaggtgtgcccgccgcggaaggacggcgacgacccggagcagtcgcccaaggtcagcttcgacggccgcacgtcggagaagctcgacaacgtctactactccgagctgctggccagccgcggcctcatgacctccgacgacgcgctcatcaaggaccccgagaccaagaccaccgtcgatctcttcgccggagacaacgccgtgtggcaggagaagttcgccgccgcgatgcagaagctcggcgccgtcgacgtgctcgtcggcgagggcaagggccagataaggaagcaatgccggctggtcaacaagccgtccaagcagtccaagcccacgtcgacgcggcagtccatgccggcgttgcggccaaagcgcaagaagcctcgcttgggcttgggcaatttcatccctggcttccacggcttcttctgacagaggtgaatgaaattaattaagaaaaacaagtactactccacttccctcccataggctcgctcctatggtttttctttttctttcttcttttttttttttgagagaggagcttttgctcctacggttactactacactctgctgcaactatatgttaaatttcttttcttaaaaaaaacatgttgaattgcctaactctctgcttgtaagatatctacattcattcatatcgttggtttcatagctataatggtgtatcaatgtttgtagtatgggttatatttctctctttacctaagaagaactggtggtttttttttccttttcacttcacgtgtcgcaggttgcaacaaaacatagcgtgaagctgtatttacgttttagttttgcaaatcttcgctggctgcctatgctttaattcctagtattctcctaggtcatgtgacagccaaacgtaccagaaaaatcatcgcaaatatctatctatctattactccctccgttttttaatagatgacaccgttgattttttctcacatgtttgaccattcgtcttatttaaaaattttatgcaaatctataagatataaatcacacttaaagtactacgagtaataaaacaactcatacaaaataaattataattacgtaaattttttaaataagacgaatggtcaaatatgtgagaaaaagtcaaaggcgtcatctattaaaaaacggaggtagtatatattaaaagtctattaaacttcctataaacgctcccaaaccgccaagcggcaccctataaatactcacaagtcgtcaagtggcacctaataaataagaaaaatctaaccatctatttttacatttatttttacttaaattgatggacccattattttaaatggttatatctattttgtaaaaagaaaaaaacacccgaagccaacatccgaaccaacgtacatactaatgaacgtacgtatatactacacgtacatcccatctgttcattccttattttctattttaagaagactaaaatcaaaattacttttacaggcaaaaaaaatcacaaatagaccaacaactaggcctagcagctctccctctgtcactttaaaaatcctatgaatgcttctaaatcgctgcgtggtgctattaaattagagaaattactagaactttttttttaaaaaaacacaaagcacctgcccatcagtttatacttaaatggatgcatttaggtggttatatttttttaataaaaaaatcccaaacctttttccttccttccttccctccccacccccgtgcggtgttaaaatttattaaacattttataaacacatctaagctactatatgacattcttaaattaaataaaatcttaaaaattttagaaaaagattattatatactaagagtccattaaacatcatataaatacttctaagcctccaagtaacaccttactgacgctctcagaccgccaagtgacactctaatccgaccgtcgatttttatttaaatcgttggatctattattttatttttgaaagttagatccttttttttaaaaaaacacacacatctaaaacctccccatcacgtacgtaccaacgagctatcttcatgagaaattaaaataaatattatttttacattgaaataccacaaaatagatctctactcgctaggtctatcaactctcgctctgtcattctaaacatcctacaaatgcttttaagcttctatgtggtgctattaaattaaagaaaatactagagaatcttaataagaaaaaactcttagctgctatatgacattcttaaattatagaaaaatcatagaaattttgggaaacaacatccaaccatcggatttgacataaattgatggacacattattttcaatcgatcgactcattattttaggatattagatctatttttttttcaaagaagaacacccaaacccctttccctcctcctttgcagcatccggtgttgaaaatccactacacatcttataaacgctcttaagatgttacatcattctcttaaatcagagaaaatcctaagaattctgataagaaaacaaaacatccaaccatcggtttcgacataaacatctgacacattattttagggtgttagattaatcatttagaaaaatattccaaacctccttcactcctgccagtgtacagcccgtgtacagcaagcaccattcttttctctctttttttatctcctaaacaattaaaattaaaattatctttataggcaaaaaaaaacataaatggacctccatctattacttatatcacgtcaggcatctaacgactttctaccaacttaattaatttctcttaacatgcatataagggctacgtgcctatataaattgaccttgatactttgttgttggatttaaaacccattcttaatagaaaagttcaaatatatttatgaggactgttagaatgaaaagtataaaattttaaaatacaatcaaataaaaaaaatgatattattggatttttttttggttgtaagatatccttctggcgagttaaaatactctaaattttctaatagcaacaagctccatttttttccagataaggaaccacctccattgtttcgacacaataatttcttattaattcaaaactgcatgatctcaagtaattttattttaaaatttacatgttgcaagagtaattataaaaaaatgccagcgttcgaagaacacaaaataagtttaattttagtttagaatataataaaaatatttcaataaaaaccccgcacataaatatccataataaaattttactcacattatataagaaggtgcctgcgcatgtacgcaggctacctttctagttgaagaaaagcttgacaacaagttgcaattagctgaaaaatcttgacgagaggcatggtgaccaagcagtcacaatgcagctatgctaaccgatgcatcagcatcaggctatgatgcaagatctgacggcgaggaagaacagaggaatacgcacaagatccgcaatccatcgcatattgtgtgtacaatctaggacaacccacacgcacagcggcaaaaacaacagaaacacatgaaaataacacatctggatatggggtagcatgctctcaacaattcagataacatgtatataaaacagaggacctgttctaaacagaggttggaaacgctgattaacaagtactacgcgaactctaaagtttcacacaagatagtcctcagatgtactacgcaatatgttagagacaagataaacttctcatcttgatggaagctttactggacaaaattctgtaggagcaaaagctgcaagggatagtaagtgaactacgacttcaatgcatataagatcataggcaaataaaggccttcccaccacagaggatgttactatctacagtgacaagtcgccacccagttcatcaataactctctcgagcttgaacaacatatctaagaaaagcaaaaagaccagatcagtagaagtgtgtggaattcgattagaaagtttctaaattagcatttagcaaaatggaatgctgagaaaaatgaattagtttcacgagttatgaaggaatagaagagcctgacaaatgtatctaagactagcaaaagcgctatagaagcatgtgaaaggcagattagtgagtttccagagtaatgtagcaaaaggaagtgttgagaaaaccgaggaatataaagcataccatggaaggcgccatcagatatatatgtctgcggcggaacaataatatatattagaaaatatagatttgcttatcaaatttacaagaaaacaaaacagtcaagccagacaattatcgattggatagatacctttatccttgtcataatatcacttgtttctctattaacatcaatttcgttagcagaagttgtggaaattgcaactgcacaaaatactgattggtcagggaaagaggacagacttttccagataaataagtgggaaatgagattgagactgtgtgtaccattatgggaagtatctaacatagacacctgcaaaatttaccaatataagcatcatttcttccaataataacattttgcaggatattcataaatatagtcacaaatacctcttgtggtgcatggtccgttgcagttactggatatggttcctcagcatctggtttaatatgtgtaaaaaatgttgccacaaatgaacaagtagaaataaacaaaaaatactgcaattgcaatgaatgtcaccaaacagaaagttgctaacctttctcagttttacatgaaaattgtgtcagcatatcagtgaaactgggggggaaaccagagaagacggtatcaatgttggtagcaaggagaggttgaagaagaggctcttctggtgcctcatggtggcgtaatgatggtgtctcaggctggcttaatgctggtgcctctgttctgtggataggctcatctggttctgcatggtagcctaatgctggtgtctctgttctgtggacaggctgatctggctcctcaaagcttgaagagtcgggtgttacttaatactcataacagaaatatattccacaactaaaacttgatacagttccactatttacctttggtgaattccactagaagcaatatattcagatgctgatgaatcttcacaaagatagtcacttccagatggtctgatatccatggtttcagttgagcattcctttgtaaacaaaccatatagaaatgcatttagtgcttcattaacattaaacagagcataagtcaagaaaatctcaaaattagtaaatagaataaacagaaaataccattactgtagtatcatgaattctatagctagcagtactgaaatttcaattgtatgaatagtaactttcaccactgtgatttcatatcagtaaactagggtctagggagctaacaaatttaagagaatcttgaagagaactggaatgtcaaaactcagaagcatcacaaatggttttatctaaccactataatatccagtagtcatgttcacacattgaacagaaaattacaatcaacattgatgaagattacaggttacaagatggaagtatatagtttaaaaatgggtagcgagtggtggtggactggtggtaaacacttgagcaaaacactattaggaatgatgagttaagagaataggcaagagaggtccatggaatattcatacaacataactatgaagaggtacacattgttggatgacagatataggaaattgcaccttaacacaatttaaaaatgattctgcatcactgagatgtgggaaacgtaaagcaaacttctggatctgtagagaaataaagtgcataaatattttggccattaaaaatgtgattataaaggttgtacaggttataataaatgcagtaaatatttgatggttcaagaaaacttgcctgtttggacttatcacaaaagctcacaaacaccactctgctcccacttattgggcattgtgtcacacatgtaacctgaggccacgaaaaattgagaatggacacaaaatgctcctcctgtgccacaagcaagaaaaataatgccaggttatgaaaagggagtatatagagaaacaacaaaaagtgtgcaaaagtcattctgcaatgtcacaaggtttgcaaggatagttgtggcaagataaaccaatttactgcccaggagtcgtttaggtggataacctttcccaaatacttggtttgaccatacattaaaatggaccactctaccaatccgttttcttgtttttgacaggaagtatcctataattctgcaacttctcaacataacacagtgtattaatcgtgtacagcttgtaatgaatacacatttagatgaacaatggaagagtgtagaaatgccaaggcctaatctaaacgtcccatccaaattacaaaacaatcagtacaattacaatcatttgctttcagttttcatggtagtaaaaagaaattaaaatcaaataaaaaagaatgaaccagcacagtccattttgtatcttctagtgaaaggaaatcgcattgttgattcctgtaataatacattaagggcacacaaagaaataagtatccactttgaattgcccaaagactaagtagcatatgccttccctgaagtatatttcatacttcttaataactagagatagataattcacagaatacacgatctagggcctgtttagataggaagtattggattcgatttccaagactaattcctcaagattataaaaagaatgaaatttcaaatctgatcaacaccagatataatcacaatgaagttacaaaactagttaaacagagtagaatgatccaaagttttatgtttcaaaaccaagggcaggagcttggaatagtccaaactacattagttggagcttgaatgccaaggaaaaaccaagatatgcagtaataattaaggaaaccatatgagcacaaatcactacctcccgcagatctaaatcttgcacggctaacatttgccacgtgacacatgccaaaagcatccattacttcatttgtgaagaaaaatacacatagcatgcgtagaccaaaataatatgataacatgcaatttgtcgcactgattgtttcatgaaagcattcatggatccccaaaacaagtggcggagggaggggggaagcaagcagggcatggcctccctccccacatgatttgatacctcctatgttaaaccagctccctcatatcaaataaattcaggatttccggctccgacacccacaatagaacacaatacacgctaattaagccactccaccaaaa

SEQ ID NO: 13537 - DNA, 8943 bp, Oryza sativa
  unsure (1)..(8943): unsure at all n locations
tgatgttgataacgcattctctctagggagggctttgtttgcagttaaatcctatttatgctgtcatggtgccacggtgggattcagatggttcaggattgttgaaagttgctgatgaagactatacaatccacgtctcaagacacttaactttctctaagtaatatcgtgaagtcttctggcttcatcattttatgacttcttgctacgagaaaatttgtaatgcaaaacatttcctattgttgtctgtagggaaattaagacatcaaatatatatatattttgcataggtctgtcctgtggggaaattgtcttgtttctattgacccactatcgggaagttggggtagtctctctgttgtagattagaatattcttatatgttatgctaagtgtaaaataattcaatgtagggctgacatgctggtgtgtggggtctcaacccagattacaatgagcatattatggtcatgttgagaaaaataaggaattgctgtagcgcatgctttttttcattacaactttctttttttcctactcatatatgtttgaatatgcttttttactattaggaattgctgtagcttatgtttgaatatgtttcaacaagagaagcgtatgtaaaatgtgaggaaaagaattggtactatttcttagcttatcaaaagccagtggatctttgttaaccctcacaatttattctgaatccctgcctactccatcaaaccttttatttctttcccgaggatgtatatgcaattaatgttggaaagtgtgtatgaaagtactttgttttctgctctatatgaattctcgctgatggcagcgatctacttctttcgtctcaaattagttatcttaccatttaaattttatcccataatattttgtcacttgaaaatattacttgttccatcaatcacatcttatttaaatttaaccactcttctattctcaactatattgtcggaggagtgggagagggtccccacttcatcggatgcttgggatgccatggaacccaccatgaaaaaatagaaaatgatgtaggactccaagtgttacttgagctgacgaagacggtccgtgggcagcagtagctcgggagcatgtctttcctacctcggtggcccaatgactactgcaggtgggaccaaggcccagaggacagtgctaggacccgaggtcttctagggaaatctcttttatgaaggggatttgactcggtcctatgcgcatctgtattaattatggggtgttacacatcttgtgagtagatcatggatgacatggggaacatggttatgcatgctatgtcgccccgaagaaaaagatgggctacgcgacgcactctcagcaagcattccacaggccctctcttaaaagcatcgatggctaatgagtgggcccatcgacaattgggatgaagactttggtagatctacttcacatgttagctggtagggagccaatcacatccgactagtctgtttggagagacagtgataagatcaagtatatcaatccctgtggggttggaccctgctctggtatacatgcatgaatgctgtggactccctttcacgtataaaagacggattcatgccacatagaaaatggttagattgtctggattaggctaagttagattcaaccctcagactcaatgaagaagggttcattatctccttgttgaagtaaaggtttatcctctcccacttagcacatcacaccaacatccattgtaaacttgatcatcatcacatagtgaaagaacatggagtaggttgttacatttcttaggggccctaacctgtataaaaccacctgttttcgcttactcattcacgtgccccaaccacgagcttggaacttataccctgacgaactctcaaggatggtatcttactttcccgctagaggagcttcttgcttcgacacacacattatttgataagggcattacagtcttttatttcaagccttagtatattatgccaaataatacagaaagaaataatttggaacgaaagtagtacgtaaattcgctgatctagctatgcaactacaagtacaataacttaatcattgcatcaaacctaatattgtcatcaattgtgtcaagccgtcattttgaatttttttttactaggcgaataaagcacgtggcaagacagagataaaaacaattcgattattggataggtaatttctgcaaagggattataattgggctgtgttcttttggaggtgttgggaacctctctcctccacacatgaaacagagtgatggattaacacataattaattaaatattagttatgaaaaacttgacaaatagattaatatgtttttaaagctactgttttatataattttttaaattaaaaaacgcattgtttagcagttttggaaatgtgtgcacagaaaacaagagtggtgagttgagaaattaggataaagaacacatgtcttgtacattaaaaaaagatgaggatgctggttgtggctacgactcacgatactggtatatatgattaaaaatatggtacacatgacaaatgacataacaaatcaattaaagcaagttgagcatccacccaaatagcatctgcagactgacatgtgggcccgaggtcctggacccacatgtcagtgagcagtaggaccgccgtcccttgctaatacatcaaacttggttgtgatttccttgccccatctaccaccgtaaaaggacagctattttgccttgctattatcagcggcatcaaggatgtaaagcatgtgccctatggggatgacatcaatgatgcgctactacaaagatgccaccgcctgaattcatcatcgttctagaaggctttgaaagcaaactgacatggttaagattgaaacgacatagcttagctatgtcttaaaacctatgacatgaaaggtttcgcatatggtttgcataggtttaatctggctagccgtcaatgctttttatgttgatcttattttcctattcatgctgtcttaatttgattacattaatcatccctttatcttttcataaaatctgtttggcatttgttgctgattcgttttggctaggagaaagaatatgagatgatacatttcgcttagactttagatgtccgaatctacgcattatcgtattatcatcattttagttggtactctgaaagttttacaatacatctctaaaatcggtaaaatgtttgtgctgcggaaggaattctttcgaaaattactgccatcggatctggatgtcgcgctgaggtgtgggtaggccaattcgggcgctggatccatcagcagccccctgagcagatttacgtcgcggtcgcggtgattgccgtgacgattgtgttgctgctagcaggtgatgtatcgattcatgccctagttactctagtttttcttgctttcaaattcaatcccttcgtccgatcctagatggctaggtggttgttggcaattttttgtgacaagttgacaactacgatcgtagcaccttatgccttgcggtgatcctagggtcgccaaccaccttgatctagcaaagagctagacctagatgggttttgacaaataaaccggctagcggagccgattctagataactacccgtctcgtgggcaaaacggaaggttttcaggacaaacctacaaagagatgttgcactctcgcaacggcggcagacggtttacggcgcaaaccgacaaagatggacaaactaagagaaaactaaaagcaatatgaaaaatgattcgattgattgattgtagattggttgttacaatagaaccggccatgtcccttatataggggttggtcttgccctcgacaggcccttctccatgtccaactcgggataaaagccaaagaaaacccgaaacatgtcttcccgagcaaggaaacctcgagacccgatgaaagacagtcggactcggacctgccggtcagaccggtcacacaccgccggtctgaccagccctcaaccggcggtctgaccgcccaatacacgatggtcagactgtcccactcgaaggaaaccggtagattttcaaattttagcaatctttcctattttaatcctaggtgccaaatttgggtgtaaacacatgccccccctgcctttttgatgaacaacgtgaatctaaaagcatagaacatgtttttggtcttagggcgataatccaattaccggccatagtacctcctaagcgtcttgctaaacgctcgggaagtatttcttcaagtatttcccgttgattactcgctgaaaatgctccccttgaagtgtctccaaaaaatatgcgtttcctcgaacaatgccgcatactcgataaggaccctcctaactaggagaccacttaccgaactccctagatcgagtacccaaaggcaaaattgtctttcaaaccaagtctccaacttgaaacaactttgctttcacccttttgttgtacgccttggccaccctcttcttctctttctctatctcttccaaagccttcaagtgcttgttgatgacttcatgaaagttgtctcccatcaacgtcttgtaatcttcacttgacaaatcatcttgcttgatataacgaagagaaccaagatttatctcaaccggtaaaacgacttcttgaccataaaccaactcaaaaggagtgactttagtggcaccatgtttagatatcctatgcgcccacaatgcttcggaaaccacttcatgccacctttttgggtgttcctcaatcttttttttcactagtttcaacaatgtcttgttacttgactcggcttgtccattagcctgagcgtagtaaggagaagaactcaacaatttaataccataagattcggcaaaattcttcacttccttaaacataaaagaagcaccttgatccgtagttaatgtttgcggaataccgaatctatggataatatgcttcaaaataaagtcaattacctccgtatgagtcgtattcatcagcggcacggcttcggcccacttggtgaagtaatccgtagaacctagcacgaacctatgcccctttgatgacgaaggataaatttgaccaatgaaatccaaagcccaacctcggaacggctatggtttgattatgggattcaacacggcggcgggcgccaattgaacattgccgaaccgttgacaagcttcgcatcccctataatatttgaagcaatcctcaatcatcctcggccaatagaaccccgctctcctaagcaaccaattcatcttgtgggccgattgatgagttccacaaattccttcatgtacctctcccatagctactttagattgatcttcatctagacacttcaacaagactctatctatattttggtgatataaatcttcatcaagcaatgtgtatttgaacgcttgccgctgaattttccgatcaaccttaagtgtgggatctttcagatatctaatcaaaggaattctccaatcctcctctgtttcctaggcacaaatgtccgaattcacaattaattcggcctctaaattgattgaagcgtgccccccaacgctctgcccagaaccggtcagactggccatacaaggccggtcagaccgctcggggtcgccggtcagaccggcgggatgtggccggtcagaccgcccctagtcaccagtgaactgcagagatatagcctagagggggggtgcataggnnctttcctgaaattttctcaacaatcgcagcggttaaattacagggcccggaacctcctggtgaagaacaccggaacttcctagcaatgatgagcagcccggaacttccggagttcttgcgtcaggaacttccaggcaacagagaaaaatgaaatcagggaagtaaaacaggtcctagctagagatgatcaggcacagagttgcacaagatgtaaatcacaagataccagcagattcaaacacagatcatgcacaagagagacaaaggcgattttttcccgaagttcggatcacacggatcctactctcctttgaggtgctcaaagagccgggtctcgattaaccccttgcctcacttatgcaaagatccgagaagaagtccacagccttcaactcaacacttctaggtcattttctagaattgagtgaccaccaagatccaactcacaattccttctagaaaagaccacaagtgcaagttgctctacctaggacaacctctgaaaactcagcacaagaatctttactcacttacctcgtttccttgcggaggtgaggaaaaccttcacaaactttcccgggacatccacaagatccttggaagctcacgggcgacacctaaccatctaggagaagatctccaagagtaataagcccaggtgatagcccacaaggtatccaaagtgctcaaacaaacctaatcttcaagctatctccaaaacactcctacactctaatctaatctctcaatctcacaagataggctctagatttgagtggaggaagcaaaggaagcttgggagtggctagaaaaccctagaacatgaaagagctgaagtggaatggccaaagggtgacctggggacgaaatccatatatataacggctaggtgacgtcatctagccgttactcacaagtttaaactggaaacctgccaggaggttccgggcaaaagtgccaggaacttccgggcaacacttaggaaattttttgcaatgaaacggtgcccggaagttccggccagaacctccgggtagccctctttgtcccggggagaaaaaacatttttcaaaaaatgattccaaaaatattttgactcatggatatgactaagagcactttgtataccctagaaccacacttgaaacccctcttaatagtacggtttttcctaaactcaatttcgaaagtgaaaaacctagtctaatcaccttcggtgtttttcgcacttaggaacattcaaattggggggtctccttgcattcttagccatcacaacttgctttgggactaaacttctgtgaataaacttgataaacacgttagtcccctttaaccaccttgtcattaatcaccaaaacccactagggggtttaagtgcatcttcaaccagtcagaccggccacgcaatgccggttagaccgcccctattccccaattttgccaatttcgcacaaagatttgaaattaagcaccggctcttctaataccagaaataatcccttcttcacactatagccagatgcctattgtgccaagtcatttgctctagaattatcatgcctagcaatatgtctaatagcaaaattatcaaaattggcaataatatccaagcatgaatcgatatacctatttagtgatccgtccaagcatttataaactccgacgacttgttgcaccaccaatttcgaatcaccaaaagcttccacgtacttagctccaaccatctccatgacttgtgtaagccgaataataaagcattgtattcggcttgattatgtgtacaataatattccaaacgaaccgatgcttcataacacatgccattaggtgaaaacaaaactaccctatgccttgaccttctttgcaagaagaaccatcaaaataaatcttccaaggtataacttcaactaggcaaacctcttcctcataagcaatatctacatgatggtctactataaaatcacatacaatttggcctctcatagatttcaatggttcataagccaaatcatattctatcaaagcatatgcccacttgccaattctcccacttagaattggcctttgcaacatgtgtttaataacatcggcttgacaagcaactatgcatgtactagataacaaataatgcctcaatttggtacaagcatagtataagcatagacaaagtctctctataaagacatacctcgtttcggcatccaaaagacggcggctcaaatatgtaataatatattccttgccatcctcctcttgcgtcaaaacggcaccaatgactttgtcttcggaggcaatatataaccaaaaaggctttccggctttaggcgcccacacaaggggtggagtagataaatacctcttcaactcctcaaacgcttcttgttgttttgccccccaagtaaaatcggcttcccttttcaaacgaagtataggaacataagcatcgattttacctgctaggttagaaataaatcttctcaaataattcaccttacctagcaacttttgaactcccttcttgcatgtcggtgctttgaaatcacgaattttttctatcttcttaggatcaatctcaactcttctctcatgcaccatgaatcctaagaacttccccgctgacacaccaaaagcacatttaagtgggttcatcttcaaactataccggcacatcctctcaaaggctaacatcaaatcggctatatgtccctccataccatccgatttgacaacaatatcatcaatgtagatttctaagataatacctagtaaatcatggaagatcaaattcattgccctttgatatgttgcaccggcattcttcaatccaaaagtcatgacaacccactcaaacaaaccaacaaatcccaggcacctaaaagccgttttgtgcatatcctcctccgccataaagatttgattgtagccgtcattaccatataaaaaactaatcaccttatgacccgaggcatcatttatcatcatgtcggctataggcatatgatattcatctttgggagtagctttatttaaatctctaaagtctatgcaaactctaatcttaccactccccttcttctccaccgggactatgctagaaacccactccgcataacgacatggcataataaaccccgccttcaacaaccgatcaatttcctctttgactcggtcatatagcaaaggattaaaacgacgaggtggttgcttataaggcctaacacccgg

SEQ ID NO: 13538 - DNA, 10635 bp, Oryza sativa
cacctctgatcagagtaaaactattcgaatagccgtgcccgcggttatgggcggtcaaccagattcaccgtgattagtctcaccctagcttatttgaatggaattgattagttcaagtggatggttggcctgttgcaacgtggtgtagcgttcaacagtggatggttaatattgattaattacttattactacaactgttttactgctttcaactactgtttataaatgctcgctttatgcaaatgaaccgctctagctatcctttggttatatcctgcatcataccccctgttccggtatgacttgctgagtacagtgggtagtactcagtcttgctctattttccccaaaaccccagagtttgagtatgcatcagatggtggcttttgcgaggagtaggcttcgtccgtgccgtcgaggatgcctgtggagtggtgttcccgttgcagtccaagtcaatgcttagcttcagttatctttttttttccgctgcatttatgtaagacttttataatgtttgtaagacatggatttgtatgtcaactttgtcgtttgtgtaccccggccggtcctggacgggggttttaatgcacattctgcttggaattctattcgggaatttctgggcgtgacacaagatcatctcctagggagcgatttggtcattcaccaagacggctgggatcgcctacctataatcatcctcaagccatgtcatggggatcttatccaatgccgccatcgggttatctttttccttactacatgccgtggggggcagcaccgccaatgttcaatcatatgcctccaatgcaatttaatcaaggatggggaggaccaaggaggccaacacgtgagtgtttgtcttcaccaaacaatggccggttttatgctaaaaatcgggtcaatgaaggaaggagggaaggaaagcgcatcaaggtggagactaggacttcggaggtgattactatcaaagtggggtctcatgatgagccaataccctctagagatgaagttggagagtcttcaagcaacaaatccgaagccaggactagctcgtcgcagtcggccggtctgaccaaccctcctggccggtctgaccgcggccctacggccggtctgaccaggccaacaggccggtctgaccaccggtctcaggccggtcggaccggggcctccgtccggtctgaccgttggtctccgtccagtctaaccgggctccagtgccggtttgatagttgatttgcaaagggtagctcgggggcttcgtcgtcttcaaataaaatcaacaggggacattatttacctcctggaatagagccaaaacaaagatggatgcctaaggattagacggctacccaaaagaggaggttgcaatgtctgcgggcccaagaattaaaagagaaaggggctgaagaacggagagataggagattcaatgagttgcgaccgccacctacaaagatgtggaggcgtaagtccatagaagttgaagaatcggttgttgtgcaaagggaaaaggaagaacaatcggttgctaaagatgaaacatctccaaaagaagacatggatatcaacatggtatgtatgttgcctatggagctttgtgctatggatgaagccgaggttgctcaactttcattaggtcctaaagatgcggtttttgaaaagcccgatcaatcaaaccgtcatatgaagcctctttatctcaaaggtcatattgatgggaagccagtctctaggatgttggtggatggaggtgccaccgtgaatttgatgtcatactcgttgttcaagaacttggggcgtggagatgatgagttgaagaagactaacatgattcttaatggcttcaatggtgaaccaacggaagcgaagggtatcttttcggtggagcttaccatgggaaacaagacgttgccaaccgctttcttcatcgtcaatgtgcaaggtaattataatgttattttgggtcgttgttggatccatgccaattgttgtgtgccttctaccttgcatcaatgtttaattcaatgggacggcaatgatattgaaattgtttaagcggatacatcggccgaggttgcaatggccgatgcaacatttgagtggcgtcatgggaatattcagtgcttatcggggatggatctttctagttatgatttcattagtatttccaatggaaaatttgtacctatctctgtaaagccggctagcttagcacggctaggccatatcactttgtacaatgagtaaagaagctaatttggagtggtcgcaaaagagggtgcaagaatatcggtctacaaagaacgatattggtgaaactattgaagattttgatgaagtagaaaagcttggtcaagggttgtcacgcccggaaattcactagtaatttccgaactaatttgtgcattaaatcctcgtccaggaatcagccgaggtacacaaactgacaatttaatatacatattcatcaatataataacgttacatacttacaaaagaaaaggaaactgcagcggaattacggtctagcgaagcaccggctccactcccacaggcagctcaactggggtataagccaaacgtcttctccttcgcaacttgtcttcaactgaggtttgattgattattgcaaggtgagcatatgatatattcagcaagccacacagcaaatatacaagtgcacaaggatatcaaagaatggtataatatagggctcatttgcaaaagcagcatttagcaaacaattgaggattgtaaaactgtaaagcaattaatcatcaatattaatcaacactgaacagcacacccatgctgcacaggcccaaccatcctgaataaccatacccagctgcacagatctatctccaaactagaaatataccattccaaaccaggagctaaattaattaccatcaattaccacattattattaatgagtagtgtgggactaatcacgaaagacattgttcgacccgcctatgaccgcgggcacggctattcgaatagttttactctggccaaaggtgtaccactgtacccacaagacacaacccaccagcatgttaccgtgcccggccagacatgtcaccatgttgagtgattgtgacaagacccctcgcatgactcaacccaaagcagtgcaccgttcctggatcgtagtcaccccctcaaaaaccaaaggcatggactccccagcgacccccgtgggcttatctccgccacttctcagtctggtgctccgcaatgagccttgttatgcaaactgtccagccgttgcccattctggcttgtggttggcacggttaatgtttcacaaccgaaactcgtgaaccagtccttaattgtcatgagcactaccatcaaaaccatgtgctcacaacccaccattatcaagttttagttggcacattaattaataaaccaatcacgattgaccatcgtgagctatcattaaatatccataattaagtaatagtgaaacattagttatcccaattgtgtgctaatgtttctaagcatggctaagcaattatgtctaacctctagctgaaccaatatataaagctcaactagtcaaattataataacccaaggtatcaaggaatagagtaatcaatgcaaactggctctaacaaaggaataagttcacaccacccggtgacattcgaaaataaatgcacaattgaaataaatagagaatttaaatataggatcaacatgttcaaaggaattgtgtttgggatctgtgtgacttgccttgtaataacgggtcttcaattaatcttcttaaacacttccagcacactcgcgaaccttcgaaacgacggaaacgacaagctaacacgcaaaacgaggaaaaagactaataaaacccaaataaacagtacataaaagtaaacaaacatgtagatcatgattttagatgaatttagagacttaaacggcctcattccgatttcatatgaattaattatgatttttacaagatgtaattccaattaaacctattaaagaaaagactattccaaattaattaaaccaattacagatgatttataactgagataaaagattaaagcaacctccgaaaaagattagatcatatttggtagatgatatatattaaaaaggaataatatgccattgaaaagaggaggggatttatatcgattttgggcggctgagattaatctcgactgagtcgaccaagatcggatggcttgaattgatctggcaagcgagccttacaagataccaactcaacgagtcaattcgaaaccagcgaacgaaaccggcggctctgaacggctctaaactaaaggacgactccacacggacgaacgaacgaagcacggggaacacctcgttcgaacgaacgagcgaacgactcaacaaaggttgcggctaaaccggtgggctaaacacgattcacggtaaagccccggtacggcaaacgataggccggtaggaacctagggttgcacctacggctagacaactcgactactgagcaacgggctaaagcggcggctaggtttaagtggcacacagctgcgacacggcggcactaaggcgacttggctcggctaggtggcggctcggcggaggcacgcggctagggttaggatgacggcacagcgatgactactcgacgacaaaaacgagagattaaaaactaaaccgagggaacacggatagaagtttcaccgaaccaaagcgatcggagaggaagggtcgacgatgacggtccggcggcaacacacaaagacgacgacgatgctagacaaacaacggattagattgaatttgatctagggtttaggtagacgtggcaatgataagacatccaagcgagatcaccggataacggacaggggaacgacgatcaccggcgaactacggagcgacgataaaagggaggataccgggagaaagagcgcaaggcgacggtccttaccaacacttatgcaacgacagaccgcgacggaagatggccagcgacaagcttcgaaaggcgacgaggtactgtccacggcggcgacgactttccggcgatgagtggcaacaacggaagggtggctgggcttcacttcgcagctgcgaacccaatggagtcaacggcgaccgaaagcggcggctaaggcgggtgcttgctgcggctggaggcacagcgacgacggcggcgctccggttcacgatgacgggctaccttcggtgggatttggcgcaaaagaaccaatggccggggtagagctcgactttgcggagccgagggaggcgacggcgcaggtcggggacgaccgaggagacggcgcgacgtggctggagcggcggccggcataggagagagaaagcgagctcggggaggggcggctagggcacttcgaaggacgggacttgaggggataggtagaggacgacgagggggtcctttatataggcacgcgagctcgggtccgggcccaaatcgacgggaaaaaactcgggaaagtctagggttctcgccggagtaaggaaagattgaaccgcgaaattggaaaggatttccatagaaacttttggggatttcttgggaaaattgtagaggagattgagaggattccattctcgcaactaatttggaaagaggagcaacgaggaggttggatttgggaaggagatcggcgcggctgcacaggctcggctctgtctcgaggtgtctggaggaggaagatgatactgtagcgacaggaaattagacttttggctgggctattacacaacccgacagaaggagagagaaggggagggaatgggctgaattcggcccaatactaggaaggatgattttattgcttttccaaataaattaaccaatgagatgatctttcaattgttaaaaatacttccaatgctcaaataattccaataaaaatattgaacatacttggacactcaaagtatttaatataataatatccaaataatttaatgattaatttattatttaaataattactgaaatgttctttgtattattaaaattaataattgagctctgaaaaattcgagaacattccagagagtataattaatcatggagaatttaataaaaattaaatccaaccatgctttaaatttaggaaattttatttcccacatttaacttcacttgtaaattaatgaacatttaatataaattctattaataatttattaaataatttataaatcctaaaatgaaaatcaggctgtgacaagggtttacatcggccgatccattggaggaagtagacataggtgatggaactaagccaaaggcaacttttgtaaacaaaaatattaaagccgattataagattaaaataatcgagctacttaaggagtatgttgattgctttgcatgggagtatcatgagatgtcgggtcttagccgtgatcttgttgagcattggcttccaatcaaaccgggttttaggccttataaacaaccacctcgtcgtttcaatcctttgttatatgaccgggtcaaggaggaaattgatcggttattgaaagcggggtttattaggccatatcattatacggagtggatatctagtatagtcccagtggagaagaaggggagtggtaagattagagtttgcatagattttagagatttaaataaagctacttcaaaagttgaatatcctatgcctatagccgacatgatgattaatgatgcctcgagtcataaggtgattagcttcttggatggtgttaacagtgaaatttggtaagcccggagtagtcatcggcttagagtcagcatcggcttcgaagtcctgagattagccgatgagagttgtcaaatcgtcagttgtcggattcttgctatattcggttaaggaaattgatctactaaaggaagcttatccaaaagagaccgagttcaaagagaatgcggcatggcaagttatctattaattaggaatagtttgttagtttccttttatctttaggaaagtgtgttatcttttccttttatctttaggaaggtttctttcttgtccgacaaggacttgtatcaacccatgggtataattatgtacacccggggtctatgtaatctatcttcacgatcaatacaattcggcgcatcgccaccttttaccctttctactttatttttatcgtccggcgggacttggcacctgacgcggggctgcatcggtgtttgatctccggctaaggggtaagtccaatgttccgccggcccgggcaattgtatcgtttacgtcggagtcgttcaaggctacatcagtacattcgacctcttggattgctctggtttggatgatatatttgcctacctatttatcatatgtctctattaatctagtcttagcatatcaatttagctctatcggctgcttctcgttttagggtttctgccggtatcggctaaatcgtgttgctagattagattagcttagacatctaccaccctgaaaactcaatcaacagcttgattgtctagatattatgtttcttttcatacttagtgctgcatcagttaagtttgatctactaagtcgtgcttagaaccataatctctagcctgcttcttgattgccaataagggtttcatcggggtttcagtcggtgagttatctggacgttgcatcggctcataaggattgcatatacatataagttggatttagccgatgacaacaaaggtttcactgtttaatctaatattgtggatttcatgacatcggacctccagccaatgtgtgctgtaaccttcggatagatgcttaattatcatatcattagccgattggtttatactggattatattgttattttattacatcatcatcagccaattgcctttatatcatcatctacattggacatatagccgattgcttaaaccatattgctatcggctggtatcggcatcggctattatcggctatcggctggaactagtccatcggcttgtcagccgatcgactgtttaatctactatttgcatatcttgtcagttgcaggatcaaactgattggcacgcctacatctcatcaagatttggacctgcacaggagctaagcagatctcccaggccgatgtgttcaattttttcgtcaacagatggtaatgccggctacaatcaaatctttatggcagaggaggatatgtacaagacggcttttaggtgcccaggatttgtttgtttatttgagtgggtggttatgactttcggattgaagaacgccggtgcaacatatcaaagggcaatgaatttgatcttccatgatttgctaggtattatcttagaaatctatattgataatattgttgtcaaatcggatgacatagagggacatatagccaatttgaggttagcttttgagaggatgcgtccgtatgtattgaagatgaacccactcaagtgtgcttttggtgtatcggcggcgaagtttttaggattcatagtgcatgagagaggagttgagattgatcctaagaagatagaaaagattcgtgatttcaaagcaccgacatgcaagaaagaagttcaaaagttgctaggtaaggtgaattatttgagcagatttatatctaacctagtgggtaaaatcgatgcttttgtccctataattcgtttgaaaagagaagccgattttacttggggggcaaaacaacaagaggcgtttgaaggattgaagaagtatttatctactccacccttgatgcgagcgcctaaagccggaatgccgtttcggttatatattgccgccgaagacaaagtcattggtgccgttttgacgcaagagaaagatggcaaggaatatatcattacatatttgagccgccatctttcggatgccgaaacgaggtatgtctttatagagagactttgtttatgtctatactatccttgtaccaaattgcggcattatttgttatctagtgcatgcatagttgcttgtcaagccgatgttattaaacacattgttgcaaaggccaattttaagtgggagaattggcaagtaggcatatgctttgattgaatatgatttggcttatgaaccattgaatctatgaaaggccaaattgtagttgattttatagtagaccatcatgtagatattgcttatgaggaagaggtttgcttgattgaagttataccatggaagatttattttgatggtttttcttgtaaagaaggtcaaggtataggtgtagttttgttttcatctagtggcatgtgttatgaggcatcggttcgtttggaatattattgtacaaataatcaagccgaatacaatgctttattattcggcttacaagtgatggagatgattggagctaaacacgtggaagcatttggtgattcggaattggtggtgcaacaagttatcggagcttacaaatgtttggacgggtcactaaatacgtatcttgatcaatgcttgaatattattgctaattttgataattttgctattagacaaatgacttagcacaacaagcatctggctataatgttaagaggggagtatttctgatattagaacagccagtgcttgattttaaacctttgagtgaaattagcaaaatcgtagaccaggggtggtcggaccgacgttgcacggccagtctgaccggtgactaggggcggtctgactggccgtataccgtcggtctgaccggccaccccgagcggtctgactggccttgcatggccggtctgaccggttttgggcagagagctggggggcacgttataattgattcaaaggccaaattaattgtaaattcggacatttgtgtccaggagacagaagaagattggagaattcctttgattagatatttgaaagatcctacgcttaaggttgattgaaagattcggcggcaagcgttcaaatgtacattgcttgatggggatttatatcgccgaaacatagatgaagtgttattgaagtgcttagatgatgatcaatctaaagttgctatgggaaaggtacatgaaggaatttgtggaactcatcaatcggcccataagatgaattggttgcttaggagagaagggttctattggccgaggatgatcgaagattgtttcaaatattatagaagatgtgaagcttgtcaacggcttggcaatgttcaattggcgcctgccgccatactgaatcctatcatcaaaccatggccgttccgaggttgggctttgaatttcattggtcaaatttatccttcgtcatcaaaggggcataggttcatgctagttgctacggattacttcaccaagtgggccgaagccgtgccgctcaagaatatgactcatacggaggtaattgactttattttgaagcatattgtccatagattcggtatcccgcaaacattgactacgaatcaaggagcttcttttatgtctaaggaagtgaagagttttgttgaatcttatggtattaaattgttgagttcttctccttacaacgctcaggctaatggacaagcagagtcgagtaataagacgttgttgaagctagtcaaaaagaagattgaggaacacccaaagaagtggcatgaagtgctttctgaagcattgtgggcgcataggatatccaaacatgg

SEQ ID NO: 13539 - DNA, 12125 bp, Oryza sativa
cgcccaaagaccaaaacatgtactatgcttttatattcacgttggtcatcaaaaaggcacggggcatgtgcttacacccaaatttggcacctaggattaaaatagggaaattgccaaaatttggacgatctaccgatttcctctgagagggccagtctgaccaccgtgtgttggccggtcaaaccgctgccggtgggccagtcagaccgccggcatgtggccggtctgaccggcagagtccgagtcagactccgtattcgtcgggtctcgggtttccttgctcgggaaggtatgtttcgtgtttccatctgtttctagctcgagttggacatggaggagggcctgtagagggcaaaaccaacccctatataagggacaaggccggttcaattgtaaacaaacaatcaactatcaatcaatcgaatcgttattttgcttttgtttctagttctagtttagtttgtccatctttgtcgatttgcgccgtaaatcgtccgccgccactgcgagagtgcgacacctctttgtaggtttgtcctgaaaaccttccgttttgctcacgagacgggtatttatccatagttctatctatatcggctccgctagctggtttagtttatcaaaacccatcttgatttagctttggctagattgaggtggttggagactctaagatcaccgcaaggcgtttaggtgctgcgatcgtgcttgtcaacttgttacaaaaagttgccaacatgttggtttaaccttatctaggtcttaagtggaaaattttaggatttctaaataggaaaaaagattcaaaagttttagatgcaaattttgttgtccaatattttgggtatgttacaaacctatcccccttaaaacaaatgtaatccccgagaattggtttaggttgtggttggaaaggacggccgcagtgtatgtcagctcactaaaggcaccattctactcgtgaggtccttgccgttggtcccccggtaggtttgtctttggtggagatggtttgggagccaatccgcacccagatgatggaaagctacctaaggtttcgtggctatgttactttctgataacatgatatgatttattgatttataagtcttttcaaacataccagatatagtatatctaacaaacaaattctacctaatgttgctactagctgatcttcccacagtccctccttctcctaaaggaatgggagatggtgataccccttttaagttgtattatttaacttactgcaataaaacaacagaaagcccttgcttggtcgagggcggagcggtttctacttggtagtgtcatgtacagtccgtgaaacatgcaattgatggaaaagtagcactaaagcagcgaagtaattgattgttaggtttcacatcttctctaacatttaaagagtgctcaatcacctctctaggaataccaggcatatcagatggttttcacccatctttgtcaacttgatattgcgaaccactgggtctagtaccgggggtaccgccccgggtggaccactcggtcaggatgatccgagtggtcgaacatgattgatacatcagaccaccattgatattgggtacttcgagctgaactgcattgatttctctgtcgattagcttctgcttcctcttggactcgtaggcgagtgaattgcgagagtgtagatggtaagccctgactcggtttcagtcttaccgtcatacttctcaatcccagtgggtttgaaaccactcggccaattcactcgatgcatgtatctggtgaaggctacaactccctcatcaccgctgtcgggagagtgtcggggtcaatagcggttgacattgttttctctctcgtggtagtgctgattgagagtgttccttaggttgctaggagctagtgccctgaagtgctctgatagtcggaatcagccctgcgatccctgttgtaataaggggctggttgtggtgaccagtcggcgtgtcggccgactggtcttgacgccacgtatgttcatggcattgatgagagttggccctactactctcaggctctcggtaatttgtaggtcgtaatggcggtaggcggctgccgataggggtctgtgttgtagattcgttgccttgccaactgcttccggagctgcgtgggatggaggccgcgaccatggtcttcaccttgttcaagattggcgcgacgttgactggagcggcatctaagacaatcaaggtaacaaccatgacggcattctgttgaggtgtaaggaacacattggtgtcgtcaatgcgtgtttgacctataacctggcaaactctttgcccggcggcggccaactcccgcagtctacaatcttcttcctccttgcgcttgcgctcttcctcttctctcaacgctctaatctgaccctttccacctcagcaattctctaggccatctgtgtgtcggtctcgacattggccatgaaaacgttgaagaagacaggggtgtatagccatcgttaaactcggagctgtctacagtctctatgctggcgtcgtcgatcttgtcagaagagctgaagtagtcaacgatctcagtagacgagcaagatccaagtggctggagcaggacaccgacctccctgtagcctgatctgatttgagccgagactagattagatcgggaactacagggggaaacagatctagatccaaatgtcacttcgagaaggggtagaagtcgcaaggtgattgtatgccggcgtcctatcgaggaggccacgcgaaggagtttttgttgaagattcccccgagcgatttgaagccatctcgaagaaagaaactttggagtagatctcggctgcgtttgggagtccaaatggagccgagtggtttttccgtcccgactggttcgaatccgagtcaaggagaaaaatgttgccgaagtcgtccatgatgaacttgaggctaccgaagcgaaacacctgcccaggagagaagacgaagtcatcgatacccgaaggagaatccatcgcacttgtcagcgagaaaacttgatgcagcccctacctagcgcgccaactgtcaaaactagaattcggcaatacgaaaagtgggttgcgcaaagtatctaaggtggatgggtgatgagacaagggtttatataggttcaggccttctcgataagaagtaatgccctactcctgtttggggattgtatccgttggttgttgtattgatctgacgatcttagttccttatatagacggaggagacaggtttataagatagagatttaagttaatatggtttaaatctcctacaactactttacaatcttaccgaactaggactacacgtcatttccttgatacacaagtaaacataatacccaagtcttaattctttacatattctatatacataatctatcccttataactagtcggatagtgtagccgtgtaggtacatggtaaccataatcttcacaggtctactgggtcttcttcagcttgagagatgcgctgcaagtaagaaggataaaacagtgagcaaacaatctcatcgactaaagacggttccttcttttgtgtgtgtcgtggtgttgttggttatatgcactttgtgcagaagctgaatgctttcttttgcctagtgaaattaccattatctaggaaatataaattaaaaggcggttctatttcactggatgctactaaattttataaactaattcatggcaaccatgccctagtaaaatatttcatctgttgtaaaagaaaatgtgattctctttcaagcagtggtatacgtaaggacagttttttttttcctttttgaagatttggtcagagtgcattcagttgtaattggcacctatacacgtgtgggcctttggatccactgttggcaagctgcaactctgcagtcatgtatcaaccaaaagaacatgtatagaaaggtccttcggtgcaatgcaacacatatgagacagatattagctatggtactactatgtatatatgcacggaagtttacttagaaactaatctgggacttaccggagttgaacaatgggaaaaatgttagtgggaaaattaagcaaacagttaatttcgtagatacccctcaaaaaaaataatttcgtagatatgggagacaatgtttctgttcagatttcaaatgaggcctatgaacaattgataacaagtgaagaaaatctcacatatacctattgatacagtatcttttccctgttggtcgtggcccatcatcaaacacgtgccccagatgagcgtcacagacagcacacagcacctcagtccgaggcatgaatatgatggacatatcaagcttgcactttacattatctccaatgggttgataatatgacggccacccagtaccactatcaaatttggtcgatgacctaagaccaccagaaagcagtaatgcagaataatgagcagactataatactattgttttggtgcaaatcgaaactactatctctagcttatatgaaagaacaatcttctgctctgacatgacaatcaggaggagtgcttactcaaaaagaggggtgtcacagcagacacaatggtagatgcccggggttttggtgttccagtattccctgattacataacaaaaaacacaagaccaaaatgacatggtgtgcaactacacattatacttggattagagtgtaaagcaatcgtacccagtaaatgctctttctgtgcccttctgccgagtaatgtaatactgatcttttgtcaggcgcttcctccactcctcatcagtcagagatgtactgtagttcggtttacctgcctcagaagaaatgaatatttggctattagtgagaattgaaacaattgttggaacctggctacatacagatctggagtacttcagagttaagagcgtatgataaaaaaatatcttcaagccaggcggcattctaagcatttgctccataagaaagcagaacatcaatgcattattctcttaaagatttgctccacattgtgaaccctgaagatcaattgttctaacaaactataaaagaaggagctgctggcatagacaaaatcgatactagtcagctcagtgactcactgcatacaaatgcttgtaaggctctaccaggatatagcaagaatgcacaattctcttaagattaccttagatttgtaactgatgtgtgtttatactatatgttctgtactctgaactaaaacacagaattcttttctttctttctttctttttttttttttgtctttgaggtacacagtccgaaattcacacctataaagaatgtccgcactattgactggtgaatacacttgtgagtaacatataactgtttgaatgaaaatagctaaaaccactcaggatctatgtagctaacttataaaaatgtcttagttgcaaacttgagcgggcaataggggcttcactcccgaattacggtctagtaattttctaaaatgttcttaaatgcggaaagaattagacatagaaacggcctacagcagatcttttaagatcaatcaaactccctccttgtttgcatcgaatgcacatacaaactaatcaccattaattcaatttctatttccactcgcgaataattcccttgcatccaaaggaagcaggcaacaacgggctcccactaggtaggtaaagaagttagaaggtgaagcaccacacggcaccttgggcttgggcttgggcttgaccctgcggcgacggagacgacgacgacgacgacgaagacgatgaagcggcacccatggcacgaacggaggctcgcctgtagctagcacggctccacgccacaccacagcaaggcgccaaggcaggcggcggctgggaggcaggaggggcgcgcccgtggacgtgctctgaaactggaggaggcagcggtagcagccgcgtattgccgcatggccattttcttcggctcgagaggagtcgcgtcgtttggcggacggaccgaccagccgggcggatttgcctctgcgagacagagggattccgtggctggcgatgccgagacgtgggtgaactggatcggcacacgcagaagctgcagcaggcacgagcgttccagtctgcacttcactggaccagtccgtttcaattgccaaacaggggtcgcaactcgcacgcccacgccgccacgatccatcatccggccacccgggctatggattgtgtggcgtatcaaaatttctgtcaccaaattcctgcgtgagctagatgcaaatagaactctacgatcaagcatttatgtcaaaatttgtatggattaacagttttagctcaaaacatacgatcaagcatttctgcaaatgtgtgtgtactttgttcatagagtgaattgcaccagcggtccttaaactcataagcagatttcacctaggtctacgaacttacaaatcgcatatcaagatcctttaacttggtttattgtatcattccggtccaaaacttcattgaccgtggtcttgcccacgtggcatgccacggtggaccatcggtggtcacatacaagtgtagagaccaaccaataggtggggcccactaaaaaatcccttttcttttttctcctccttcctgttgctgacgatgatgagatcctagggccgcctctcccctcctctccaccaacaaccccctatccaccggtgagctagtgagttggctgtcgctaactcgacctgcgcccacgcagggtgagagaggaagcagccgcccggtggaggagaaatgctggaagatggggaattatttttctcatctactccactgacggcaacgacgacggagaggaggggaagaaagaggatccccggccgcttgaggagcctcctcggtggccgccattgttgacggtcgtcgtaaacaaatttcgactgtcaatataactaaaataatagagaattagcttatacttgcaatacatatttgttttcaaataatatagttccacttgtacaaggagaataacatgttgaaggaatttatcaaataaaataaagagaaagtggagagaacctcactcctaagcaagcaaatggataaggagggcccacatgacaggtgtaaccgccgaaaaccgcctaatctgccacaaccgtcattgggacccacatgtcaaccaccctgccaaacttgggggcctattgggctagctcaggttcggccaaaccctagcaattgcggctccagctggccttacacgtgggcgtctaggatcacatgctgatgacggttacgagggtaaaatcgacatttcgcatgccagtaaccgtcataccgaccctataaaaagaggagctcactttacttcacaacacactcaagcaagcttaaattcctcttcatacgttagtattagtattttagtgctaagtggagtagaatataatagtattcggagtcctcggagtcttcggaagagttttggtatggctcaagcaacttttgtattctcttctataatactttcgatattaatgaaatactcttctatatatatgttgggttcttactttatatctgtggttaccaattgtgtgggtagcctactagagaggtgcaatggtgcgggtttaatgtctaatttatcaattgctctatgtcatgtgcacgggtgtagagtagtatttagtaatgtaagcatcgtgcttagattattaaatatcattaattgggcatatatcctacgggacagtagagatgggccgttgatagtgacagctcagtacggatattccttcacgttagtatataatcctaagacaaattattggggaggatactcctccgtatttagccccagttggacggccatgacgggttatcgtaaggaactcggcaacccgaggtggtctctcgaagtaccaggagggcactgttagggggtattggccacacgattgtatactagcagatgtaaactaggatttgagtggatactagaagtataggaattgaatgctttctctttcttctttcacttagttagaattactttattatgaggatttgatcagcttcgtgtcactctacccctaacttaacccctgcctagactttgacaattacaagtaatatatgtataaagtgcattagcaaagttcactcttattatcttcccttgggattaaaaatatgttaccttggaatacttctgggcgaaatgctacaatggtatatccgtgcacttgcagattacttctgtaatcataaatataccaggactatttctggtgtcattgctgggaatgaatatttctagtaatgtcgttaagaaataccaacagtgtggctgtaccgggatagtgtaggtggcgaccggaaggccgctgctacgccgcaagtgatcgccggtgaccccttcaggatcaagctggcgttcttactgctacgactacttcccctacgccaatgatcgctggagcagttcgagggacttcactagggatggcaatcgagcgcgacaggcacaggtagtgcctacccatacccgtgcccgtgagattatttgtacccatgagtatgcccattactacattacgggtaaggattgttgcccatgcccatcgcccgtgggcgtgcccgtttacccgccacaacaaaagcagtggaacaaaaagtctacaagcttctaagttcgaatcgaacttaaaacatcaaatattctctgccttggtgtagtgtctctcctctggtggcgatagaggaacggggagagaaataaaagggaaaccgtagaaaacaaagaacgtggcttatgtatcctagtggattttgctcctagcctacatgtaagttagatttcgcgggtaaacgagcaaagcgggcatgggtagtgattacccatacccatgcccatttacccatcgggcatagcttttgacccaataagaaacccatgggtataaaatggagaacaaacccaaccctaatagggtttttatccacgggtaaacgggcaaatgggcacaattgccatccctagactgtgccctctatttccactccggctgacggcattgcagggggtacaaggaaaagcgcatcaatggcttcaaacaacggttagtaaccctaagaattccgtataagggtgatcatatttagacttagcactcatgttagtagattgcaaaatttacatttaggagtacacatttctggttgtatagttaagggacctaaaaaaatctcgctaataagtgaggacctccggtgaacttatttccacgcaatatactaggaagcgggccaggctgttccggcaggcccagccgcccaggcgtgccgatgcctccggggtccgggccaccgtaagcgggtacgtgtccactgtccagattcatccacacctgacccaggcacgcagacaagtctaggttcgccgtcgtcctcttcttcccgacgcttcatatagttgcctcgtcggcgtgcacgatcccccgccgatcaagctagccggccagccagcgaagcagctccggtgctacttcttgcctatacctcgcaacttctctcatggcggcggcggggaaggagccgagcagggttctggtcatcggcggcacgggctacatcggccggtacatcgtcgccgccagcgcccgggaggaccacctcacctccgtcctcgtccgtgaccggcgccggcggaccctgccaaggctgccgtcctccagggcttccgggactccggagccaccctcgtcaaggtcagctgccgccgctccttcctcgttctttcttttccccatttcgtttcctgttcatatgatgaattctgcattgtattatccatggtgaggaagtagtaatgggacaagtgatttggtttcttctatctgtcaacgaggattgattttttaatagatttgtgaaagggaaggaatgggagttccaaaagtcatccaacaaccttttcaacctgttcatttcagtaaataagataagaaaaccagtgtggtgatacgtggattagtagaatactatctccatttttaatagataacgccattaactaatgtccatttaaaaagattacgtaatacaaaaattttaaataagacgcatggtgaaacatgtccaaaagttaatgacgtcaactattaaaaaacagggggaatagtaaaatgttcagaaccaagtagaggttatggggtttaaatcattgctttgaaacatgactcaaagtaacacttttaaaaagaaactgcttggactttcaagatttcgtcagtgttcaagccacaaactaattgtctcagatgcagacagatgttcaagttaaagcttgaattctggttttaactgggttgtctcactgcgtagtgtgttatgatgtactaatgtgcaaaaaagatcttctgaaagctcgtggtctagtacaggtaaaatgtcatagagctgattgtttatatgcccttcttgatagtaagtgcagttgtcagattaaacagcaatgatatatctcaggttccacaatgattagtttatgcctcatggtatgatttgatttgatgctgacatataaaagttattcctttgctggataattagggagatctttatggccatcaaagtttggtggcagccatcaaatctgctgatgtggttatctcggctgtgggttacgcgcaactagcagatcaaacccgtattatttctgctattaaagaagcagggaatgtgaaggtgaccacctaaacttacattacaaacatttcatggctgttatacttcaaatttctgtatgcattgaagagtatgtcgttcatctatcatgacttgtgatgttgctttgtgcattaagatagccttcatggatgattttgaatattaagttgtgatatcactagccttgtttggtacaaataaccctgattctaattaatagaggttaatatctgttttctcttcccacacaataaagctctcacatgcaaacaatttaatgctggatgtatttttttatattttctcgaaactgtggtgagcttgctcatttgaagaatccttgaaaggtggcttaactatctagtttccatcattccttttgattaatgtggatagtattgtgcagagattcttcccttcagagtatggtaatgatgtggaccatgtacatgcagttgagcctgtgaaatcagtgtatgctacaaaagctcgtataaggcgtgtaattgaggctgaggggatcccatacacatatgtctcctcgaacttctttgctggtcgtttcttgccaagtctggcacaggcctggatcaagggccttccaaccgacaaggttatcatccttggtgatggaaatgtaaaaggtaaaactgatcatgtgtgcttattatgcttaccgtgtgttgttttactgcagaagatctctcttttttcaacgagatataaattgaacaagaaaaaaatacggacacattgcaatgcatatattattttttttattttgtcaaaaacaggagtctttgccacagaggaggatgtgggtacctacactattaaagctgtcgatgatccaagaaccctgaacaagatcttgtatctcaggccatcaagcaacattttgtctcacaacgagctcgtctcactctgggagaagaaggttggcaagacatttgatagggtgtacatcccagaagatgaagtcctgaagaagattcaaggtgagaatcagccatgttctctcaagtgcaatacttatgttcagtagatgcttatccctattttttcctgacatttgactttaattcagaatccccagcaccgttgaatgtcgtactgtcaatcaaccattctgtctgggtgaagggggatcacaccaactttgagatcgagccttcatttggagttgaagctactgaactttaccccgatgtgaagtacaccactgtggatgaatacctgaacaggttcctttgaaatctgtacaaatcctacaaggctcgaatatataaaatatggaatagatattagacagtgaaagttgtgtttttcaataagcaaaatttaattttgtacaaaacgctctagagtgtaacttattgagaacagtgatgctggtgctgtctttgctgccaccgccagat

SEQ ID NO: 13540 - DNA, 15152 bp, Oryza sativa
  unsure (1)..(15152): unsure at all n locations
gattgggttttttatgggacggagggagtatgcaagaaggtggttctttcaaagctcagctgagggaatatatgcaagaagatggttctttcaaagctcagttgaggggacctctcagttctggagagggctccacgaagtgaaaaatttagtgtaatatatgtgttgtgagaggaatgtgaacaatggggaggcacaattctaggaatatgtgtggatgggagagttgcttctttcggtaggcttgttcatgaatttctgtagtccaatcaatattttctttttagaaaaaggtatttgaagtaagaatgtcttatttgaagcatgctatactaactaactaattaatggcatgtggccttattgctgatggtcatgtactcatacgtgttagctgcttcagagaaagatccagaaatgaagtgaaaccacaatgatttggcacacaacttttttgaatcagatgtagatgttcaaaattgagagtgtactgatgcctcaatcatgttgataggtaccctaaaaaatactgttaatagtttgatacactggaaagcgagtataattgaggttaccgtatttgtaatttgtgatatattggcatatgcatctggtgagaaacaaagagaaaatatgtatgcctcaagctagaacacgataaagtaccagaagacaatcaccttattagaagagagatgtccttgcacttagtaaaattcatcgagtgttgttatgtagtgggtagtattccgatgtaccaataaatcttcagagccatctatatatacagcaaaccgattaacattgtgcgtgctctcgcgatagcctaaacgagtgacccctcctttaatcaactagatggataccccgcacgttactgcgggaggattgtgtgataatatagtagatatgagttctaaaattttctctttttttttacctttatacaactgttggtatttcttaacgatattactagaaatataattcctagcaatggtgcagaaatatttctggtatattatggttacagagttcatccgcaagcgcacggatataccattctagcatttcactttagagtatttcaagggtatcgtatttgtttaatcccgtggtaagattataatagagagaaccgtactaataatttatatattacttgtaacaaccaaaagtctaagcatgggttaatataatttagagggtagagtggtactaagtagaagcatttatactcttattcacaattatctaagctaactggaaagaatatagaaagatcttattcctatacttcatattatacatacatattatacatacatcctagttatatccttacttatctaataccatctttccgatgctctcctggtgcttcgagaagccatccctgattgctgagttccttacgacaatccgtcatgaccatccaaccggagctaaatacagaggagtaccctccccaggaaattaacttaggactatatacacgcgcggaggaatacccgtattgagctgtcaccatcagcggcccacttcgcttccacagcatataatcctaaatgatgatatccagtaatttaaacactacgcttaaattaccaaatactactataatatcatcgtcatgacatagagtcatcgtatacacgatcattatacccacaccattgcatctcccagataagctagcattataataaatataacttgcatatataataaagttggtattcatatactcggaaagtagtacaataccaaagtagtataaagaagaatattctaaataaagtacaagtcttacatccataagtctgattctcgacatcgtccgattgattgatcgtctattttgatgtcgattctcctccattctaggttcattctttgcaagaggttagtaatcctaaagctagtggaatatttattattaaacgtaaatatgcattgcaagcataactagttctcctttattttggtagtattgatggtcaaaactaatcgctaatgaccgtcaacaacaaccgtcctaaaattttctttcttacctactatacaattatttttttcatgtgtttatctattcttatacttttatcaattatcttgaggttataaatgattacgttgtatggtgtgccttttgggggaagagacgcaatttacacccttgatgaatcatccaaaggctaaaaacaattaaggtgatgtggcttcatgagagaagagagaattagcattaactacacttggtggggatgaactttatagatatataggatcagtgcacatacgaccacaagctcctttctaaaaaggtcaccgcgcaacaagaaaatggacatttggccacattcaaaaagtggtttcgctagaatgccattccgaaaacgtgtttcgctaaaatgacaatatgaagcgcgcaatcacagccactttgccattttctccattttcatcattttcaattccattttcactggaattcggcttggagggagcgggggaggcggaggtggtgggagattggggcggcggtgacgacttcgtcggtggtagtgctggtgaggaaggccgccgcggagagccaccacggtcttgggcagccgcatccgccgccggacggcgccgtcctctgccgaccacttctccgacaacgggcacaggcgacggcgcgacctctggtgcccgctgccaccaccttccccgatgatgacgagcttcggctaagttgataaggggcaattttgtctcatcacctagtagaggagagaaaatctttttgaaaatgaataaaatgataaaaatggcaaagtggcggtagacgcacgctccatattggcattttatcgaatcgcgtttttgagatgatattatagtgaaaccacgttttaaacatggccaaatgtccattttctgccgcgcaaccctccccagtccccgcacacgccttctcgtgagaatgaaccgtgtgttgtgtgtgcttttcctactgggccgatatgaagcccataaacaccacgagaggaaaaaaacatatggggagctagggttccacctcgatccaaaatccaatggacaaaataatattcataaaaaaagaagtacaaacaagagtcaaaagcaaataaataagctccatcctgagacctaaaaatgcctcctagtttcaagcttatgtacattccatcacaaatttcatctccttttctgatactaaaaaaaatggtgggaaaaaggcaagttatatagggagaaagttatttctaaattatgtaaaagttactccctagaaatatataagttacttttcaaactagtttaactgacttccaaaagccctgaaaagactgcatcttctaacatgaaaaaaaaaggttatgttactcgttttgcatctcttcatgtttatttgtttatactggcaaatactccctctgtctcataacgtaagactttatagtattccatatctatatagatgttaatgaatctagacacatatgtatgtccaaattcattaacatctatatgaatgtgggcaatactggaaagttttacgttatgaaacggaggaaatacatatctacggtagggataatagttacttcctagaatcatataagttacttttgaataacacatatttagcatcataatatcttgcttattacctatatagagtattagaaaagaaaatctgagataagtttactcaatgaaaaccatccatatctgtcgacgagtgatactagtagaccggatgattagggtattgggatacattggaacgaggatctaggtaacacgacatcaagcaagtagaagacaaggattatactggttcagaccccttatcaggtaatagccctactctaggggattgatgatggaaaactacagattacaatggaagtagacgaaatcgatgataccgataagatcgtagtcgaggtattcgacgagatctcctggcaacttggcttcgcgtactctggcttcgtaaactatggtgggtgtgttggcgatgagattcgatgccttgcacccctccttgggggtcccttttataccgtggattatcttgatctccaagtaagactcggagacattggatcttatacgatataacagaaactctatcctctccgagcaggactttggaaattgcttggctcgtagagatattttccataatctgtaacaaattcctacggcgtacacgggaacaatcgatgtacgtgaaggtatgccatatccgtatattttataactcataggatataaggtatgccttatccgtaactatgacaatatctttaacatattgacatcaaatcatgcacacaaagcgcaaaaaaaaatgcatcgtgagactccgatccttttattcctaaaatataaaggattttggaagaatatgatatatttgtaaactagatagtgtgtcacatccctccaaaatcttttatactctctccattaaaaaatataagggattttgggtagatgtggaatgagttggaacatacttcatgtctagatttattgtattagaatttgtcacatccatccaaaatttcttatataattggacggagggagtactttccatcaaaatcttcatttatttattttataggatcatactccctccgtttcatattataagtcatttgattttttttctagtcgaactttattccgttgaccgattttatagaaaaagttaacaatatcaaaaatataaaattagttttattaaatttaacagtaaatatagtttgataatatgtttattttatgttggaaaaagtattatatttttctataaactagaaaaatcgcccgtgcgttgcaacgggtaaagatgttttttcaatgatatactaagagctgagtaaaaaactgaaaatattgggatcactatacattataattgaaaaaggtaatgaaaattttaatattgggatcgctatatattacaattaaacaagttaatgaatatcttttctgggttttggccgaaagccttccttccttttagccctaggcaagtccgctacctccctccgtttggcctacttacctccatttggtctgcttccttcgacccatcaaatccctccctccatttggcctgcttcatttgactcatcaaatccggccgaatctttctcgatcacccaaaattggttgatgattttttatccactcgatctcctatttccctttttgtcccnnnnnnnnnnnnnnnnnnnnnnnnnaattaaaaacgataagggaaaatcgccgtcattatcgacaactgttagattaaatctgaccaaataaaataaagctgggaaaatcatggagaaaatgataaatgaggagtgggaatcgatttttttttgcaatcaaattagagtagaaaacacacgattgatatggcgtcggtgcagcgccagggttcaactcgggagacgtgcacagaataaattggattaaaaaactgagtgagaaaaaccaaaagggagaaaataaccggtgacaaaaaagttgacgaaaaaaccaaaaggtccgggaggggcggtgaacagatcggatgtaaaaaacggaaaaaaaataatagcacgtgcgggaaaaaaaaactctttcgcgtgaaagaaaaagtcagaaaaataccggtgaaaaaaaaccaaacggaattttttttactggcgagattttttttttcctttttttcaatggagtcggacgatttttttttttcaatttttactgacgcgcggcagaagcttttttatcgcttctgagtcggacattttcttttcctttttttacctttttagtcgcactattttttcctttttttgctcggccttttttttccttttttttttactcggaccttctattttaccggctatggaattttctcgtactttttaagtagagatagaaattaagaccgtaacataaaattaaaaccatatttgatataccaaagtaccggaaaaacatttttaatttttataatagtagagatttaagttaaacttaaaaaaattgactaataaaatacttcatccgttttataatataacactttttagtgttgtccatattcacttagatgctaatgaattgtatacatatagattcattaatatttatatagatgtgacagtgctagaaagtctttcgtcgtgaaaggtgtggggccagtgtcctgacacgagtgccctgggcctgcagctcctccgtctcaggcgacgtcggaggcagagctccagtcctcgatcgtctgctcgctgctccggcgggaggacgaagaggagcggcggggttgggggtgctcccgcctgcccgcccgccggccagccagtaccctatggcagcagcttccctactatgccatgttattgctagatccgcccctgctggccggagccgccgctgcctcctccactccgacccccacaccgcgcaccccctcctcgtcgccttctcccgcctctgcgcccacggcccgctccgcgacgcgctcgcgctgctcccggacctcgccgcggccgggctcacagcggaccccgtcgccgtctcccgcctcatcaagctctgcgtccgccacggcacacccagcgatggccgcctcatccaccgccacgttttcggcggcggcgatgtggcggcgccctcctgcagcagcctctttgtctccaactccctcgtctccttgtacgccaagttcggcctgctcgacgacgcactcaggctgttcgacggaatgccgcacaagaatgtcgtgtcctggacgaccgtcgtcgctgcgctggccaatgcccgcgggaggaaggaggacgcgctgcggctttttgtggccatgctcagggacggagtggctcccaacatgtacactttctcgtccattctgggtgcttgcagcacgcccagggtgctcgcggcgatgcacgggagcatcgttaaggttgggttggattcggatgtgtttgtgcggagctccttgattgatgcgtatatgaagtttggagatttggacggtgggcgtcgtgtctttgacgagatggtaacacgtgatttgatcgtgtggaattcgatcattgcaggattcgcgcagagcggggatggtgtcggggcgatagagctttttatgaggatgaaggaggctgggttcttgtccaaccagggaaccttgaccagtgttctccgggcatgcactggtttggtcacacttgaggtggggaggcaggttcatgctcatgttctcaagtatgacaaggacctgattttgcataatgcacttcttgacatgtattgcaagtgcggtagcctgcaggatgcagatgccttgtttggcaggatgcctcagagggacgtgatctcttggagtaccatgatctctggtttggcacagaatgggagaagcattgaggcattgaaggtttttgacatgatgaaatctgaagggcctagaccaaaccacataactatggttggagttctctttgcatgcagccacgccggtctagtggaagatggttggtactactttagttcaatggagaaactcttcggtattcaacctgagagagaacactgcaactgcatggtcgatctacttggtcgggcagggaagcttgatgatgctgtgaagttcatccatgagatgaactttcagccggactcagttatatggaggactcttcttggggcttgcaggatgcacaaaaacgccgatcttgcagcatatgcagcaaaagagatccttagactggagcctgacgaccaaggtgcccgcatattattgtcaaacacgtatgctgatttgcgacaatgggcagatgctgagaagtcgtggaagatgatgagagacagaggggtaaagaaagatcctgggcgaagctggatcgagctgggtaagcaggtccatgttttcattgctggtgacttgtctcacccatgttcagagagtataattcaagagctgagccgacttttcagcagggtcacaaacctcggttataccccccagacagagtttgtgttgcaggatctggcaactgagcagaaggaagatctattgaaatatcatagtgagaagctggcaatagcatttggaacgatgaacgcgatggaacggaagcacataatgatcatgaagaacctcaggatctgtggtgactgtcatgcatttgcgaagctcgtctccaagagcgaaggcaaggtgatcatcatcagggaccctgttcgtttccaccatttccaggatggagtttgctcctgcaatgattactggtagggatgaccggcactgtcccccattcgcaaggtgcaacgaaggttagcagtgagtagtgaccacatcaaaggtctgatttgaaaatgtctccaaaaatgtcctgtccgtgtgctattggctggatgcacatacatgtcagcatacagcactggacaacatgtacggttgtacatgttactcctatcacatcaactccatatgttctcctacagctgatcctgagccacatctagatttcagtggaagtctgaaagaggagcgtgagaaagaaagagctaagctagtcgaaaggaggaaaaagaacaaggacggaatgcaaaaaaagggagaggagaaagagaaaggcaggaatagaaaccgcagccatagaaaagagaaggcctgctggccagccttcttcccccctcttccagctcatccaagccagcagttgtcaatcattttccccccgacttggaatctctgcaaaacacatgcacctataggcaagtcaaaagacatttcattatctactgtatgtatgttcttggaaagaaagtttgctttggatatacatgctaataatatcttgatgcttagcaaacaataatatttggtactccattttttcattcttgccatatgtttgtattcagccaagttaggtcaatatgcttgaattctgggtggagattattgtgggtaaaaaaaaaatgtcaaatgcatgtgatgtatgggtatctccacagttagcctagggggctcatataatttgacaatgagtatggtttccaggaatagctcatgttgtcaaattgattcaaagtacctatcctaatatcctatatgcataaagcctcttgacatgttggttaattattttcctaatctaggggagagcattatgatgtaatgtaaactctataaggtaaagcaactcagagcatcaattatcttggagttgacgggacaccagcagtttttggtgaagttgacaaccaatatgccatgatggttatttatctgaaccagctgaagggctacagagtccaccccagtagcagaaaatgtgccctttgtccaaagatgataggactcctgttagggatctttcaagtagaattgctgggatgtgttagattgaacaaataacagttgatagcgtaaaagaacaaaaataaagaagtttgcctgtggcctaggggattcaaatactttagtccatgtttaatctcttccctcttcccatcaggcttgaatgcttgatcctctgagaaccacaacacaaatgtctccgtgccatcctatttagctttgcatatgcttcttaacatcccaagatctacgatagatgagagaaccaccatcaagcataccatttcagtacagcaaagccctggaattatattaccaagttgtcaagttaaatacgctatgtgttcctgccattttttttttacttctttgaagttagtgttcattttatgtttttgtatttctaccataattcatctgaattctctttgacaggttcaagggaagtggctgtaaggtcatacatggtgcgtataatgatccatgtgtaccctgctatgtagttgttatgacttctgagatgtgcttgggtatcggacatggttaatggcttgtttcaagtttcatataatttcaagtttcaagttatgataaaacagtgataagatcattgccagttaagactgaaataatgtgctgaaagtttgtctaatttttgtgaaaactgaatcccgagggctcttcttcctctgctattgattttgaaggttattgtaaccatctgttgatgaacaacgacatcatgaagttaacagagtatcagtctcctaacaaaaccagtaaaatgagttctgttatttgccttttctttctaacgcagagcctgtttatgagccaacttcataaattactaggctttcctggatgatcggcctgttacgaatttgtgttgcgcagcatgattctatcacttggtagttctttccttcgtgaaggtgtctacttgacttgttggagtctgcttctgtggatttagataactttcacccgcatccagattccatttcttcctgttatgatagcatgcatatcacatgtactcccttgtccctcctcataaagtctgttgttctagcaagtcaaaagcgaattaaacaagagattcaaaaaatcagagcaacaagaagaacagagtattattgattcggttactgaaacgagggggaaaaaaagttgaactgacactatagataaacaaacaagattctctctacaaacaaaataataatgtgatctacagaatcctcccccaacgaggcgatcaggatccctctgatccagtgaatagtgaattccattccatgtgatgcgacgtggtaacgcggggaaaaccgcgctacgaaatccagcaagcggtccacagtgcgactgtgcgagcccgcgagtccccttcattccaaatcaaacgatgcaactgcaacggagacagatttatctattaataactgaagtctcaatctcaactctcctctctctgtctttctctctacccacccgctaccaatccccttcgctccgctccactcctccggatctccgccccgccccttccatctccggcgccggcgagaatggagctgctctgcatcgggacggcggacaccaagctggacgagctgctcttcctcgccgcccgcctccgctccaccctcgccgccacctcctccgcgcaggtgggctggcgctgctctctcgcccttctgctctgctactcaatttggttcccgcgcgagatgtagactcctagggaaataggggaatagggagtaggagctctatatcggtcccctcactttgttaatgaatctctattaggggggaatgagttagtgctggatgttacgggatgtgatcgtctaggatttgcggcttatacagtgattggggagaattatcatggtaattagcatgttcataggttatgcaatcattatatattacttttgtgcttagtattgagaaatgataatgcctcctcactagtcttgaaaagatgtttattattgtagaattatgcgttatttaagggtgtttagttttgggatttttactcataataatttaatcaatccatagtgttgtattaattgtttttcatttctctatatccttgcttagtcggttaagcgttatctacacttacaatgtaccatcccttttggaccaaccagaaaaccatgtaccgtcccatgcacaataccgaacataactcatcatgtaccatcttatagaacttctaaggaatgtgattgttcaacattgttgtaagaacacatttctgaaaaacttccagctatgatatacacaaagcaaagtttcagaagtaagaaaagctggtgaggaattttaagaaacaatttttttgccactgaaaacagcaggttgatagaaaaaaaattacaaagtatcttacaaatcgggactaaacattatttggatatatgaattagcaaaatgccacaattcatttaatggaggctgtagtgttttttttttttttgaaatagatggcaggagctctgcttattcattaaagaggagtagaatcaacaacattacacaaataacacttatcctgggctgcagacttagttgaaaaccgcaaagatacccttaacacactatcacttctctcacaacgcacactgccccaaccatgccatgccacgcgacagctgtactagcccaaggaaatgtgcatgcttgtgatagtgagtgcctgcttatagatcaaagtggtgactttgagggtgaatggctatggtgactcttagactggtggtggcagcatcagcatggcctccatagcaatgtgggactgccatgccctgcttgagcatattgtttgccatcaccatggccttctcaagcataaccctcatctcaattggcagcaatggctctattaaatggaggatcttgggtatcttggcagcgagatcatggatgattaattgctctgataccgaatactatgattactagattcatgaaaggtactcttcgctgggatgatagctaggcgacgttggggaagaattagttcctttgttgctttttcctggataatgagaggtggccaccataatgccatatatagtgagcctcttgattattttatataatagataaggattataacataaggtagctaattcttataaaatggaaattagagataatagagccaatcctttctttgtgccatatgcctggccttgtcttgcacatgctgtacggataaccattgttgtgttacatatcggaatggaaaattgtctgcacatgtggcatttttgtgcacagtttaaattgcttggctacttgcagaattttttcaattcaacaattttcttatgaaaagttacatgctccttggatatactgtagatttcttattttcctttgatatagtggtgcatcatatggtgtaatgacataacaggttcaagtaagccttgtggatgtctccacaactaagaaggtgacatcacaagattttaagggcaccacatttatctcaagagatgcagttctttcgtgtcatttaggtgtcgatcaacatgaacttcctagtgacagaggtgaagcaatcacactcatgtcagaggctctccagagctttctaaaaagaagatatgaaagtggtactctgctaggtgctgttggattaggaggcagtggaggaactgccctaattgctcctgctctaagatccctgccactcggagtgcctaagcttattgtatctactgttgctagtggccaaacggcaccatatgttggaacatcggacttggtgttgtttccttcagttgttgacatatgtggcataaacagtgtcagccgtgttatattatctaatgctgctgcagctgttgctggaatggtgcacggaatattaatggaatccaatgaatctgatgaaactgccacaaaaccaactattggtattacaatgtttggtgtgacaacaacatgtgtaaatatggtcaaagaaagactgagcaaagaaggttatgagacacttgtattccatgccacaggtgtaggaggaaaagcgatggaagaactagttaagggaggtttcatacaggtaccactttctggtaaattgtgatgataactcataatctcagttatcaactccttatgtaactggtagttgcagagttttttctttctcacatttatttggttgcatatagggtgtattagatataacgacaacagaagttgcagaccacattgttggcggtgttatggcatgtgatgatacaaggtttgatgcaattatcgacaacaaaatccctcttgttctcagtgttggagccttggatatggtcaactttggagctcgagatacgatacctcctgatttcacaggaagaaagatacatgtgcataatgagcaggttaagtataacaacactttccaatggtttttattcatttttgaccaaaatatgcttgcatgattattgctgaacttgtttcttcaggtgtattttcccttgtaatgcactatgaaggtataatcacattagatggttatgtcaactcagtgctacaacattggagaattatcagtaaatatgttattaaatttttagataaacattatacataatttactacatataatgctattaaggtttcaggatgatttattgttgtacagaatttgtatgggggtattttttttgttgcaaggatatgaaaatttccatctccttattctgtatgctgggtgcatttttttaaaatgtatcattgcagggcatttgcacaagcgttgtgttgtctaaaatgactctttagaagtccaatttcaagaaatattctcttatctcctgtaccattgtttgcgagtgctacatacatttcctctttgttacaatcagtaacaactctcttatcttacaggtttcactgatgcgaactacagtagaagagaacaaaaaaattgctgagtttatagctgataaaataaacaaatcttcatcgaaggttattgtttgcctgccacaaaagggcatctctgcaatagatgcacctaaaatgccattttacgatctggaggctacatctacgctgctggatgaattatgtagccgtatagagaaaactgacaacagagaggtttcctcatatttcataaattattgccttttatttttatctcttcaagtgaactaagctgttttagattattgacaggtcaagatgcttccatatcatataaatgatccggaatttgctaatgttttggtggacgcattcttgagtatggatgtaaaggcatctaatacaataagtccagaaaacagcatggtccaaactaatcaagatgtaaatacaaaagaatattgttcaacacagagaacttcagatagttctatcatatggagatctccagtagattttcctgatgcaagaccaggttagttcttatttgatctgcatatcatgagctaaaaacatttttatgctcacaaaggaaactgtagaggttatcaaatatctacatattctgattccatctacatgttcgtcgtttttatcatagaaattgctgcatgaggttattgaagttatctgatgctcactttggtattttctgttcagcgttactgaaacatctagtcggttgtgagagaatggttatctattaatttatttatgtttcttatagaatctgcagccaacatcatggtgctttcctcttttgttttatttacttgatttcctgatgaactactgt

SEQ ID NO: 13541 - DNA, 6608 bp, Oryza sativa
taagtagtatcaatcagggatccattgggaaaatatttagccttcaacacccttgcacacagactatcagggaactctaacacacgccacgcctgacaagcgagaagagcttgattaaacaatctgtaatccctgaagcctagcccaccacaacactttggttttgtcaggcactcccacgctctccagtgagtctttcttctaccattctccgagccccaccaaaaattcctggtgagctttgttaggtcgtcacacatagaatccgggagcttaaataagcccattacatagaccggaatggcctggattacagccttaaccagaacttccttcccacccgaagagagaaaattttcaccccattggatcagccgcttccagattttactctgtaggctctgaaatctccccttgttcattctaccttctggggtgggaaaaccaagatatttatcttcaaagttgctcttttctatctagagaatctgttttattacctcagtgatctcgagggaggaagcatcatcgcacaaaattgagcatttagccgggttgatcaactggcccgttccctgcacataagtgtttaaaacatctttcaccgttgctgcctgtgcctgatttgctttgaagaatagaagggtgtcatcggcaaacagaaggtgtgatatgcccggcgcattgcgacagatactaagggggggtcagagaaccttgttggaccttctccttcagcaaaagagataacccatccgccacgaacaggaaagaaaaggcgacagggggtctccctatcttaatcctcgagagggagcaaatgatcgtagaagagttccattgaatttaacagaatatctcaccgtggttacgcaagtcattatccagttaacctagcggtgagcgaaacccacccgattcattgccatctcaaggaaacgccaatccaccttgtcataagctttggacagatcgagtttataagcacacgctgccttgttagctttcctgtttttctgaatatagtgaaaacactcaaaggctaggagtgcgttatctgttatcattcgccctcggacaaaagcgctctgttcctctgataccaattcatcgagcatcggtctgagcctgttaaccaggcacttggagacaactttgtaaagaacattgcacaagctaattggccgaaagtccttcaattccataggttgctcaatttttggaattagaactatagccgtattattgactccttctggcatacatctagtctgaaagaacttactaactgcactgatgatgtcctctttaatgatcccccaatttcgttgataaaagcgggcagggaaaccgtcagggcccggagctttcaatggtccaatctggaacaaagcctgagcgatctcttcatccttgaagtctgcacagagcaggtcattcattttagccgttaccttagcttggaataatctgctgacagattcagggttcaaggtcgggtctgcagcaaacatctcctggaaataatcagttgccattgattccattgctattgccgtacggggcacagtaccctgcaaatcttttagttttgtgattctattcttttttgctctccataccgccctactattaaaaaaatttggtattcttatctccttccttgagccaattcactctggaccgctgaagccaaagcatttcctctttgtataacagttcattcatttggttagtggcaaaacgaatttgggaattatcagcatctgaagcaatcaagtcccccagcttcttccttgccttttcaagttctctacctacatttttcacttttgttttgctccaggaacgcaaagccgccatgacttttgcgagagaccgatttatgtcccccaagtctgatttctcgctcgaactggaccaagaatctttaatcacctgtgctgagtcaatctctctttcccataggatctcgtagtgcagacatttctgtctaggctggttgttttccactgaaacaagcttgagaagcacagagcaatggtcagaacaaggtgagacaagatggacaatttgagcggagggaaagatgtctctccaaccattattggcaacagcacgatccaatctaacctttacattgttccatccatctctcctattgtcataagtatgaggcacaccttgaaaaccaaggtcgtgcaactcacaatcctgaaaaacatcccgaagggcttgcatttgagactcattcctctgggttcttgaaaagtgctcgaattgccacatagtctcattaaaatctcccataaccagccatggaaggtttgaggtttggctgatatttctaagcgcagtccatatctgatggggattttcaacccgaggttcaccatgcacaaaagtaacatgccacaagggatcatccggagacaagcgcacatacacatcaatgaaattctttcaaaactctgacatcgacggaaacatattcatgccaaaacaacgctaaaccaccactcatcccatcactactgacacccacaaaacctttaaaacccaatcttctacgcacacgacacactttttccaccttttgcctagtttcacacaggaagagcaaacgggcatcggcctccttaactaaggagcacatatcacgaactatcgcggtgttgcccataccacgacagttccaggctaaacaattcattgctcctggcgagacccagccataggtcttgccagtttaccagtagcccggggactggttgcttccatatccaccgctgtgttctcagccttctcatcctttttgaaacgctttgaggctcaagcaggaacccctgtcttcccctgccccgatccttcctgagattcactctgatcaaactccaacagagcctgttgcactttgcccattatcttcagttgagcattatcagaccctttcctcttgattgggctgatagtagcctcattggacacgtcctcagtagactcctgttgagtgcccaggttcctaatggccgggatcatctcgaatgatggaagtgatgctgactcatccccagctgaaaacttatttgtttggttcttacgggacaaagtactgtcagacatatgcagcgagccagccttttcagcaagttgagcgtcaactaactcatccccttcctcttctctcgaatcaaaaccatcgtaggcatcgattctgtttggtgggtcagtgtagaagcggtctccctgtttattccccgctgaagaagagctagcactacctgcgcctctgaacacaagcttcctctgaaccccagcactctgatttgccttaaccttgctgattttcctttcgaaagctttaagaggagagcagcgtagatcagcagagcacatgagtggttcagcctcattggctaatcttttctcgcactctttatctgagtgaccaatgaaaccacaaaagaagcagaagtgcggcaccctctcataacgaagattgaaccttctgatttcctcagcacctttgatcttgattttgattgcaatctgtcttttcaggggacgattaaccgggagatcaacacgaatgcggaagaaatcatgcttgttgctgccattttgctgcacatccacttccctgaccttgccgagtttactcccatacagctcacctctagctttgttcatcattactaagggcagatcatatatccttacccaaattggcactgactccaaggggaccatcgatggactcaaaaggccattgaaatctgctacaatcagagcatctcctctgtgaatccacgggccgccttgtagaacaaacttatggtctccctcagcattaaaggtgacgatgaaaagattgtcctttagagatttgtaactcatctccgctctgagtcgccaagctctacccatgtcctcaaataaggccacctggttggggaatttgagcgaatagaatctcgctaggatagtccatttcctgcacacttgacttcctcctcgtcaagttccacttcaattgcatcttcttcttcctccaaaactacaccctccatatgtgcttcagaacccaagttgacgcccgaactagattgcactaccacatccaccgcttgatcatctgccgggggtgccgccaccagatcttgcccagctttcaccagagccctggaatcctctacctctttgttccccagatccaatacggcgtcatccttcagcttcgggcaggtaaccatcgcattgatggtccctttgtcgcccccactgagagattttgccatgagatggatattgagagaacactgcccaaaacctagatcaaaacctgacaggagaatctccagagtttgcaaaggatgtatcgttgtggaaaccacaggtgtgtttttataggaggaggagacagagtccagatcggattcatacacatacgtctttccaaaggacaaaactgagacgaagttacgtagatgatcaaacctgccagaaccgattgtctcatgaacattccagaacttgatagccaacagagaaatacctaagaacgtggaccgcttccatagtgggacaggtctcttcccaccagatgagagaggattcccaaactgctgaagaccaccagagatatttccatgatctccagagatgcgaacagcagaatcaaacgtcacagaaccaaactttgttggtggaacagagacgaactccatccaaagaaccctcccaaaggagaagatggccgccacgccccagtcgcctgggcgccgccaaaaccctggcatctgtaaattacggagccaatttcggaatcaccatgaaagtagaaaaaaaaactagtcaatttcatcctctaggcgtgtacgtatttgcttcattgctttacactacatagatcgactcttcactgctttcgattttatgaatacacaagtcgaatgcatatacatgcgcacacataccacactcatgtatatacacacgcatgtagatgtgtcctagctagcacacatctaaagagattagaggcataggctcacatataaggatgtgtggggtacatccgtacatgcttatcattgaacacacccacatctacatgtattgcctcatgtggttaaacctaagaaaatttgagcatccatgcgaaccataatatttaaatttgggtgagcagtctaactaataattgagctattgctcgtagtcttcaatcgtatatcttgctagcttggttttgggtaggctcaaattaggcctgatcaaattaacggggctaggcaaaaaatagctctgagacaaaaatacaagcctgagctgacctgagcattctcgtttggtggctttttgggctttcgtgcttcaaaatgtagtcctgaccctgacccagtacaccattgagttgggccgggctcagtttgagcagccctagctcaaatgtgccaacggggttccaaggagaacttggagacgtttatgagctgtggcagcaacagccaggcaggcaggcaaattaaagcatacctttatcatacttattgcacatatttaagcctaaaagctactatagcttttgcaatgtgattatacatgcgagtacattaataatcctatcattgcattgaatactatcatccatggagagttgcattcatatcctgtacctttgtttatctaatactaccacccacggctaccttcggaacctataaggaaaggcatgtgagacattaaagaggtgtttatgttggttatctcactttgccatgtcacactttagttatgccacatgtgtttattttgttgtcgcacctatatcatcacatgccacacttttatactcttattaggatccatatgtcacattcttaaatttgtagctaaccatattacacatgtggccaattatttccgagccacagttatgctatcacctatcatgtcataacttatctaagcttagttatgataacgttagacatcaatcaaaaatctagtttctccttggaaagtgggcgggctggcattgcattgcctaatgttggcggacccccgcatgcagtgcaagtgaagcggctaaagaatgtgaggctacatttcgtctcgccaacgacttgccccgcatagctaggcagctagctaccgcgcgcatttaatttaagttgatatcgagcatgcatgggtacggtacgcgccggtcggactccggtggtgatcgatcaatggcgaggctctcaacagctgcgtggccgttcctggccgcagtggcggcggcgctgctgtgctccgtcgacgcggtgatcgtcgaaggcctccaggttgggttctacaaccagacgtgcccgtcggcggaggaggccgtccgtgacgtcgtcacctcggagatcggcttggaccgcaccatcgccgccggcatcatccgcatcttcttccacgactgcttcgtcacggtataacactaacagtacacatgtgtgttgtccgtacgtacgtgtgatcaatcaccttaatattggtattacgttgaagaatcgatcgatcgttgatggatggatatatagggatgcgacgcgtccatcctcctcgacgagacg

SEQ ID NO: 13542 - DNA, 11288 bp, Oryza sativa
aaggggttttgttggggaattttggtgtggaatagtggagtggatgtagtagtggctgcgtcccacagtactactttattgttttttaagtaaatttcttagtgtacaacttaagaaatgagcatactacttaacaagtgggtataacttagtacaagaacttaataaataagcatatgggtacaaataattaaaaggtgggtatggttttagcacataacttgattgagaagtggtgtaaaaacttaattattttgagcatttttggctatatgtcatcattttttttaatgtactcagttgttaatatacttatgtagatttgtacaagcatactttttttttcattctagtaattaaaagtcaaacaaattttactgtgtagaaattttaagttggtatttgagatggtgaaaataatatctaaatcaatggtgcaaattgagtaatatattcttacaaattacatcaaacattgtaagataatatctacgggattgctatgtgatgacatattaacattgtgaaaaaacttacatagcactcattaaccaaaatagcatatctagttaagttattgcaccaaaatactaaatacccactttccatgttattgtacttaaacgtctcattctcaagttcgtgtactacatcgtacccacctatcaacttgttatactgtgggtataatttacacttcttaaaaagttataaaaatgaggagcactcatacaaagataggactgcgaatgctcaccatatttttttatgaatgctcccaataaaaaatatattgtcatattaaattttaaataaaaattttattttattacatttgttttatttttaagatttatgtcaaaattttccgcactaattatttagtctcattttctacctaaaatgcatatattgtgcactcaaacaaaatttacaatagttttcaaggtcatatttaaacctaaatcatcaagcacattaaaagatatttgccaccaacttaattggtgaaatgaaggaaaatgtgacggcaggggcatggaagggatcaagttaaaaattcatgagtatagaagggatcaggtaaatttgagtggtataaaagagattgcgtgagttttcaagggtatacagaaaatttactcttcagatttagatgatctctcttttggtagatgatctctcttttggtatctcgtcaccttgtctgccctgggctgggctggtcacttcatcatcacaatctctatcgcctcctaaaaggcaatcctttagacttcgtctctgagcgaagatttatctcctcggcacatcatggacctttgtgcgttttttaacctcaatattttcatcttactagcatcacgtgaatacggatgaatggtttatagcgttcaatatattttaaccccaatggttttattggtggtcaatttttacgtagaagcactagttcttttgtgtgtgtgtttttatatagagatgtgttcggcactcccttttcccaacactcctctctcgttttccgcacgcacgcttttcaaactaataaacggtgcgtttttagcaaaaaaaattctatacgaaagttgcttaaaaaaataaattaatctatttttttaaaaaaatatagctaatacttaattaatcacgcactaacgaaccactccgttttccgtgcgcacttatagtgctgggaacgaggggcgccgaacacagccaccaaagtgtagcagagatagacacgatctttgatgaaccttaaaccgccagcatagaaaggactgataattcccaaacaaacttctcattacaaaagtgggggaaaagaaggaaaaagaaaaggtgcataagaataaacgattcctcgagcagactgaaatcatagaaaagacatcaaagaggacagaaccacatacataggtactatgcagatttaaatttgttgataatccttgcagataacacaatgcacagttctactcaagtcaactgacagtgaaagcatgttaatataaaaagtggatctcctatgatccttatcttcacttcagttcacagctaatccccctagttaacaagtctatgcgaaaccactcttatgcatcaacaaggtatctacagtccaaataatgcatggctcctcgccgccacatcaccctcagttgaagcagttaacccagaagacggcgaggatttcatagagtggatcggctgttgttggtgacccgcattggaagcatgcttaatcatcacactctctgctgatttggggtcactggagagaccagatggaccaaccgcggtcttggtcttcttggcccggcgcttgggcggtggcgctggcagcatttcatgggaagaattgctgccgctcatcaagctctttctgtgcaaagagcagaaatccatgccccattttgcactcgtggcacatccttgaaacttgcagcgcctgccgccaccatgtttgatgcagtaatcactccgcccttgtgcactcttaccacatccttcaaacttgcagcgtcttcccccaccatgtccaatgcaaaagtctgtgttcccttgggcacccttcacacaaccatcaaacctgcacctccttccaccaccatgccttacacagcggtcagtgaggccttgactgctgccacatgctgcattggggcatccagtgacagcgcagcgcttgcctccgccatgagcaatgcataaaggtgtgcccccatgtgcaccctttgtacaaccttgaaccatgcagccctttgaaccgccgcggtgaatcttacagtacattgcatttccctgggctcgcttgctgcaaccctggtacttgcacatcacaacatcaccatcaggattatagattcctgcactacccagatcattcccagcattttgggttactctgaacccactctctccttcgtacttgattgaaatttctgatttggagcaagctactgtactggaaccaggttcaccaagcgggcgacctccaccatgggacatacataatactgagccatctggtacaatatgagggcagccaagcatttggcatcgttgccctatactgtgacttttacagagcaatgtctggccttcaacaacattgttacacccaagtctctggcatcgttgtccaactgcttaataagaacaaaaaaacaaaaacccaagaaagatgtatgcattagacaaatattgaaacatattcaaatttatccaagaactaaagcttctccacacttatttctcagtcaactacattatggttaataggtaaactccagaaaggcatttaaatgggaaaaatcattgttacactatgttcccaacagactgtttaccatgtctacttctacattcagcaatgccaccagccgttgggtatcaactactgttcatcatggtcaaatagactttatctgtactcctttaaaagaaggcaatggaagtagtagcagttcatttgtcatccaaacaactatgcacaacattgatttacgaaatacttcttgaagttcttcaatattatacaatatccctaaaatatattcttctttgttatgttgtcctactaaggcatatggtgaccaaacagtcacatttatatgtagcatgaaagctaattttacaaatacagtatagcaaaaactgtcaagcactctgtaacaaaagcatgaaaggcgtaacagaaagaacttattcataaatttcaaacaatattaccatatctactattcatttttacccataataaacatccaggctttagccagtctttaaagaagtgcatacatggtacggaaaggtaggttccaaaaaaaaacataccaacagaacgaccatcagatgcacacatctgtagacaaaaggataaaggaagtgtcagaaaaagcttgctagactagacagcagaaaactgggagaggatagcttacatttaactgaatcatattgccacgctccccaaaaatgtggtgtttatcagcatccatgcctagaaaaagtacatggtcaggtctaccatatagatcagcttataatataagaaagttgtgaaaatggttgtgcagaatataccatgttgaaaagaatccatgaaatacacctgcatggagcatttaacaaattaaattaacaaaaaaggtaatcttaagaattaattaaattatttgtagactattcaaataataccctttgctgagaaaggatcaatatgtccaatcattaatatttgttgccataaatactaaaatactaaataccgtaaggatacagattgaaagaacattagtcaaaactcaaaaacataaacttcggtttgcatgccacaagtaaataacattttcctctaacctttaaggctatgacttgctgggctgtaaaatcagaaaaaagggggggagcagacattcccgtcatatcatctgaaacaggaggttacactccacttattcctcactataatcaaacacagatgtctgtattttaagctccaatgtagtcatcaaatgttggcagctcattaaatctagagaaagagtccgatataaccctctatgacagttctggagacagtttcaccaacgtggcaatctacatggaggatgacatggtgccagtcctgttccttatctatattactctctcttacagtgcagctccacctatcatttctttcacttacccactcctctcattttatccttaaccccatcgttcttaccctcagcaatcccccgttctacatcatctacctgtcacgtgaatcggttgctgtagtaagataggtgtggtggcagcagcttgagctcaatctgcggccagggctggatgagctgagttctagcacaggcagccaagctccgatgacccaatctcaggcggcagctggatgagatcaacaacagattgtaggagctcgagatgaaatggtagcaaccgaggttcagcttcccgatctccagcggcagtgtacgagactagcttgagctatagtggcgattctcttgttgccatagtggcactgtttgctagggttacagatcataagaatcgatttttacaagtttggtgacatagaaagaacccaagtgaggtcactgctactctctaatactccctccattcacaattgatcatcatattaggtatgcgcagcaataccaagggagaaataaatcacacaacagcagcgtggatcaaggagactgccgcagtgccggttcggcttccgcgtgtggtgcatggagctagaccaaccagaatcacggagggatttaactaatacggcaataatcactcttcattaaatctatgcatgcatgctaagcagtaaatctcaggagactctctcgcaatttaatccatacacgcatgcagcaataaaaaaaaaaggaaatctgctggctcaagacgttaggcgacgatcaaatatggatatttctgttttggtaatatgacaatcaattgtgaacggagggagtaccacccaaagttacaaatgtttaggaatacaccattgccgtcaactttaaggtcctggacattaactttctgctattcaaggcaacatttaacaagaagccgaattcatgtctaacgtagtaacattactaaaataaaattgttctagcacaatcagacctgcaaatcctctaaacgtgcacagtgatctagttccctatctatcttctccacgagctagctattcagggccaaaacgtacggattcatgctcaagattaatgattctttttactttacattcgtgctgcaggtatgtatgtaatctagtactaatcttgaacacatgtatatcacagtggagactaatgaaacaaatctctgctgcatgacatgaccacaccaaattacacagaccgtgtaattcaacacggtgaacagctcaagtttcagatccacggaaatgtagagctaaaagcacacattaagaaggcaatttgattaactataatcatgtaccacaggaaggaggagaattaaaaggggggaaaggcgttcgctgaccttggcactccggttgcactccgaccgatgctcgatgaggtacctgcggaggcggtaggcagcaccggctttcgtcctgctcccctcctggtggcgcgtcgatcgacggcggtagaggggaggggattgggggggagagaaacccactgttggggagggttggagcggcggtggcggcgggggagaagagccgccggcgctagggttagaggtggcctgggtaggagggcgaatcgggcgcgtgggtggtgcggatcgatcgatcgatcgatcgcacgaggcggcggggaggggatgggaggggatcggaggggggaaggggaggatggatgaacttggcaagtttggactttggtagagaagaaaggttctgtgcagcatgtattttagtacaactagggtttattttagtacaactagctagggtgctcactatcactggattgccagtggctggcagcattgctaatttgttgggtgggcatagtatttaggaaaaataaatctgtatctatgtcgtacatcatccgtttaaaagtatctctagaaagtttattcttttttacggaggaagtagatcattctcagagcatatagggcttatcggattcatggtgcgtgtcatacttatatatatataattaataaaatatacatgtaagtgagaaataaaatataattaattttaaagtgagtgagagatcgaagaaaaattatacatgtattcaataattattttctttaatggcagtgtgacaagtagttgttatttgtatgatttttttttgcatgctatgtaataaaataatccatcgcttttcattttgtgttattgtctctttccctagttggttgtcattatggacaagaaaatgggaagtaggcaatgacgtctggtagccccgaagcaatgccaaagccatcgttccaggtccgtggtgcgaggcattgccattgccaaaatctactcgcgaacactattgtcgtcgtcagatccacccgcgaatgccactgccatcggatgcatctacgagcgatgccactgccatcgttgtggatccatcatgcaagacaccgcggcatactcttcctgtgatgcaagtgtcgctaccattgtcagatccacccttaagtgtcactattgtcggtgctccgccagctgccaggaccacgacttcgaggtcaatttggcctgtggaggagttgatctgagtgccaaggagctcgatttgggcaaataaaaattgatacaactgaaaaaatgatggtagacgacaccacagaggaagggacgaggagcgatggcaaggagagagtgacaacagtagaaaaggaagcgattcgaggaagactggaagaggaaatgggaaaagggatgaacgcttgggcttctgcgattttttttttgctagtgaggcccattataaagtgagagaatcccttatataccactagaatttgaccagttcccttatatgccacttaaaattggcttctcccttatatgccactagtttaagtttttccacctttttatgccactcccatcacaatagtgttagttgacctttagtcaaaggttagtttttttcgtaaatgaccaatatgccctctcaactaaaaaatgtgtaaacttcaaaaaatcataactaatttattttaaatcctttttgagtgaacaaaattttgtcagaaccagtgaaaaatgctctttatattaaaaatattgttagaaaactgcatgtttcatgcttacattgaaaatttatttgtgatggtaatggctaaaattgcatgtgatgcagaaaaaaatcaattttcatatgttgtatccaatagctatattagtactaaaatgcctattattggttgtatactaattcttaagggaaaatgcatctttgtacaatgaagttaacggtcaactgacggtggactgacggcaatggcataaaagggaggagaaacttgaaccggtggcataaaagggagaagccaatttaaagtggcatataagggagccggttaatttagagtggcatataagggattctctcttataaagtccatctaggccttaagcattgtggtaatagaaacagctaaagtttactcacacacatgccctacctataaaagaccacttcatctatatacattgccaatgcccttagggttttagatagtctacaattcgtcgtcttccatatgtagacttgggtctattttctaatatggtgtttttttttcaaactctttctcaatcgttacttcatctgtgactatgtgaggttctcgataaagatctagaatggcttgtctcctgggttgttgaacatcttcacctagactgttagactccaattttattgttcgactcaagctttattctgttcactttcacttcaacaaagattaatcatcaacaacacgtgacttctcttatggactcaatcgatctgtctgcattcagccaagcatttgctccttcaccattgcgtcggtccttcagcaccatgcctctccttattcttctccaatgcatggtcctttgtttaatcaagtcttgccaacccttcaccccattttaccatctttagtcacatgtttccctatatcacaatgaaacttggttaaattccatcttcatcttcagtgccatcattggaccaatctcctacttattccttcaataagtgcattagtcccttaattgtttgtcatcaattagctaaaactcattaggggcctagatgctctttcagttatcactgacacctcgtctttcaggtaggttgcttcttgatgaggaagtaggatcccgatcttccgataggtattgataagtcgattatggaacttgaagttgatgatccaaaggctcagatcatgacaaccgaaccctcgaaatcactacaccactcatccattggttattaatcaagccgaaacatgattgaccttgtcgataaggctatctcctgcaagtgaatcgagaacacaagcaagagagtagaagaagcaatctgaactattattaatatatgatgaagctcacaaattgatgttccacaaactgaactaagcggtggaactacaacaacagaatctaagcaaaacccaactctaaacaatgacgactattaaataaataggattagggacgtactagggttagccctaggatacacaccccctatttaacttaacctatgacacaattataaagcccaaggcctaaatcaaactcggactagatgaggtacatgacttgtgttgcatattcccaacaacttgatatgaattttgatgtgagaccaaaaccatctgaaattaaactctataattttccccacaagtactcatgggccctgagagtcctttgggatcaatagctaagcccatttgaagttaatacaatcagaaggcctgaatccaaatccaaaacatgtaaaactgcatcttttgccttttatggaccaaaagtgacgtggtgatttgggactagacttggagaagatcttggtttggtccccaatcaatttctttgatcatccaagcacttcgtgagcatgttctcctttccttcacccatgcaagtatttatggaaacaagaagatacaaaactcatggtgtagtaatgtttgtttttttatggaaaacaacatgagaggttcctactgcgatcgtttgttaaaacatataataagtaaacctaatatagaacatatgcactttttacttgttaatatgtaacataagtatggttatatttgaaacagtgatgtcctcatcacctctagtcatttctagatgactttggagtagttagacttatatctttactgcaaacacctgattgttcggtcatgagtaggccaaatacaaagttgctaagtttggattcctgtggctagctatagatcaactttaccctaatgaaatatgagtcaagttatcatgtcgttaactagttgctcaaccataaaacttgttaggggtacgccagtagcaatcacaaagtaaaactagtcaatttctttttttttgcggggaaaaaagtgtattactcattcaaaacgtcctcacagactagctgtgaaatgaaattacaacttccttccggccaaagcccagaaattgaatcggccctagccctattagctaaaaggtggctaacaccgttttggctacgatggatcttggtaaccaacacttccctacgctctgataacaggcgtttaatctctggactaaattagctaattcagacagatccgtattcccttccttcagaagattgactagcgaaacacaatctgtttcaatcaagatagggcgcatagtccactgtagggccaaaatcaatccctccatgcaagctcggatttctgcctccagggcattcttgtagctatccagggacttacatgctgcaaaaactatactatcactgttgtcccgtagaatcataacgatacctcccttcccacaatcagcatcaaatgagccatctacattgagtttcatccagcccagcctcggcttctcccagtgcaaatgggtcgatgcagcaggaggaccatctggtcctcttcttctaagcgcacttataacagatctgctaacaacagttttacctttttccagatcagcgtgggggcattccctgatttggaatagagtagcaatataactttccaggaatcttttggagacttccagcggaggaggcggcttattatgtgtgatttcattacgcacataccagtttcgccagagagttaataaaaacatctcatgttcttcggttggtagatattccaaacaatcaaacagccagtaattgccgaattggaaattcaccaaatcaagcgacaagttacctgattgtaccatatccgacaacaaggcactggctcggggacatttgcagagagcgtgcacagaattctccacctctcggttgcagatgatacagatatcagagtttaccaacttccttttccttttgttgtccatggtagctaaacaattggaggccactttccaggcaaagattttatcttctgtgggagcttacacttccaaattaaatcccaggatttgcgggaatgcaaagcagaggaacttgaggatccttcagtatttgccagcctacaggcaagattataagcactccggactgagaaccgcccagacttgtcagggtgccaagctagaaagtcttcttcttgggctgcag

SEQ ID NO: 13543 - DNA, 5597 bp, Oryza sativa
acatcatacttcttaagactaacaggtttggaaccttccaagatttcttcctgcaaaaatgctaaagagaaaactgcatctagatcctggggtttttgcatcaaaaaagcagatctgatatcatcccttaacccttcaacaaatttagtgacaaaataattgagaggtagagcactactgtaagccaacagttggtgcataacactataaaacttctcaacatactcagacatagaagattcttgagacatatgaaactactgccgaataagaacttcctgtctatccttagtgaatctgagacaaacttgttcagcaaattctgaccaactgacgcctaccaacttagatcatacccattgaagccagaacgctacattactagtgaaattaagaccagctacccgcacccaattccgaggatgaacaccatacacctcaaaatattcttcataattactcttccagagttgtcggctgtcaccatcaaactgaggacaaagcataggtggaacactgcctcacaaactagttaatccaaccgaattcaccaaatttgcaggagtgtgatgcaagccatgagactcaggggaaaaatgggtgggaaacagaggaccagatttctgacataaagagtcgagatctggagaagtgtcatgtgaggatttctgaaccacagtttgcagcttctccactttctcctgtaactccaccaccgaatcctgaagaagatcagcatgcttctcgacttccggaagccaagattcaaccaccagcttgagagttccttctgccctgctctgctcttcagtttgttccctcttattctcacttgcctcatgtttcttctctgcttcctccatcttccgtaggagcagatccaacttgccatcttggtccatgatcttagctgcttgcttagtcacgtagtgaggcttctcgtagagtgttgtggtggaagatgcgctcgagatcttgcgaacctagtcgagggagccaaagctcttgtggaatccgttgccgagacaacgattcccacctcttccaggaggtttttactgcaaaatcacaagagcaagagtgagaaagggggagaattttcagtgaggctctgataccagattgttagctacctaacgagatttcaccgaagtatatagaacagatcaagaacataagaaatttcaccaatccgataggattggggctgccgccgccttcgccaccttaatcattgatactgaatattcagcgtttacagtatataactacctcaacacacttctctctctctctctctcatgcaatacaaatctgacctggaatggtgctcatttggcccattccggcccatacatcctgggattagcaacccagtttcgagcaggctggcccgctcctctagacgactcttctcctttgctctgtagttcatctggcattgtcaggttgctgatacttacgtcatttactattatcatactaaactcctgcaccaacacacgggtttaatacactattatacatcacttgccctgcaagtgtgttgtgctagctaattgttcatgaatatatgcgaacaaggtcaagtagtttgttaccaacatttggatctcaagctgccgttttctttatatattcatcactcataaaagtagatgactgagatgtgatgccaatgatcttaaaattttgataaatataatactccctccgttttcaaatatatatgctctgtttttaaatgattatttgtcttatttaaaaatttagtacaaatataaaaaatataaatcacatttagaatactttaaatgataagaacaaatcataacaaaacaaatgaaaattacatacttcccccattttcatattatttggtactcttttgttgaacttagactttgaagccgaccttttgacttatatgggttattagccggtgaaagtttgttgtgaagtcctacctccatgttaataaaaaaatcactccaaccttgacttgacaatataataatgacttatggttttaaaaaagccaaacgaaaatgccgagtgtttgtttaggcggcttaggctttttggcttataaaggtggcttaaaagctttaacaaaagagggccttagtcgttttagacataatcttaaagatcaagaagtcattgaacaaagtttctattttctactatgcccttgttaaactccagcaacaattgctctctgttggttcatgcatcttataacgattgctctctgttggttcatgcatcttacaacgattgctctctgttggtttatgcatcttactccgtatgagagtttgtagggcctgaatttgattcccactaggatgcacgtattatttattgtcctagcaactattcatgttagcatgcagctagcgcatccataggtcatacgaaaattaaaccagccaattttacttttctattcacaggttttgtagccgaaaaaagtttgtgcttatgcgcgcgctttgccgctaggaaattaaataaaaaaaatcgttagtgcttatgcacgcgtttttccactaatttgctgtgcaatttgtatacaaagcgttgatttgagaacaataacaccatttaatacgcaagagcaatatctgttccatatctgacaaaagaaaggttccaacgaagtttcccatccatagctgattgagctaaaacgactaataatatcaacatgaaggaagtaacttttataaataaaaaaaaaatcaaatatcatatctaaaagtaaaaaagcatcatatgtatatttaaaagtggaggtagtacattggtaggttaaatttgtacttccataggaaaacctccacgtttagttcccaaaaagtttttctcaaaaacatcacatcgaatctttaaacacatgcatggaacattaaatgtagattaaaagaaaaactaattgcacagttagagaggaaatcgcgagacgaatcttttgtgtctaattagtccatgattagccataagtgctacagtaatccacatgtgctaatggcggattaattagactcaaaaaattcgtctcgcggtttccaggcgagttataaaattagtttcttcattcgtgtccgaaaaccccttccgacatccggtcaaacatccgatgtaatacccaaaacttttcttttcgcgacctaaacaggcccagcttcctcaaagtcaaaacgatcaccaggtactgggtttctgacacctccgaatcaagaagcctcagcattcactgtcgtcagagcttgactcaccatcactgtcgtcaggcagctcccccgcgcggagaagaatgcacgggcggatgggagaggccagaaccctccgccggcggctagccggatagcactcctgctcatcagaaaccggcaaacggtgtgtgctcgcgccttccgagggagatccagttggcattgcgctccacggcttcatccctgcaccggcataccacggcgttgcacggcctgcgttgtacctgcagcgatccgggttgccaccacgatgtccgtgtgccagcagatagctgacacacccagggacccgaccgcgcttggctctgccatgaccattgcagaacggcggcagcatgatggtatcaatgttgtctgagaaccaaagaggcgacctgtttgttccacagcaatgctggaggtccaactcatttgtcctttgatctccaggttggcgagggtcacagcagcttcctccatcaacaccaaactgtgcattttcgcaggcagatgatcgcccgcctagatgtaaaaaagaaacagatgcacgagcatcagattctgacaactatgagaggattcaaaggctgccagtgaaagtaaaagtatcaggtaggtaaaattctccaccgcacaagctgtggataaacccatgcaacattactatacactgtttttattgagcctgtttgcagcagctgctacagcttctaaagcagctagctagcagtggctacagcaccaaacggctaggacgcattctagattgacagccgaacggctgggctgttcagatcagccctaacagctggaaaaacagactaccaaacagtctcattatcatagacaagtaaacgtctttctgtggcacacagaagtttctgctatctgcagcaacatgtcaccacccagttcatcaatgacttgtcaagattcagtgtgcaagtaatattaaaaatatagggtcaattaaatatatggcactggttttcaagagagtgtgttaacaatgtagacaataagaaaatgtttctcttgtgggttaatgagggatactaaaatttgcctttttactcccagagaagaggaagataactgagttacatatcatgaaagcttccatcggccatataactctaccagaaaaatatatgttatacacatgaaattgttcagtgacttcatgagaaaccaaatcagaagattcttcatgaggtacctttatagatggcataatacctctttttatggtaatatcaatctctttaccagcgccttcaactttatcagcagtcatttctttagcagcaacaactgtgtcaaacattcttgataggtcatgaatagaatttaaaagagacaagacaaataagcagaacatggtgttttctttaccatcttgaagaacacctgatgtatagacctgcaacgaatgcaaatatagaggttaagcagaaatcatttgcaaaatttatatagtacagataaccacgtcattacctcttcagagcactgacagatctagtcacacactcactgatcattcttaagaacatgggtaatcttgctatattaacattcttgaatgaaatgagtttctctcttttttgaggggaaacttgtaagtctttattcactcaacacagattggaaacatgctttttgtgcataaatagtatatgcaaataataaaataacaaactttgataaaaatatcaattgatgtatccaacattttccattagagtataactatatacatggtaattaaatagcaagcacttcaatatgcagataaatgtgaccaaaaggaagacagtttcccaattaacatgaaaataataaggaagaacggtaatcctgacatagaattaactccagagaccaacattacaagattacagtgaagggctacacagggttataacttaaaaggactgcttaatatatttgaaagatagaaattgcaccttcacacaattcaagaatgactctgcatcacaaggctgtgggaaacgtacagcaaacttctcaatctgtggacaaaataagagtaacaaatattttttggcatcggaactttgttcgtgaaggtaatcaaatggatagaaataacacataagaacaactgctacctattaggaagacttgtgatcatattataaacactgaaaaactgagcatgaagaggaaactggacatgttcgaataaggtaaaggtgctggcctgaactcatgacctctaccattacacgatcagagcacacgccatttcccacattgcaatagtgaaatcatgacactcaacaaattggtgagtagaatcaactttgacca

SEQ ID NO: 13544 - DNA, 7569 bp, Oryza sativa
ccccactgttggccttttcgatggcaattttcgacagaacttggaagaaactggaatgggctacaggtgtgattaatcatgtttggattagtaaaatatattatcatcctggcttgaagttctgatataattcattgtttagttaattttctaggaaagatccaaattagctgcccatgagatcattaatccttgttctttagcatacacagcaattttctcaatggcttagcactgaattttccctcccacatctggggagaatttgcgttggattgtgtttaacctttttcatcatatgacagcttggaagtggagatgatctcaagagctcacagcatgggttttttgacgactccatatgctttcaatcctgaagaagctgctgccatggccaaggctggagctcatataatagtggcacatatgggtctaacaacagctgggtctattggggcaaagactgctgtcactttagatgacagtgtcaaacgtgttcaagccattgctgatgcagcacttgggattaatcctgacattattgttctgtgtcatggaggtacactttctatttttgataagtcgatggtcacttctcttttgcaatataggattggtctcattctagtacttgaatatggatatacccctatccacattcgtagtatccccacactaggttgttatattttatgacggaggtagtagctatcaacttatcattggatattttcatcaggtcccatatcagggccgcaggaggcagagtttatcctaaagcgcactaacagggtccatggattctatggtgcatcaagcatggagcggctaccagttgagcaagctatcacaaacaccatgagggagtataaacggatttccataaaataagaatgatagttcagacttcaaatatgtcctttgctctacatggtactgatcttcatactgattcaaagaacaataatggaagaggaagccaggtgtttgtgcattgttgtaccatatgcggcacatgtactcgtgtatttcagtcggaataaagaatgataagcgaatgatttcgtgcttacttaataactatccatactaagacgataagttactgtaaccatgacaaaatctgtgataaagaccgaaattttacggaccaaatggaagttcggacttagacgataagcgaatctgtgatttagattttggccaaaatttaataggctcgactttttgacgtgatcttgtcttcttgcggccccatcatttggcttcttccctaataaatgaataaaaataaatttgtaggtaaaattcttatatatgtgtccttgatgaattaaaagtcaatgctgaaaaaaaaactacgttgaaaatatctcaaaatcaatcttaaaattaattttaaaaatttaaattttggttttttttagggctgattaggccatcggatgggagccttagttttagcatttgagttagatgtgggtgggcactgaagtaggagtaggcagcaaacatttggggaactgctattctgcaccgagctgatgaggcacgaacatcggaagctaggccgacggcccgtaggtcggcctcggagtccacacggtcccttccgactgcgatgggtagcgctgcagtggctactgatggtggcccgtgcgaggaggagcctgcccaggtcgccctcacccgaaaaaggagcgggttagggccttaggggggacgaacaaggtcgacgtcttgggtttctcctgcggcaaccgcactgtccttgtcgatcgcccctccttgcataccctagtgacattccaccgcatccacacctgcttcgacgcgtcagtaccatcgcacttgatacctccatgcgcttgcggtgcccaacacacattgttcggctgtgggtggcgtggataggccaagccgccgtcctcctcatcgcccaccgccgaccttatcctcactgctcgccaccctggtgagataggaactgaggggagagagataggtgaggatagataagggtcactaacacgtgagactcacgctaactcaacgttgttaactatagtcaactaaccacgtcggataaaaccagccgctatactacccaaggatctaattcggttttgtgagttgagatgggctatacctggtattgcggttcaggaacgaatttcaaactccacagcaaattgaggtagctaaagtgaccttattccttagggttaattggatccataccactgcaactttgcgaaattaaaaaaaaatgccactgattcactgtgtttcttcgaatggatcgatgggttgcttcattggaccaaagcaagcacatataggtagaaaacagtaaacgggctattgagcccatacccaacccaataaggagaagcagatctgcagatgtgcacgctcgcgaggctggtgagagagatgtcgacaagtgtgacgtccacagtcagaaatttgagtgaaataaaaaaaaaatcagttgagtgacacattgatccccagtctacatgtacctgctgaaatcaatgttgtagcttgtcactagaacattttggtaccgaaatttagtacatggattttttacatgaaaattcgatacatgttacatttccgtcattccgtggctagaataaaaatgcactctctccgtccacaaatatatgaacatctatttagatgtatggaagagtttgtctgatgttcggtcaatgatctatgcgtgctgcgtatatatactatttatatctttaaagttataatccacaacattctaaaacttaacaagtaaagatgcacatcatcatccattagtaattattatatcttaatcctcattcaaacatactatgtcatctatattttattatattctaaatcttaaaaatacgagcatgttaaatcatcattgcatataattccaataatattttaacatatatcttcatcattttctacaatatcctatatacttcatccccacttagttaatgttttctatctctcattaaatcacatcacctcaattgtttctagccgttagttgattaatatatagttcaaattatttccctcattttttttctcatgaagtcacatcaccttacttttttacttttggattatcaatctatatactatttaaattatcacaaaccacatcaacttaagtggtttatagtttttttctccaatgatcattaaaaaaatacaacttttataatcttaatgttagctacataacaagatttcaccgaagtatcaagaacaacgcaagaacatgagaagttccaccaatccgacaggattggggtcgccgtcgccttcgccaccttaatcattgatattgaatattcaaagtttacagtatacctcaacgcacttctctctctctcacgcaataccagtctgacctagaacggtgctcattcggcccattccggcccatacatcatgggattagcaacctggttcgagcaggctagcccgttcctccagacgaggcttctgctttactttgtagttcatccggcactgtcaggttgctgataactgttgatattgcttaatgtcatcactagaaacataattcccagcaataaagccgaaatattctcgttacatctcacggtcacagatataatccacaagcgcacggatataccattgtagcatttcactcggacgtatgccaaggtgtcgtatttataaaatcccaagggaagatatgataagagagtactatactaataatttacatcacttgtatagatcaaaatctatgcaggggttaacaatattcaagggtagaataagttgacacacataaggaattaaccacaatactctcattaaaatataatctagattaagtggagaaaaaaaataagaaaagaatcattttttgtacttctaatatatagtcattttaatatacacttgctagtatacaatcatgcagccaatacccattaactacaccctctggtgtatcgcgagaccacccctggttgtcgagttccttacgacaacccgtcatgaccatccaaccggtaatgaatacggaggagtacccacaccaagaaattgtcttagtattatatacgcaagtggaggaatacccatactgagctgtcaccatcagcggcccacctttacaaacccgcggcatataacatcatttaatggtacctaataatctaagcaccgcgcttacattactaaatactactccacatcgctgcagctgacatagagcaatcatggtaatgaacattaaacccacaccattgcatatctctggtaagctagctacataattatatcgagacaagtacaaactaaagtcggccctcgaataattatataaatgaagtaaaggaccgaaactaaataaagaagaatatttcattaatgaattaagtcttaaaaaagaagaaaaagctactagagccatacccgaaatatcctgaagacttaaaaaactaaagaaaatattctattcctactccactagtgctagaacaatataagtaaactagagtgcactttggaatggagggagtgaggtccttaaatatgttgccaatgacggttatggcggttggaaatgtcaaaaatgccccacaaccgtcattggggagtgatcaggagcgtctacgtgaaaggccaggatgagagaccgcagagagggtttggccgaaccaacctgggttggcccttctggcctgttgcttcctcctgtgcatcctctcacgacttcttagccagtggttgggcccttttacagtggtttaattgagtttataggcccatccaaccataagtctgccacttgacggacgttgagtgattgttcggttattttccatcgattctcctccatttatgcgaagatctctatattcaaataaaattccaagtacaagtggagatagattatttctaataaaatatgcattgcaagtattgctagttctcctttattttggatatattgactgtcgaaattggtctataacgaccttcaacaacagcccccactccttgagctttggcttgcccccaagccaaatgcatttggaaaacattgacgcaaatccacatcatcctcccatgtctcctgcccagcaatgtctctggaccaaagtacaaaacttgattaactagagatgtacctttcctgacttgacgggtatccaagatagccattggaattttcagatgaggtgagatggaagctgaggctgtattgcttggttgaatccagtgatatatttgagttgagaaacatgaatactggatgtatggcactgtcagctagaagttgcaagcgataagctgccttgctcaccttagccacaatctggaatggcccaaaataacaaaaagacaacttgtgattaatgaacatagggctgcaacttcaaataaacccaatcaccttcaacaaattctcttaaacttcccttcttgtcagcataggccttcatctgctgttgagctctattgaggtgctggtgcagtaagctaaccataagttttctctcctttaaccactcatcaagattagggatggaacaagcatcctctccgatgccaaagtggctgagtgggtaaccatacaaacacttcaaaaggagtcttcactcaggcataatgataagaatgttaaaccaaaactcagccaaatacatccaataaccccacttggcaagcatgggatcaacattacatcacacatgatttgtacacactgattcactctttcagtttgacctagaaaacaattggtccctgagttggcttgtaaaattttatccctattagatatgatgcaagcaggaaggccatgtaacttataaacattgcacatgaaagagttggcaacatcaccagtagagaatggatgagatagaggaataataaaatgggaatacatggaaaaagttatcaaccaccaccaaaatgcaattgaacttgccatatttgggtaaccttcaataaaatccatagtattcccttgccatgcactatcaggaacatgcaggtgttgtaacaagccaggatacttgagtctatcaggtttggcctgcaaacagatggagcaagctttgaggatagagtgtatagtttgtttcatttttgggccaaacaaacaaagccttgattctgctataagtaacatgtatgccagaatgacctcccattggactgctatgcaaagcatgaattactttgagttgtaagtcagtgttgtttcccaaccaaactcttcctttatacttaagaacaccattgcacgaggtaaaattgggtctagaatcaggtttgatgatcaatttagacaagagctttttagagaaaccatcatattgatagccatcacagacttcctagagccaaacaggagtatagcttgagatcaggttaaactctcccgaatccacattatgcttcctggacaaagcatcagcagcaacattactgaggcccttcctgtaacagattttgaactgaagacccaacaacttagtgaaagctttatgctgccaagggatatgcagcctctgctcattcaggagcattaaactgtggtggtcaatgataatgataaattccccatggggggagtaggatctccactgatcaactgctaacagaatagctaaatactccttttcatatgaaaacaatcctctggttttaatacccaaagctttgctgacataagcaatagggcgaccttcctaagaaagaacatctcctatcccaccatcactggcattagtctcaatagtgaattatttagacatatcaggtaaggctaacacagatgttttgactaaagcttgtttgagggtaacaaaagcttgattagcttcatatctacgcacaaaaggcacattcttcctcaacaattgagttaatggtttgctaatcaatccaaaaattttaacaaacttcctgtagtacccagctaacccaagaaaaccctttaacttcttgattgtcatgggaatctgccaattaaccacttcttccaccttagaaggattggtagtaaccccttgagcactaatgatgtggcccagataagatagtttgttttgggcaaaagaacatttactgagcttcaccttcatcgatgcaacgtcaataatgtcaacacttggtgaagatggttgagatgggattgaaaatcagagctataaatgagaatatcatcaaaatacacaagagcaaactttctaagaactgggacaagagtgtcattgatggcactttgaaaaatagcaggagctccagtcaaaccaaatgacataactctatattcataatgactagagtatgtttggaaagcagttttatgttcttcctcttctaccaaacaaatctggtgatatcctgccctcaaatcaagctcggaaaagaatttagctcctgataattcatccaagagctaatcgaatactggcattggaaaattttcccctttacagtaatagcattcaattgtttgttatctataccaatgtgtttagtgcaatccttctt

SEQ ID NO: 13545 - DNA, 658 bp, Oryza sativa
atatacgcaggcttcgcagtcaattgagacagataaatgtgtataccattgctatggtggggtgagggagttattttgtacttgtatgttgatgacatactaatttttgggacaaatcttgaggtgataaatgagattaaatcattcttgtctcaaagtttcgatatgaagaatttgggagtagctgatattatcctaaacattaagctaattagaggtgagaatgggattactctcttgcagtcccattatgtggagaagatgatgaggacacaactagctcggatataaccatgactaccttatgtattaataaaccaaatgtgcatatgttctatattaggtttacttgttatatatttgaacaaatgttgctacacagtgagtttcgtgtgttttcgtttgtagaagtacttgcttgggcgaaagaaccgagcgtaaggaatgcatagatgagtaacgaagttgattggggaccaaaccaagaccttctccatgtacacttccatctcacgacgtcacttttggtccatagaagataagagataaagttctacacgtttcggattcagattcgggcctcctgacagcatcaacttcaaatggacctagccgctgatctagaaggaattttggggctcatgaaaacttggtggaa

SEQ ID NO: 13546 - DNA, 14563 bp, Oryza sativa
cgccccgcgcggtgagacggcggctggacaacgacctgcgtggccggagggcagcgggacggcggcgtgcagaggccattcgcatggaagaggatgagggagaagaaaaggggaactttagtttgggttggcaggggcattttggtattttctaaaaattctgacaacacaatacacggtttgagcaacgtatctaatggaaacttaacgggaggggcatggaagggatcaaagcgaaatttcaggggtacacagaggatcgtgtaaaattcgagggtatagaagggattaggtgagttttcatgtgtacacaagggatttactcaactgcaaaaccagataccgggcgtggctcaacttacaaaaccgttcgcttgaggtccttcggtggttttgaccccggtgagtgtggccgtcagtgtggccggcgagcgcagcgggccaatgggctaataaagatgcatgttttgctaattacatgggaacaagctttacctatctgcttgcttgtgccatattatttgatatctgtcctttgtcaaccttgggtaataaatcgactagcttgtgttactttgatgacctagctagaactatatgcttagccatgcttaattaccactaactcagttgatgggataattgtagtattatacctttttagtatcacgacgagttgcgtgctcgagacatccgaccatgtttcattggtcataattatccaactaaaatgtgactgaatggtgggctatgggtgcatggttttgctagtcgcacccatggcaaataagaaccggttcgcgggatgcactggaagacatacaacgcttgccacaagcgggaatgggtaacttccagacttgaagtatagattttctctggctgacgcatccaggcgagggtgggcgtgatggagcgggatgggccctgcgacggcctttgtcgcttccggattcacctaggaatgagagtggactgcccgctgcccgtggggagtgggggtgaaacctgaggtgtggtgtgcttggtcagagggggttatatgaagggtcttgtcacaatcactcgacatggtgatgtgtttggccaggtgcgatgacatgctggtggattgtgtcttgtgggtacagtggtgcatctatggccagagtaaaactatttgaatagccgtgcctgcggttatgggcgatcgaccagaatcaccatgattagtctcacccctaacaaatcgactcaatacactgtaattcaggtaggttggttgggcctgttcagcgtggtgtagcattgttcagtggagatataatgttaccttaattaatcaactgttttactgttttactcaataaaatgttttacaaccgcctttatgcaaatagccacaagccattcttgaatcccttgcacgtctgcatcgtttgtgtggcttgctgagtacggtggttgtactcagccttgctattattcccccttttccaaaagtgtagtgcttctgagctgaagacgaagttagaggaccaaggctcagacccagttgagttttgcctgtggagtggagctgaagccccgctatgatcgccttttccgatgctgctgctttcttttcgatgtgaggactaagtgcctcttctgtaagtatttacgctttatttacatttggaactgtgtattacttatcgttttgtgtatcatggctggtcttggacaggggtttaatacacagaatagtctgaaaatttggggctgttgatggtccttaaatcataatatctgaccgtcaataccgggatataatgaaataaaacatagtatccaacttagttgtaggtattattactaatcatttccactagtgttggtgaaatatgtgtatgcaggtaatttgaggagaaaatatatccgtcgtgtgacaaaatgcacctctgcgcattcaggacgcatttacacggtttagaggcccaataagtcaataaaaaccatttagaattgggccaaaacatagcccaggttattgggggcccattaagcaacctaccggccaaaggagaggccgggaggacactttttgggttcggccgaaccaaccagtttggccgaacctgttctgcggctgttcgccatctgcttccatgtggacagcttggattccttcccagaggtggttgcagggtgttttggacaattcccatgcccctaaccgtcctttggagcctatataaggaggagcttactcacattcgaacacacacaactttgagttgaattacgagaggctctattgtatcttttgtacattagaataaggtagagagtgaggggaagctctggaggagtgcccggaagtttggtgctaatccgacttctacctcgacgagtgtagcttcctaggaggaattctggaggagtaccggagctgtcggtacactctgcgccgggttcggagaacttcttcttttaagtaagcatttgtgttcctttattttgttatttaattatttagtctgagtaagatatatttccatatttgcgggttcattgtttagtattcgtactaagtgctctagaactaggactctggatagagaaagaggttcctacgcaagtattagagtagtaattaataacttaggcgtggtgtctaggttagggactacctttgtttgttgtgtatcccacggatttgtcagaggtaggcgataggtggtgacagcctgaattccgtcccggtaatcctccacgttcggatacatcatagagctatagccagaaccacgctggcagaccagcaggggtcggtgcctgaagcaatagataggaaattatctttgcttatcttagataattaaaacacatagaaagtcctctctagcctgcctacctttagtttttgtccttggatagtcttagccttagatagatttcacacgttccctgagttcgatatccttttggggtcaccccattagttgttaatttatccaagtctaggtcatccttgtatctttttttttatttcttcttcttttattcctttccatgatggagcaacccacaattcaaaacctttctgctcctcgggttgatctttttgagccatcctgttcttcacaaccaatcctatccgatggctacgaaatcagtcctggctttatagcaaggttcgagagaaaaccttctctggtagtatcggtgaaaacccatacctccatcttcgggactttgagctagtgtgttcttgcctatccatgtcgtaggcatgacacatgaaacttttaagtggaaattgtttcctttttctcttagagatgaagcgaagcaatggtacaatctgtctgtcaagaaattccacggtgaatgggaggagcttaagcgaagcaatttctgccttactttctttccactaacccgtgtaattaatcttcgattagacatcctctctttccgatagaatgagaaggaatctctcggtgctgcctgggccaggttctcactgttaactcagtctggcccagacttgtctttacccgaccatgtgttgttacaacattttcggtactgattagacaaggagtctgctgaaaatctcgatatttccgccggaggatcattcgcacacaagacaactactgaaggaagagaactcttagatatgatcttagagaacgattctttcggctgaagcgaagcaatcccagaggtcgagattatccatgaggaacctctgcacgtcgagtcggaatccgactctactgctgaatcctcatcccagtcgcaggagccggaggaaaaagaaattcatcctccggaaaatccattcaattcgaggaggatctttttgatgattgttggaacacctcgaattattcctacgacaagagaccaccgaccaaggtcaattctaatgatcctctcgataaagctatgcttaaagagacggtgaagaagttgaccaccatcatgagtaacaaatggttgaggggaggagagctctcatgagaagcaattcagatccgatgcccctcctcaaccgttacgtgtctcattggagggaaattggtccgtgctctctatcccatgacatatagcgagtgggttagtcctgtccaagtagtgcctaagaagggaggcatgacggtcattgaaaacttgaacaatgagttaatcccacaacgaaccgtcatgggatggaggatgtgtgttgactataggaaactcaacaaggctacgaagaaggatcactttccactacctttcattgataaaaatgcttgagcggttggcgaaccattccttcttttgtttccttgatgggtattctggttatcaccaaatcccatccatcccgacgatgaaagtaagaccacgttcacgtgcctatacgaaacgtatgcatatcgaagaatgtcgttcgggttgtgcaatgcacccgcgtcatttcaaagatgcatgatgtctattttctctgacatgatcgaggatatcatggaagtcttcatggacgatttttcagtctatggtaaaacttttgatcaatgtctggagaacttagacatggtcttacaaagatgtcaagaaaaggacttggtacttaattgggaaaagtgtcacttcatggttcgtgaaggaatagtcataggacatcaaatctccgaaaggggagttgaggtggacagagcaaaaatcaaagtaattcaacagcttccacttcctgtcaatttcaagggagtccgtggcttcttgggtcatggggggttctacaggcgcttcataaaagatttctccaaaatcgctagacccctaactactttgctagctaaggatgttccatttgactttgatgatgagtgtatgtagtcctttaaaattcttaaggaatcactcatctcagtaccaaccccttgattggtcgttgccgtttgaaatcatgtacgatgcaagtgattttgctgtgggagctgttcttgggcaaactaaggataggaaacgccatgctatcgcatatgctagtaaaacgttgactggagctcagcttaattatgccacaactgaaaaagagctcctagccatagtgtttgccatgataaattcagatcttatttagtgggagctaaggtaattgtttacactgatcatgctgcactaaaatacctgctcactaaaaaagatgcaaaatcttggctaattaggtggattcttttactccaagaatttgacattgaaattaaggataaaaaaggagtagagaattctgttgcagatcatttgtcgcgtatgcaaatcactaacatgcaggagctaccgataaatgactatctgcgagatgacatgctgctgaaagtaacatactctgacccgcggtatgcaaccattgtgagcttcatggtcgcggggcatgtgccaccgggagaaaataagaagaggttgatctacgagagccacaggcacttgtgggttagatagcgatattgccagagattatgtaagatatatgataactcgatgaattacataaacaagattagagtgtcataaaaatggaagcactaatcccgagaacacaagctgccataacaagttttacctcttgttgaagatcgaaaccgatgcagctcaacccgaaagcaagaactcgtcgaaacaaaacaaaagtagaaagggtggcgatgcgccgagattgtattgaacatgtgttagtttgtttacatggggctcagggtctatttatacccgagaattacaatatatgtccatatcggacacgactattatttctaacaaactataagataccataagtctttgcggcagacttttgcccaaacatatctctaaggaaattacataaaatatcctaattaatagatacagttgccttctcaggactctatccatgcgtggcaatcatcatgaagcacgtcaacctaacccgacaacatatgccatgtcatattgtcggactcggctcaatcggctaaccctgtccgactcgaactctaccgatcttagtcatagccgattgggactttagccgatcttcactctatttccgggacaatctctatctcgatttccatctcgattcctcctttacatccgatccttgaattaccaaatttggtcgttaacaaaggtatatgtactctctctcagattaaataatctttggcacgatggcttacccttacccctgattcccacgagacactgcttctccttgccttgggctgttgaaagacagaacagcaattagagcaccaatcacccgatctttattcaacttttgttccggaagttttcaaatgattttgaaaatgaaaaccaagttcctcaagtgattcactcagtctctctaagtgtatcagcatgatttcatcaccaaatgttgccttgttgattcctactctaaggttttgatatgtggagctcagtagggatcaaacatggcatacttgcattcacatttatcactaagtcaaaaacttagactaaagcagataactaaacatactcaagatcaagatcgtgcataatgtgtgtgtggtatatagtggaaacggtatatgaggaaaaataaaaataacaaaatgcttctcctttgtgctttactttcttctcccagaaatccttcttttattaattaggagagggcatggctacattttttttcaacatcatgtcatgcttgatggagcataactttattatttatttttttttataaccatgcatttccctcctctcttttttttcaaaaggatttttctttttaggagaagaaagcacatggaagcatggagaatttattttggtggaaatatggaatggaacaaaatattgcttagctcccagtgtaggagtttagcatgtgcatatatgtgggtgtatgatcttgatcatagagcatgagaagtatctacacaagtcacaagagtttgacaaagttcaatggaatggcaagcaaccaaaatgtatatggtgtaatcatgatagcacatttttggctctggtaggaatttatatcaaatgaggaactttcaatttatcattttaaaaaacaaaacatccggagttcaagtcaaactagtatcaggatcatagctactcatatttactatctcatatctcgcaacaacctagacttagatcagcaagtgtagcccatttacctcaggttcccagataattgttggctacttatattcaatctttgagagagtacttaccaagaacccatatatcagagatataaaacagagcaactattcatcatttcaacaaagagaactagcttgtcttacctagcatgactcaaacctatcctatctttttggtattttctattttgcaaatttttattttgttttcaagttttataagatgcaattggaaagcaaatatgcaattggaaaggaaaatatgcaatgtgatacaagttacctcagtggggggagcgatgtctccccccaagcttggctttcgctcagggtccttgataaggattgaacccctgaaagcgaaagtacgcctgaaggtcatcatgctgttgctgcatcatgttgttgatgttggtgaactgagcatcagcagattgttgccattcttgcgtttgagctatgtgttccgtgaggttgtattggatctcccccgtctgcacatcaagggtgtccattctcctagtgatttcacccaagtcctaacgagaggaactcgagcgccattcacttggagatggaggcacaccacttgatctggaaggttgattgtctccccagtggatgtcatgaggcgcatgccaccggtcctcactggcgcttgcccaagttgagagtccatgctatagcgtagagcttgggtccatccgggtgcatccccagttggtgcccaacctgcctcataaatctacatgggtatcgaggatgatgaacttccttgttcgttccttgtcatgttgcgcgtctccatgtatgttccacctgcacgagattcttctatggtttgcaggagaatggttagttcatggcagttgtacaaatgataccctgcatttggcaacgggatttcatttgtacaaccggggaaaaagtatatcaaagatccatatgctacatgtttcaaaatatgcccttgcactagataggcctcatcaatacgcggacgagtggctgagataaaaacaatttggtcgctaacaacccctagcccttttgctatccgagtaatcatagaagtgcactcaacaggagtagagaactttatactttctaaccattgccttatcatacatttcgcaggagaaattttgatctttctaaccatggcaaacatgataattaattcatctcccctaatgggtctcagatcacttctaggaaacaaagtcatagcaatccatttgtgcatgagcctaagtgtaggattatggatatcatttgttctaggtttcttgcaaattggagcaccaaaaatatcttcccaaaacctatttttctcgaacccagaaattcctttctggagatcgattttacaggaatcgtgaaaaccaagaagtgtactcaagcctttccatgtgagcgtgaactccttacggaaaaagcgaaaaaaaatatcatcttctatttctttcaaagtgcatagaaattgcaaagtaagcaaacgagaaccgggttcatctaccacagcaaatctctaccaaccaatagctttccaaatagaacgaaattcaacatccatacctatctttttcagcaactccggtgagtattctcgcgtgtgagcatactcccggtcgcttcgcatgtagtaggcttgtctctcccgatcactgacaaggtcgaggtcagtgtcactcaggagttgtcgcggagcgtcggcgtcttccatcgaaacatccgctgatgaacgagtgctagactcgccatgatgacttgatggagagcctgaccccttgaacagacgagacagtcgcctcctcatactgcacaatggagcaagaacaggctaactcggcgggggttagaaatgacaagagtttcacccatcggttagtttcaccaaagcagcttgtatatatgcaactaaatgatttgaacttgaggaaaactatcaaagcatgaatgaacttgagagcaaactttggagagggaatgaaaatgtgttgaaatggatggaattccctctctcggccggctggcttctatagggtacccacaacggtcagaaatgacatgtgggacccactagccgttaccctgccaaaaatggaaggaaaccgttgcctggccggttcggccgaacccctggtaggcccaaccgaccccactttcgttgaaaattttattttggtttcctccgaaaaattcatttgaagaatttcctccaaattcaaaaaccctaaatgcaattttgaaattcaaatatgtggtgatgcaaaaattcaaatgttgaaaacaaatatgcggatacataccaatttacctgttggcgaaggtcgcgtcatttaaagtccaatgtgcaagaccatacctcctttcgatttagctcacggattttccacccatctccggaggtgatggagcgggcgtctttggcttttccctccacaccttatttgattttggtgcggtagacggcttcttctgagccggttgctctaacttcttggccggtataggtgattttaccggcatcctccaataacggttcctgttcattgttgtttccttttccaggaagttctgcatgaactttaccaggctatccgtcttgggtggctccaattcgaccacttgaatattctgcgggttcggtccgtacttgattctgaccatggagcattgttccgtccttggttgaaactcaaactcttcctccttcccgttgatatggaaacggatactccccgttcccacgtcaatgttggctcctgcggtgctaaggaatggacgccccaagatgagcggcgtcttcttccccgtgtccatgtccagcaccacaaaatcaaccgggatgaagaaatcctgtattttgtctggcaaatcctccgttatccctgccgggtaacggacggactgacgagtcagccagttggaggcatatcggtgttggtgccaacaccgtgaagttgagcttgtcaaagatgtctttgggcatgacgctgacgctggctccaaggtcgcacaaggcctggtcgatttgttgtgccccgatcgagcaggtgatcgtgggacaccccggatctttcttcttctccgggagcttgtggagtatgatgttgctgcaatgttccgtcagcttggccacctccgttgttgggagtggtctcttgttgttgagtatgtccttgagataacgggcatatgttggcacttgcatagcgtccaacaacggcacgttgatgtggatcttttggataacttcaacaaaacgagcgaactgctcgtccactgacggtttcctactccgctgagggaatggcagcaatcgtgtgtcgcagtactcctacggcacggtcttctctggctgaatctccttgttagccgagtcagtagatgacttttcttttgacatcccattagttcctgcagggttaggatactacggatcacgagtggacttacctcccctcgttgtgatcgccttaacattttcaatggaggagtcgggttgccccggaatcctcctagattcatttgcagggactaaagatgccaactgagctaactgggtttctatcatcttattaaagctcagctggttttgaaatgcggaagcaaagccatctagattcacatttatgttttctaagatcttatcattggcagcaagctttttgcttagcgcatcagtggttttagcttgcgcaaaatcaagattctaggttggttagaggagttatcgttattatttcctccttgatcatacgggcgtggttggttccactcctgacctccttgtggacgataccagttgttcttgcccatgtacatcacctcctcacaggtttccgggcattcattcccagaatgacccgtgccgccgcagacctcacacgtgacgtgagattccaaggccttaacggtgccttgtggccgtttctcgtggtcgtccaagcgtttcatgaggagatccagcttggcagcaagtaactccgtctccttgacggtgtgcatgcctcgctaacgagtctggagtcgttcctcgctccaacccatattggagaccatcttctctatgagttgaacggctccttgaaccgttttagagaagaacgctcctctagttgccgtgtccaagtgatcgcgggacatcggggtgagcccattgtaaaagttgtgcaggatcagccagtcgtccatcccatgatgaggacaggcggccacgtactcctgtagtcgttcccatgctttaggaatggactcatcccttgtctgctggaaactagaaattcgtccacgaagggcattggttctgcccatcgggaagaactttgagaggaatgccgtagagcatttatcccaattgttgatagcagtacggttggcatagaaccactacttcgctctcccgaggagggagaacggaaacagccacagcctgacggcgtcgggactgacacccttgatggtgtatgtgctacatatctccaggaattgctgcagatgagcgttggcatcctcattaggcttgccacagaacgggctgttgatcctgaggctttacaagacaagggctgttgatcctgatcctaggcgtcagagggtgaactatttgaagaatctgcccaagtgtggaaaggatagaatgatgagtcctgacacaatgcctgctgactctcaggatgacagattcaggaccttggtacaggttgattggtataattctgtgatcatgggaagatctcatccagtggtagagatgaagtggctagactggcagtacatgttctcgaagaacaacttagttttcaatgaggtgcgcaaggtgtgtgagtgcaagcacgtggcagatctgttggccttgcagtattcctagaatgaggaagtgattggtcagctctactccaccgctttctttggcaccaccaagaagggccatgattttgtgaagtggaccattcaggtgcagcagtatagggtctctatggcacagtttgctacagctttggggttagatgatgatgacctgaatcgtccacatatctttgtagaggatgctttgtcaccgaccagcactactttcttctatgagaaggatgctcccaaggattgtttggggactactcgtgggttgcgtccatactatagagtgttgtattctatcttcaggtggcctttgctccccaaagtgggagatgctacagcccttccaggtaggcatgcgctcctcctcagtcgtatgcgctacaacaagccagatttcagcatcatgaagcttatctggagtgagatctatgagacagtgtgtgagccaaagaggggctgcatctatgctccttatatcatgaagatgattaaggcaaagactgggatttgttatttcaaggacaaccaacacaagcctttccgtcctcatgctcccactacttcagctactccttctaccagggcaactcgtgcttctacctcagctgctccttcttcctctgctgcaccacagtgttctgagtcttcttctcccataaagaaggctctccgggctatcttttgtatgtgtgctaagaccgctaagaaggtgaagaagatagagaggcgtcagaaggaagattggattgcagtaggcaaggatgtctctgatatttttgatgatgaggagtttgttgatccttttgctgcttatgagactgctcgagacattgctagtggtgagggtccctctggcatttctcattccttcaatgaggagtcctcccactccgaggagagcagtgatgatgaggagtctgatgcacctactgagaatgtacctacagatccagatgaggcagtggacgccgccgggcaagacatcgactctcctcactccggcgacaccgagatcattccttctgatggcgatgatgatgaggcttgatcctcttcttcccttgtgattttgtctctttttggtgcctttatgccaaagggggagaaaattgcaatcgaagggggtcaaaattttgttttcgctgcttgctgcctgctctgtctatttatccggaagtttcggatcctcttatccggaagttccgaacttggcagctccctcgctatatattcctgttagcttgtccagaagttccgggtattttatccggaggttccagacctggcagtcctttggcctctactcgtttggacttatggacatgtagtaattctctaattgtatggatgtaatgactgttagatgctcttagctgctctttatatatgctgcacttcatttatgctatgaatgtcttatttgttgattgtgatgtgacgttgattttatccttttgaatgctcaccatgtcggatcttttgcatattatatctattcttactgcttatttgcatcccacgaatgagtagagatgaaggaaactctcttcgttttctcccttatatatatgcatatgagcatcactcatatcttctatatgcatacattaagggggagtttcattcacctctaaccattcaaaacaaaatttatttcaatcttttgtaagctttaaccatgttgtcatcaatcaccaaaaagggggagattgaaagtgcattaatccccctagtgggttttggtgattaatgacaaatgtggttaagggactaatgagtttattgagctactttcaggtgcattagtccaaggcgtggaagatggatgcttggagacccccccccccaaaagtatagaatcaaagcggaccggaactcgagaagtgcattggatagtttatttaattgcaattgagttttaggaaaaaccgtactattaagaggggttccaggtggtgctctgagatatgtcaagtgctcttagtgtgaaccaagtgtcaaagtttccctatgagttatttttgcaaatactccatctgtccaaaaatgcaagtccagaacttcctatcttccaggtccggaagttccggtctgatgaaagaaattttcctaagtgttatccggaagttcctgtcttccaggtccggaacttcctgtctagtttccagttcaaaattgtgagtaacggctagatgacgtcacctagccgttatacatatacagctcgtttccagctcgttctttggccattccactttcacttttcaaacctagaactgttgctagcctctcccaagtgtttcttgccttctccactcaatctaaagcgtaatttttgtgagaaagacagattaaaagggagagaagaagatttggacaggtgtcaagactaggatcttgggtgagcacttggaatatcacatgggctgtcatctcggtgcttgtgactcttgaagatgatctcctatacggttaggtgtcgcccgcaagcacccatcgcatattgtggatgtcccgggtaagtttgtgaaggatctcctctc

SEQ ID NO: 13547 - DNA, 8075 bp, Oryza sativa
cccagctctttggaactcctcaatggagagtaggatcgcaagagccgaacttcggaaaaaaatcgctcttgtctctttctgtgatgtttctttgatctatcctctgcttagaatacctgcgcaccatcttgtgaagattggcttagtctcctgtttcgaaatttcaatttcttctttcatctgttatccgaaagttcctgtcctaagaacaccggaagttccaggcctggcaggccggaagttccggagttccttaccaggaagttccaggtctgtttgaattttaccgctgcgatttgtctttaagtttttagggacagcctattcaccccacccccccctctaggcttaatcagcgcgttcacttagcacttgtttcaccaaagtacttacatcacatgcatatgtggaaggtgatgtagcagtcatggtttgtctcccgtccaactttatctcatgtccataagaaatgtaacctgccattgttagtagaaaacagagaacaacagaatagtattatccctattaactacagaacatggattgtagtggaggctagcaagtggaaacaccttaccaagatcttacaagtgtcttaccagcaatgctaaagacggtacaaccggtggctggttcatgtcaccttgaaggacgtgatgtggtgattgcaaggatcaaagtggtgcgaaccagaagtatatatgtggagcttgggagacacaatatatagtagcataggaacacaattgtgctaatcagaaaattcagagttgaataatagttcaaagtactagtcaatgcgctggcctagcctagactcaattctagctcaagcaagcacccgacaacactaaggactagatataaatcaatgcacaactttgcactctcaaaacatactcaaaagatgattgattttttttgtgcggtttttttaagcatctttctgcattttttttatatttttaggcgcggctttttttctttgcacctttctggcttttttttcagcaggaacctttcaatgacctcaacgagggactcaaatgtaaataaaaatattatagggagtcaaatgcaaagtgcaaaactaaaattggatcacctcaaaaatggaatgctcacatcatgtaggttccgtttttacaaaaatatctcaaatctacaaccaccaaaatacctaacaatgtggtgaccgaggagaaggctgttgggatttcttagcgacactactggaaatataattcccagcaatagcactagaaataaccctggtatattatggtcacagatgtgatccgcaagtgcacagatataccattgtagcatttcacctgggagtattccaaggtatcgtatttattttatcccaagggaagatatgataagagagtactatgctaatagtttatatattacttatatacatcaaggtctatgcaggggtaagttaagcttaagggtagagtgacacacagctaaggatttagctaattcctacatctcctaatcatggctaagtggaaaagtatagaaatattctattcatgtacttctagtatacaagtacctagtctatcctaattagtatactctactgtggcataacccctttaacaatgcagcacagctgagctgagactcggttgtgccctcccgatgcatcggaaagttaccccgggttgccgagttttttacgacaacctgtcataaccatccaatcgaagaaggatacggaggagtatccaaccctcggaaattgtatgtaggaatataaactgtggggaagactcccgtactgagctgtcaccatcagtggcccgctgctcttccggcgaatatactcccaaataatgataagtcttagcctaaaccccatgcttaagctactacttattactctgctgtcatgcctagaatttctgggcgtgacatctgcagccttgcaattggtgcagagcatctatgtcccagaaccatagccctcagcttagcctaggctgacgtatggcccggtaaacagacattataccagcatcaatgcaaatcccagaaggtttaaccaacgagattatactaaatataaataagactaagcatagcactcatattctataattggataaagtactaaacttgtataaaaagaagaacattatattactgaaaaggaagtcttacaaaagagaaaaggaaaagctaagaactataccgaactctccgaagcttccgcggactccgaactattctattcctattccactagcactatactaattctaacttcggagaaatggagcttcaatccttgcttgtgtgtgttgtgaagtgagcatgagagctccttaaataggcaggtatgacagttgtagagcatggaaagtgttggaaatgccctgcaaccgccatcaggagttcattcggagcgtccacgccaaaccctagcctgaacggctgtgatctggcccaaacggcccaattcttggcaggccgactcctcatttgctcctcattccaaaacatggaattttgggcttaattgatcatgtcttttctgagttcttagcgcatctatccataagtctgatcctcgacagcatctgattgatcgttcatctattttctgtcgattctcctccatttatatgtgcttctcctgtatacatgttagtagcatagtatatagtggaagtagatattttatttggaatttatgcattgtaagcatagccagtcttcattaattgggtaatattgacagtcgaaacaggtcgataacgaccgtcaacaaaggcacggaagaaacccatgaggtagaggtgggggtcagccgtgacaaggagctggagtcggactactgtggaagattggaaaatatgtggagattttattccgtttgacgacacagatcagataaccccctgtagaaaacaaactgatatgccaatatgtttctctcctcaacgtgcacacaaaaagcacgacacagaatagacatggcaacagacagcaacacagaaaccctagtaatctagcaactccaaaaccgctcaaagaaaactccaaaccacaaaaacggaaacctgatgatgagtagattcgatttttcaaggtcccgacaacaaccgacgagatgcaaaactggacccaaactgatggacgtgactaacccaaagcgatgtacaaatgcagtactcacaactaaaaattaaatctaaaactaaaccagcactcaacacgaagatgcaatctaaaattcaacaacgcaaaaactaatagaacaatgcaatggatcaaattgtcttggtaaagaataaatatttttgcatagcaattttttggttaagggaagataaattatctaacggcaatctggcgctttgataccgactgatgaggatgttaggtctcgatcttccgattgttactgataaacagtcgatttgggcagagtcgcgacacactcgatccggcttctgaacaaacacgctactgagccccgtaatcgcagaaccacgtctcctctggttatcaaccgtaccgaaactcagttgacctcgccgagaaggttaatccctgcatgcgaatcgaaaaacacaagaaagaacaagatatattgcaaccaaattgcacatgaatgattaagcactcgaatttggggttccacaaaccgatctagcggcgaaactgttattgatagattaatttaagcaaaacccaactctaaacgatgacggctactgaatatatatgattagggaagtcctagggttgccctagggcgcacacccccttgggctaagcccacgacacaattacaaggcccaaaacccaaatcagattcggactggatgagatacgtggcttgttttgcagattcctggcagctcggtaggaattttgacgtgcgacgaaaaccatctgaaagtagactacataatctttccaataagtacttatgggccccaaaattccttctatatcagcggctaggtccgtttgaagttggtgctgtcaggaggcctgaatccgaatccaaaacatatagaacttcatctcatctcttgtcttctatggacttggtgaggtagaagtagacttggagaaggtaatggtttggtccccaatcaacttttttcatcatccatgcattcgttacgctcggtctcttttcctttgcccaagcaagtacctctgcaaaaaaaaaactcacgaaactcattgtgtagcaaagtttgttcaaatatataacatgtaaatctaatatagaacatatgcacctttggttgattaatacataaggtagtcatggttatatccgagctagttgtgtcttcattacgttggttccaaagaggagacaaatgaatagtgttgacaaaaattagcgacacgagagcgagtggttaccctctttctaatgtcaccaagtatgttgtcgacgggatgatctctttggacggtgtgatgtatccttggatggtgcactgggaggacctaaccctgattaagatgctctacagtgccctcggcatcaatcccattcacttgtgccgtaggcacgccttgactatcatcagtccggaacttccgggctgatggtttcgaaacttcttggcatggagaggcccggatgttccggtcctcagtccccggaacttccgggtctgctgacagtggacttgatgtagggctattgggtgtcgatgacggaggttgatccctatcttcttggtcatcctgtgtctcgactggtcgtatatctccaatagccttagtaccaattgctttgctaggatccgcatcatctacaacatgtacaacaacatgctctcgttgggagccattagattcatcaaatgtcacatacgtagtaacttcaacaatactggaggttttgttgaagacacgataggcatgtgtatttgattcatagccaagtaagaatctcttatccaccttaggtgagaacttagatgaacgaggcctcttactcaagatgaagcacttactcccaaaaacacgaaaatatgaacatttggcttcttaccactcaagagctcatatgaagttttgtcacatcctgattttcatcttaggatttataaattatttaagaaattattattagaatttatattaaatgttcattaatttacaactgaagttaaatgtgggaaatcaaatttcctaaatataaagcatggttggatttaatttttattaaattctccatgattaattatactctctgaaattttttcggatttttcggagctcaattcttaattttaatcatacaaagaacatttcagtaattattcacatattaaattaatcattaaatggtcttcttataattttattaaatacttatagtgttcaagtactttcaggatttttcttgaaattatttgagcaatataagtatttttaacaattcaaggatcatttcagtgattaatttaattggaaaagtaattaaaatccccttttcattttcgggctgaaactggaaaagtctatccgtcatcctcagcccgtccttcctctttgcctgtctctgcttcctgtctccttctttctcgaagaagtctattacttatccctctcttcttttcttttcagaccagtgaaaagtctacttttcctccctgtcgctgttgttcatcttcaacctcaggacagccgaactgagaccgagttggctcggtttttctcctccgaatccggccttatctctcgtgtattccgaaaattagttgaggggatttgtttcccttatcctcctctatctcttcccccaaaaatccagttttatccctttgaattcgacgcgaatttggattcgtttgcgagtttatctctccaccaaaccctaggttttcccggcgcgattccttgcgttccaagcccgatctctctctcccatggctataaatagagtcccctccctctcctctttcgtttgccaccctcgcccgagctcgccgtcggccgtagcgccctagccgcgtctgctctagcgccgccgtcgccgccgagtttccagccgcgccacgccgcctttgcagccgccttctccagtcgctgtcgccaccatcaggttcacgaggaggagccgcacaccgtccaccactcggccgaagccgaagcccgctggagcgccgccgacgccgtcaagccgagctcaccaccgcctcgatctcgttgccggccgtttttcattgtcgtccttcgtcgtgccgcccctcagtgagtttcccacgtcgtgttctttcttctggtgccttcggtttggccgcctaaaccctccatcgccggcagtggtgtggtccagtaccatgcccggtagtgatgtcgtcatgacatcattaatccttttttgtttaaggctaaaatcagatttatcttgtaaaattcataactaatttatttgaagttggaattaagtggttcaagtctctaaattcatctaaaatcatgatttacatgtttgtttacatttatgtactagccgcgccacgccgcctttgcagccgccttctccagtcgctgtcgccaccatcgggttcacgaggaggagccgcacaccgtccaccactcggccgaagccgaagcccgctggagcgccgccgacgccgtcaagccgagctcaccaccgcctcgatctcgttgccggccgtttttcatcgtcgtccttcgtcgtgccgcccctcagtgagtttcccacgtcgtgttctttcttctggtgccctcggtttggccgcctaaaccctccatcgccggcagtggtgtggtccagtaccatgcccggtagtgatgtcgtcatgacatcattaatccttttttgtttaaggctaaaatcagatttatcttgtaaaattcataactaattcatttgaagttggaattaagtggttcaagtctctaaattcatctaaaatcatgatttacatgtttgtttacatttatgtactatttatttggtttttattagtctttttcttcattttgcgtgttagcttgtcgttttcgtcgttgcgaaggttcgcgagtgcgtcggaagagattcagaagactaattgaagaccgattattgcaaggcaagtcacacagatcccaaacacaatcctttaagcatgttgatcctatatttaaattatctatttatttcaactgtgcatttattttcgaatgtcaccgggtggtgtgaacctattcctttgttatggccaatttgcattgaataccctattccacgataccttgggtaatgaattgattagcttaaaccttatatattggtttggttcagctaaatgctatatatataattgcttagccatgaacattagatcgttaatgggatgactcatactacattattatttatgattatatttaatggtagctcacgatagtcaatcgtgattggttaattaattatttgccaattaaaatttgacaatggtgggttgtgagcacatggttttgaaggtcgtgctcatgacaattaaggaccggttcgcgggctactgttgtgagacattaaccgtaccaaccacaagccagcgtgggcaacggctttaccttttgtatagcatggttcattacggggtgccagactaagaagtggcgagaagtccgtgggggtcaatggggagtccatgcctctggttatatttatagaggggttgattatgatccaagaatggtgcactgtggtgagttgtgttgtgtagagggtattgtcacagcctctattcgggtactttccagcatcgcgacgcatggtagacatgatgttgaggctgtgtcttgtgggtatagtggtacacatctggctagagtaaaactattcgaatagccgtacccgcggtcatgggcgggttgagcaatgtttttcgtgattagtctcacacctctcacaataattattgatgctataactggtaataatttgcttagctcctggtttggaattagatctgtacaaccgggtatggttgttcagaatggttgggcctgagcagcatgggcgtgttgttcagtgttgattaaaattaatgatt

SEQ ID NO: 13548 - DNA, 2581 bp, Oryza sativa
atccttgtgcacttgcatatttgctgtgtagcttgcggagtattccatgtactcaccttgcaataatcaatcaacctcagttaaagaaaaatgatccagaaggagaagacgtttggcttatacctcagttaagctgcctgtgggagtggagctaaagccatcgctagatcgttttttcgctgttgttttcttttcttttgtaagtatgtaacattattattaaaatggatttatatattaaattgtttgtttgtgtacctcggctgattcctggacgaggattttatgcacaaataagttcggaaattactagtgaatttctgggcgtgacaagttttctttagaagcttgtggaggtagaggcggttgatggcatggcatgcggtgctcacggcctccgcccaaaagatatctgaagtcttgtagtcatcaagcattgtccttgcggcttcaatgagggtttggttcttcctctcaataatgccattttgaggaggatcatatggcgcggagaactcgtgcttgataccctcttcatcaagaaattcctccacttgaatgttcttgaattctccaccattgtcgctttgcaccctcttgattgtgagataatagaggttttgaggttgctctacgaaacgcttgaagacatcttgtgcttcactcttgtcatggagaaaatacacccaagtgaagcaggaaaagtcatcaacaacgacaaagccatacttattacctccaatacttatgtaggccacgggtccaaatagatctatatgaagaagctcaagtaggcatgttgtagtcatgatgttcttgattggatgcagactcccaacttgcttcccagctttgaatgcactacacacacgatctttctcaaatgtaacattagtgagcgcgaggatgtgttccccatttagaagagttgacaaattccgcactccaacatgggctagtctacgatgccatagccaacctatggaggatttagcaatcaaacaagcttccggattcactctatccacattgaaatcgacaagatagagatcacccttcaactttcccttcaatgcaacggaagagtcatctctcctaatccttgtcggtaaacaagtaattgtaacccaacttacacaattgtgacacggataataaattatagcttaatgaattgacaaggtgaacattagagagagattgattgttggaggtggcaattttacctagacccacctttcctttaccatcatctccaaaaacaatattctcacgagttcctccctcctcgtcaagacttgtaaacatactcctctttccagtcatatgattagtgcaaccaatgtccacaacccaactcgaaccaccggagaagtatgcctacaaaagagaaataaagcttgggatttaggtacccaaacttggcgaagtttgggtcctttaatgttagtcacaattgccttgggcacccacacacaagctcgatactcttcattttaatcaccattaaaacaagcgaccactttgccctcaagattcttttttttttttgagaattacacagtacaacgcagacactcataatgcacgcgcactcacccctatgaacacacgcacgcaaaccctacccctatgagcatcttcgaagactgggccggcgaattctggagagattgacgaagtcaccacaggcgcctcgatgtcgacgggtacgtcgcctaccactgaaagcacaacgccgttaaatcctggaaaattcgctcccatggggagtcgaacccaggacatcaggtgctactgaggctcttgtaaccactaggctacaggccctttcgcggccctcaagattcttgatgattacatatgatacatagtacagaccagctggccggagcttcctagctttttgcccggaacctcctgtcagcctctttgtcttgccagaggtccggaacttccggtccaaatgatcggaacttccggaccgggacctctgtcctgccaggaagttctggacattttgtccggaagctccgagtctctgaccaacaaagggtagagtcacctcacttgcttgtgaagcctttccttctcttacaaacatcaagaaaatcttcccattcaccacaacacgtttggacacaggactttcatcagaaaaaccaagctcatgtccatctttgtttggatttgtagcgatggtcttgtagagagcgtctttggagtggtatgtcgaggtccggaactttcggtccaaatggtcggaacttccgaactgggacctctgtcctgccccacctgtcagcgaatagaagcgcgcgcgagcgggcggtggctcggctgcgggccgacttgggccggggaggagagagagagggttttgggccgactttcggcccaaagccaaaaggaggatttttaaaacttttttcaatttcaattattcatgaaatgcaattccaattattaaaaacacttccttggctcaagtaaatcgaagaaaaatctaggaactatagaatcaagtaaagtatttaataaaattttatattggaatttattatttaaaattagatcttct

SEQ ID NO: 13549 - DNA, 4712 bp, Oryza sativa
aacagggattagcattcttggtgaggtcatccacgtttcgacacgggtgataaccagaggagacgtcgtgttgtgattgtggggctcaagagtgttgacggtcattatcgaccaattttgaccgtcaatattaccaaaatagagaactagtgatgcttgcaatgcatatatatatattagaataataatattccactagtattaggtttactaaccttttttgcagagaatgacaataaagtggaggagaatcgacatcaacatagacgataaattaatcggacaatgtcgagaattagacttatgtatgaatgggccaagaactcagaattgacacgatgaattgggccaaaattcacaagtctgcgaagagaagcaacagagaaggccgccagccgaaccctccttagcacagttggatccaggtttcggctggacggcgtggatcactccccgatgacggttggagggcaattttgaccattccaactgccacaaccgtcattggcagcctatttaaggagttcctctcctcacttcactcacacacctcaagcaagctttctcatactctcaaagtttagtttagtagtatctagctggtggaataggaatagagtagaaatcaggagtccagaagtcttcggaaaagttcgggtatggctctagtagcttttctcttatcttttgtaagctttgtacttttattagaatactcttctatatacatttatggtattgaaatactttccaagtatatgaatgcctactttacattatgttcatgttatactgaatatacggctagcttatctgggacatgctttggtgcgggtataatgtttgcttctgcaattactctatgtcttgacaatgatatcagagtggtatctggtagtttagacgtggtgtctagattacgggatatcattatttggtgttatatgctgcggatgagaggtgggccgctgatggtaacagctcagtatgggtattcctccgcgcctgtatataattctaagttaattccctagggagggtattcctccgtatttagccccggttgtatggccatgacgggctgtcgtaaggaactcggcagtcaggggtgacttctcgaagtaccaggagggcatcggatagagggtattagctagtatatcggttaactagaatgtatgtatactatgtatattagaagtaaaggaatagattatctttctcttttctttcttttctttccacttagcttagataatatagtatgagaatgagtagctaatgcttgtgtgtcactctacccttggattatcttaacccctgcttagaatatgattatcacaagtaatatataaattattagtcatgttctctctatatgatcttcccacgggataaaataaatacgatacccttggaatactctcgggtgaaatgctacaatggtatatttgtgcgcttgcagatgaactctataaccataatataccaggagtatttttgcgccattgctgggaattatatttctagtaatgtcattaagaaataccaacaaagagcgtattcgttcagaagtcggatcgatttgtttatcataaccttttgaaagatcgggaaccctagtccacatcagaagatcctgaatcgttttggctacattgatagtaagccttctccaacaccttatgatcctagcttgttgcttcgcaagaacaagagaattgctaggaatcaattggaatactcccaaatcatcggctcacttatttacctagctagtgcaactaggcctgacatctcctttgctgtgagcaagttgattcggtttacctctaatccgagagatgatcactggcgtgcgcttgagcgagtgatgcgctatctgaaaggtactatggaattggggttcactatactgtgtatcctgcggtactggagggacatagtgattctaattggatctctgatgtagatgagatcaaagccattagtggatatgttttcacactaggtggttgtgctttttcatggaattcttgcaaacagaccatttagacgaggtcaaccatgaaagcagagctgatggcactagatacaactattgttgaggtagaatggtggtgtgatcttttgatggatctgcctggggttgaaaaaccggtgccggttattcgtataaactgtgacaatcaaaaggtaaagccgttgcccacgctggcttgtggttggcacggttaatgtttcacaaccgaagctcgcgaaccggtctttaattgtcatgagcacgaccatcaaaaccatgtgctcataatccaccattatcaagtagttggcaattaattaattaaccaatcatgattgaccattgtgagctaccattaaatatccatcattaagtaatagtgaaacattagttatcccaatcatgtgctaatatttctaagcatggctaagcaattatatctaatatctagctaaactaatatataagtccaactagacaaattataacccaaggtatcaaagaatagagtaattaatgcaaagtggccataacaaaggaataggttcacaccagccggtgacattcgaaaataaatgcgcatttgaaataaatagaaaatttaaatataagatcagcatgctgaaaggattgtgtttgggatatgtgtgacttgccttgcaataatcggtcatcaattaatcttctagaacacttccaacacactcgcaaaccttcgcaatgacggaaacaacaagctaacaggcaaaacgaggaaaaagactaagaaactccaaataaacagtacatataaagtaaacaaacatgtagacggaaacgacaagttaacatgaaaaacgagtaaaaagactaagaaactccaaataaatagtacatataaagtaaacaaacatttagagcatgaatttagatgaatttagagactcgaacgacctcattccgacttcatatgaattaattacgaattttacaagatttaattaatttaaacctattaaggaaaatactattccaaattaattaaataatttacaaataatttataactgacataaaagattaagaacatcttcagaaaagattagataaaatttggtagatgacatatagtaaaaaggaacaatatgtcattgaaaagacggaaagagatttaggctaagtttagatccaggggtgtaagttttggtgtgtcacatcggatatacagacacacatttgaagtattaaatgtagactaataataaaacaaattacataatccgtctataaattacgagacgaatttattaagcctaattaatccgtcattagtaaatgattactgtagcaccacactatcagatcatggagcaattaggcttaaaagattcgactcacaattcacgcccaatctgtgtaattagtttttttttatatttagggactgtctatggggcaaacagctgaaaatttgttgttttcagtcattttttttagccgtatgatgaaaacacgtgtctcccatcctgctccgctactcgcgcactacgtgaactaccgtgcgcgcaagtcgatttggggtgtgtttagttgaggaaatgaaaatttttgggtgtcacatcggatgtttgaccggatatcggaaggggttttcggacacgaatgaaaaaactaattttataactcgcctgtaaaccgcgagatgaatcttttaagcctaattaacccgtcattagcacatgtgggttactgtagcacttatagctaatcatggagtaattagactcaaaagattcgtctcgcgatttcctccctaactatgtaatttgttttttcatttatctacatctaatgcttcatgcatatgtccaaagattcgatgtgatgtttttgggaaaaatttttgggaactaaacggggcctcgtttggtcggattgctgattttttttggcaacaaaaaaaaagcccatggctcatgagtgggagaaaaaaagcccaagagaaaaaggcccacagcaggcgggaagaagaaaattttctggaaaagtacaccgaaggtccctcaacttgtcatcaagttacaaaatcatcccccaactgcaaagagtaaatcccttgtgtacacatgaaaactcacctaatcccttctataccctcgaattttacacgatcctctctgtacccctgaaattttgctttgatcccttccatgcccctcccgttaggtttccttcattttcacgttatgtgtggttccaaatgtctaaaacacccttgtagatggaagagtgccagctagagtggcatcaggagggagatggccggcaaagcccgcgcggcaagaggagcggcgaccggcggcccgcacggtgggaggggcggtggccggtggcccgtgcggcgggggcgcggtggccggcgacacccacgcggcgggaggggcggtggcggcgtgacggcggctggacgacggcgcgcgcggccggaaagcgggacgacggcgcgcgcggcgggagggcggtggccggcgacgcccacgcggcgggagggcggctggacgacggcgtcccgcgcggcgtgacggcggctggaaggcggtgcgcgcggccggaagggcggtggccggcggcccgggcggttggaggacggtggccggcccgcccacggcgcggcgtgacggcggctggacgacggtgataagctactgta

SEQ ID NO: 13550 - DNA, 745 bp, Oryza sativa
aatccaatagcttctagttgtttaaggaagtactccattctacggaatggatcagtagcgcaaaccccagcaagaaccggaactcctttaaccacctaaataaacagtatgtcattaacatctactaatagtaaaaaaatcaattgacaggcacagtgccgaaggtatctgatgacttacaggcaacacttcattggccatctcaagtacaatagcgtttgcatctgcaaatggcaatagtcctgccaatgaacccctcccagccatgcgaaaccgcccggagttgtacagaactataagatcaactccaccagcttcttcaaacttggctgatatgccagtgccagcaccagctccaatgacaggagtaccctcaacaatttgttgctttagtttatgtaatactgactttgtcttttgcaaagtttctgtaagaatataagagcaaaccatcattgcatgtcattgtagcaagaaataccaggagtaaaatataatgaatgaagcatgccttggaacatgcagccaattttgagataataattttaaaacattaatgattgaattattccgctcatgcataaactgataatattttctgctatggttggcctcagccaatttcattgcaaggcaagccacttattagattatttatgtatttaaaggacttggcaatttatttggaacacaaaacattaaaaactcctcccttagcttctaatcttctgatttcactacagat

SEQ ID NO: 13551 - DNA, 726 bp, Oryza sativa
agcgaaaagaacaattgaagacaagtgatggaaaaaatatttcagcagtctaatattgtctttctattttaacctgaagtagaaatgtaagccttgaatctctgtagggaacatgccggtttttcccattcgcaacatccaccagtgtcattataacaagcctgaaatggtacagcaactcatgcttcttacactacaatattttcattatacaaaagcattcattcctagcactcaaatatatgtacatcctggtatagtaaagaacattacagtacaggctagtagacataataaacttccatgaagccaattgcacttcactttgaataaggaaaccaatagaacacatattcatggtttttttttcacttagccataaatgtagcaggcttcataaaatggaaaacataacaaaagttatccactttaacatggacaaagtgagctatttggtggtctcattttaaacaccatcttcatgggtgttctagtatgagactctagtcagacttgctaaatgatagtgttttgaaaactgacatgggtgttctagtatgagaatctagttagacttgctaaatgatagcattttgaaaactgattggtatgcaaacacggttaatttccttcaatatgtataaaaaaggattgctccaaaacgtccagcaaatggaatgttgtgtcttgcgttttcgagaaaaaaaatggagtgctgtttgagag

SEQ ID NO: 13552 - DNA, 2238 bp, Oryza sativa
  unsure (1)..(2238): unsure at all n locations
gtacggcaaaaagctggccaccacggtgtacgagaaggtcgccggcgtcgggacggccgtggccggcaaggtgcggcaggtgacgcagtcggccggcaccgccacaccaggcgtcgccggcggcgccgccggctcacagtcgcaggacgacgtngacgcctccaccaccctcgcctccggcgagccggcgaccggggggcagcagcagcaggacaagggggtaacagtcaccggctacatcgccgacaagctccgcccgggcgacgaggaccgcgcgctcagcgaggccatctccggcgcggtgcagcggcgcaaggacgacgtggcgcagcgcgttccggccgtggcgccggcggcgccgggcgacacgatcgccaaggtgcgggaggcgcccgcgcaggtgctcgccaaggcgcgcgacgccgtcacgtcgctcaccggcggcacccatgtctccgacaccgtgcagcccaccaccaccacaggtacataaacacaaacatctcaaatttcacttgccattttcgcagccggatcatgagctgatgatcgagttcgttttttttttctctttttcgtgtgatttttttttgcagaggcggatggcgcggaggtggaatcggcgccggtgattcgcggggaggagatcggcgagacccaacgtcagccgaacgtaagcatgacatgaagcgttgtagaaatggatcctctcgtgtgtgtctgtatgttgccacgtatacacgtgtaagtgtaagaaaagtgtcagtgtgcttggaataataagccgttatgtacggcttttgtgtcgatgtgcagtttttgttttttgatgtcttctgtgtgtatgtaagcaagcccgttttgaaaatggccaagttcagttgaaacttgtaatggtttgtggacttgtgatacacactgtttgtttcaactaattgctagtacaaaagtgttcaccgttttcttcctgatcactgatgaaagttcttcagaaaacacactgggaaatttccaatctttgcagctagctatttttcacctgctgagtggcgcccagaagttcattgacgttaatgtccccttttgcttctcttccgagcgattcagaccggtcatctccatgcattgtgtgtgaaagaaactgtgaacagctaatcaaaatcaaggtgcacgccgaaattgccaaatgtaacagatgactacttactccctccgtttcatgagataaatcattctagcactttccacattcatcaagttattatagcccttcttatatttatcacccctccgtttcaccgtgtaaattattttagcacttttcatatttatattgatgaatgtagaaaatgatagaatgacttacattgtgaaacgcaggaagtagcttacaagtgccatgaatatttcgaggtgcgagtgcgacaacgatatcgtgttagatcaccggacgattgagtaattgactaccaacatctccggttcttcctgctgatgcatggcctgaatatgaagcaggaatgatttggatttggacgtttggtccaaagtggcaggacgaagctagagccgtgtgcctgtatgggagtcgagacacttgggtggttgactgtctgaccccatgattttggaaacaaccttctttactgcgtctctttacaataaataatcctacaagtgaattttaacatccgatacataattccagatcgatattgaagtcctataattagtttcataaaaccatattgttaactatcttgcgagacccaatttttcctcttcttttttgggactttgagttactactatagcaaatagcacagataataaatgaaatgcttaccttgttactgtggccaaaataataataaaatgattatcttaagtggctaaggcttacaatgaattgaaagaattcataaatttaatttaactttagagcttatggtggatgaaaaaaagaattagtcgatgacgtggttttatgaaactttagaatcataataatactatgtttattgttacgtgtcaacttttatttatgtaaagagttatagtactaggctaatttatttcctcaccattttcaacttctacctttcgtttttccacgcgcatatgctttttgaactgctaaactgtgtcttttttttctttgcaaagttttaggtattccaatataggtactttaaggaggttcgctagtactcagaaacccaggaggccaggcagtga

SEQ ID NO: 13553 - DNA, 3142 bp, Oryza sativa
ccgggaacgtggtgaccgagggttatgggtgacccgattgtgggtttttgccgattccccccccggagttcaccacgcctcgggggcggctcggttctgggccccgtttggcgattttagccgacccgagcccccgagggcaggattgagcacgagtgacctatttcaagtcaagattcttcaaaaggaaaaaacagcacagatacagcctttaggaaattgaaactgcttttatagaaattcagatataagagaaataagaatatgcatatgttgtagcccccggccaaccctgcacgcccgaggggggtgcggggttggcccgagcccgaaacctgacacccgacccccgcctcaggggtagaagcgacgaaggtgttcgatgttccacgggttaggcagctcagtgccgtcgcccgtggccagccgtatggagcccggccgggggacgccgaccactcgatacggaccctcccacattggtgaaagcttgctcaatccagcacgcgtttggacgcggcgtaggacgaggtcgtcgatgcagagtgatcgggcccggacgtggcgctgatggtagcgccgcaggctctgctggtagcgcgcggctcggagggccgcgcgccgccttcgctcttccaagtagtcgaggtcatctctgcgaagctgattttgatcagcctcgcaatacatggtagcccgaggagacctcagggtgagctcggatgggagaaccgcttccgcgccgtagatgaggaagaaaggcgtttccccggttgctcggcttggtgtagttcggtttgcccagagcaccgctggcaactcctcgatccatgaatcgccgtgcttcttgagtatgttgaaggtcttggttttaaggcctttgaggatttccgcattggcgcgctccacttggccattgcttctgcggtgggcaggtgaggcgaagcagagcttgatgcccatgtcttcgcagtagtcgccgaagagttcactagtgaattgggtgccattatccgtaataatacggttaggcactccaaaccgggccgtgatgcccttaatgaatttaagtgcggagtgcttatcgatcttgacgaccggataagcctcgggccacttagtgaacctgtcgatcgcgacatacagatactcaaacccgcccggggcccgcctaaacggtcccaggatatcgagtccccagacagcaaatggccacgaaagtggtatggtctgcagggcctgggccggctgatggatttgcttggcgtggaattgacacgctctacatcgccggaccaggtcgaccgcatcattaagagctgtcggccaatagaaaccctggcgaaaagctttaccaaccaaggtgcgcgaggcggagtgggctccgcattcgccttcatggatatcggcaagaagcacaacgccttgttcccgaggaatgcacttcaggaggattccattagccgcgcgccgatagagggtcccttctaccagcacgtagcgtttggagatgcgatggacgcgttcactcccttcgcggtcctcgggtagagtcttatctgtgaggtatgcttggatctcggcgatccaagcaatcaatctaagggagttgggagcactcccctcgggtcccgaggcctggactccgacaggcctcgggggccggtcaggcgcatccgtctcccctaaggggtcgggtcgcgccgacggctgggcaagcctttcttcaaaggcgcccggtgggatctgggctcgcgaggacgcgagccgtgagagttcgtcggcaatcatgttatcccgtctaggcacatgccgaagctcaatcccgtcaaaatggcgctccatacgccgtacttggcgcacgtaggcgtccatctgcgggtcagagcaccggtactccttacagacttggttaacgaccagctgggagtcgcctaacaccaggaggcggcggatccccagtccagctgccactcttagtccggcaaggagtccctcgtattctgccatattattggtcgctcgaaagtcgaggcggaccaagtatctgaggacgtctccgctcggagaggtcaacgtgacccccgcaccggcgccctgaagagacagggagccgtcgaactgcatcacccagtgggcggtgtgaggcagctgcgaggggtccgtgctggcctcggggatcgagacgggctcgggagctggggtccactctgccacaaaatcggcgagggcctggctcttgatagcgtggcgtggttcaaagtgcaaatcgaactcagaaagttcgattgcccatttcaccacccgtcctgtaccctctcgattatgcaagatttgaccgagggggtaagacgtaactacagtgacccgatgcgcctggaaataatggcgcagtttcctcgaggccatcagaatagcgtaaagcatcttctgggcctgagggtatcgggttttggcgtcccggagggcctcattaacaaagtagacgggccgctgcacctttcggtggggccgatcctctttgctaggggccgcatccctggggcactcttcgtccaagcagcctcgcggggcgcacttgtcttctgtgctgatgacctctgggtcggaggataacagggacggccttcccacagtggcttcggggccgtcctgggggtcgggggctcctggcgtcgtcggaaaagcgggcaaagggccaactccggtcgtcaggggccttaggcctccgttcggctcgggggcctcttctccctgctctttcccgggtcgggtcagcacagggttagcctcggggtcgaagggcgataggtgcggccttcccacagtggcctcagggccttcctggggtcgggggctcctagcaccgtctgacaagcgggcagagggccaactccggtcgtcgggggccttgggccaccgttcggctcgggagcctctcctccctgctctctcccgggccaagtcggcacagggtggggaagcgtgaaatgagagttgttctcatcgcgctccacaaccaatgccgcactaactacttgcggggtcgccgctaagtagagtaacaagggctcgtctggctccggggcgaccagaactggggagagcttagatacgccttcaactgggtgagggcattttc

SEQ ID NO: 13554 - DNA, 2777 bp, Oryza sativa
gtgctccattcacaaacttgatagatggtctcagccgtgctggcaacctacaagcttgcaagtatttcttctatgagatggtcaagaaagggtgtcaaccagatgttgtttgctacacagttatgatcacaggttatgtggcagctggggaattcgatgaagcccagaagttcttcgatgatatgttgctgagagggcagcttccgaatgtgtacacatacaattccatgatatgcggactttgcatagtaggagaatttgataaagcatgctctctgctgaaggacatggagtcgcgaggatgcactccaaactttacagtgtatagtactctagtgagtaggttgcgaaatgctgggaaggattctgaagctaacaatatcattcagtacatgacaaataagggtcattatcttcatttattgtcaaggttcaggagatatagaagatgctgatatgtgaggccccatagtcagttacattgtaattttgttgtattgtttccaacttggaaagatggatcataagggagtactttgtgaggtaaccattcgcactctaactgttactctagcacatagggttccttatctatttattcagtacagaaatgcaacactgtatacttaaactgttttacgcactaatggaatgggataggatggggtggcctggcgtgtcctaaatcctaaccgactcatgatggaggagttcaaccctgatttactagtcctaaatagtaaacccaacattagttctgttgcaatgtagtacacaatatttgatttacttccacttctggtctcctgaaccagattacatccaatcttttgttttcaatatactttttacagtgccaagaacttatgctcaacaaaatatggggcatatcattttgctaaattacaacagaacttaggcttttgattcggttggatgcaaagcacaccgtatttctctcaattctcatttctgtcaaccctagcataggtttagcttagtggattatatgtcatagatcagataagatccatataaacattgtgcattatcttgcagcactaagagatgaaaagcctatgcaatcttgtcccttaatgatgctctttaggtcattagcatctctcgtcacagattgcttttatcattatgcatttatgtaatgtatgattaaaaattctcagtgtcttaaaaagatagcaacaaattaacacaccgttaagactgcctccagtcacaaataagtgacatttttggcagcgacaaagtctccaaacacagccacaacttctaatatctattgtgatatattatacacacggtaaaatgctatataaaatagaaatatttaagcaaaatatacacacaccattttcgcatgtccagtttaagtatttatagagatagcgattgttaagctcttaatgtttggttgcatctaccctggctgaatcaccactgtcttttactggaggggatattaaatattgttaagtcagtttcaaccttggtatctctgactctggtcatccattattttttgttggaaaaaaatatttgaattaatcaatacgataggtacaggcctgcaaagattcatcaaattagcaatgttctctaagttcttttagttgccaaattgactttggcatcataaacataaagcattaaagttgatgatattgtcatatgtgaagacaaattgctgagttacatcgtgttgatgttatagagcaattgacaggttgtaattttttttttgtaactgtaagcaatattacttacgtgtaccaatatgttctttacagtattatggtacagagtaatttcacataaaacatcgatcaaaagtccaaggtattggctgtttcacttgcagatgggagagacactatgcaatggtgttatatatttcataattttatcatttcttctcttctttcttttcctctttcttctcctccttcttctcttccttcttctcttctttcttctcctctttcttttcttccttcttctcttcttttgcaggtccaacagacacaatgtcaatcttcccaatcttctttaacttctttgcaattgccactgtgtccatttcaccgatgatggtcatcttattgtccttcaaatctgcagctatggaatcgatacctgtacatgaaatgaggtgtgtaatgcattagattttcttgttgacacagtaatagtttatcttacaaaatacttctttgaagatccaatcttgcatcattacatgttcagctgataatacatgatgtggagcatccagttcttttgtctaacctttagaaactaatgtacagttgttcaccgcaaacagcacatattaataatcccatacataggggggaaatcattccgtatgcctaactatatcatcgatcgtcatcttcattgtgttatgtgatgtaacaaacaatttccaccttacatgatatctcttatcaaacctctgcctaaaaccatgctaatgcttccaaatgtgatttgcagatgttttttgaatcagagatcaaaacatatttttcaagtttcagcagccaaagaagaaaggggatggtacagaatgttaccgtagatgtctgcaacggcttcaatggctttctgcttaatcttgtcgtcggtcatggttggaaccctcagcaccaccttctgctgagaattatcatccgacgacacgaaggcgtgaaccgccgaaggaatcagggaattgaaccataaacaagagttgcacttgcttacctgagccatct

SEQ ID NO: 13555 - DNA, 1973 bp, Oryza sativa
tctacccctacaatcttcaataaaacatgcttgtagtgtttgtaagtagtatttgtaactaaacaaacacatggggagaatacaaacttcaactgtatagtttccttggacaaagatgaccgggggactcccattggaatggcacaacacttgaaattgcagaagcaaaataaagttaatcttcagctcgctaaataactatcatttgctgctctaaacaataaagttaatcagcatgcaattcactaagatgttgaatgctaaacttggtagtttacacacgaggaaagattcacaaaagtcatgcatatctgatacatacgcaaaatcaaaccttgacagtcaatgcagcacatataaaccccctcaagtatcataactgattcagggtggaaccaaggatcaagagaaatcaatacattcttttttgcagggacattgtgatacattcaatgattcttacctctttcataaatagtcacagggatatccttctgggaaaagttgattgcaggatttaatagaagataaaggctgttccattagcatccatcaactacataaaaatagtacaagggaaaggttatgcagggagtaaaattagatcaaacaaacatccattttgacaaatattctctcaaccatatattctcagccaaaatcaatttccaccattccatccatccaacaaaacaagctagagctctacataaagtttaagaacagtgtacatcccaacataacaattattgctggctatttcatcagccgtaatcattccgcatacttgttaaactcagactctccaagaacttaaactaatgctaaaactatatcccaatgccatgttacctcatcaaaaatttcagttttcattctcacaggagtgaacattgtatcctcaaatgttaaactttgaatacaaccttattagaagcaaaatgtgtttacattgattaggttatggcaagtggttaccgaccatcaataataagagtaaactacataccggtccctaaacttgtgtcattgtgccatctgggtccccgaactcaaaaaatacagattcaagtcccaaaacttgctaaagtatgtcattttggtccaacatagccaccaccattccggcatcctacatggcgctaacgtggcatgccacacggacgctgatgtggcctcatcaatacctatacattgactgacaaataggacccacttaaaaactctcttttcctcctttttctctttctcctttcacttttttttcctttctcttctctatttctctctcttttttttgttgtacaagcggcgggggcatgcgaagtagcggcgctccggcgagcttccgactgggcacggctggctgcctaggagcatcagggcgtcaacttggagctggagcctggaggtgttctcggcttgggcggggacgcctagcggcggcgcatcgtgctgacacaatggcggccgaacaggtaggcggcaccgcggcacacgggtaccttgccggtgagctccaacagcaggacggcacggggaggagaggggaaggagggagtttggcatggagaagatgagagagacctcaatttcggataaggatcgacgatggcgacgaattccgaagtcaaagccagcggcaataaccctaagcttcggccagaacggctccgccgacggcaagcgcaacggcaaaccaacctcgccaccctcgcggcgacgacaacgccactgccgccgttcttgagcaggccgtgtaccatgcgcaacaccagtaccgacggcggtggcaggcggcgacgtggcctcttcggggtctggttgcttcgggatcaccatcttgtcgaacaggtgatgggagatggaggtgaaggcgcacttgttttttttttgaacgactcgcacgagacggtgtgaagttctattgatagagcagggaaaaaaaatacaagattacgaccctggagggt

SEQ ID NO: 13556 - DNA, 1464 bp, Oryza sativa
caccgccgccgccaactccaccccacaaaaccctaatccgatcgagagggggcgcagccagtgacgggaaacgccaccgccgcgccacgtctcatcgccgggacgtctacgaccaccactgccgcagccgtcatcaccgtcgacctcaccggcgccgcatccacgtcaagccgcgacgacaacgacgatgtccggcgcctcttcctccacgaactcctcaaccggtcggtatctaaaccctctctctttcatctagaatgtcgttcatcaaacccaaatagaaccacccgactagatctaacctatgtgatcctagtgcaaagttcaacacggcgcccatgaggctgagcgtgccgcggcgcgccgtggagttgaacacgacggagaaggcgagccacgcgttcagcgtcgacgccgccttgccgtcgtagaggtagagcccctgcgccctcaccgccgtctcctccagcgacggcggcagcgcgctcgtcccctccgtcatcgggtcgttgaacaccaccgtcgtgccgaagatggtggtgttcttcgccgccctcagcagcgccgccggcgaggcgaccaccgccgacgtcgagttggccgtgctgttgctgaagtcgtagaggatgtcgtggaagtagagcctcatctccttgcacggctcgtcgtagctcctgacgaacctcctgccgccgccgccgccatggacgacggtcgccgagctgaggaggaggccggcgacgaggaagatggcggcgacgatcagagacgccttggaccaagtagcttgcattgttactcttgcttgaggtaattaattaatgtaccacttggcttaattgattgattaagcttgctttcttgcagctgttagcctgtgatcgatgtggcgagctcgatcgagatttgcgtacctatttatagtgatgagaaaggttttgcatgcatgcatggatatattatatatatttcttgctggtccgattctctggtcctgaactcctgatactgatgtttcatttaattaagaaattaaatggaatataaacttggcttctacatcaagccggatgcacatagccatgtcctactgctgatgtatacggtactagggaaaattgctagaagagatagcacgtctctttcaaaaaaaaaacattataaatctcaagaaagcaaaagagatttgtttagtagtactccctccaatgccagaagagtaattgttaatattttcgacaaggttaaagttaaactactagtaactaaaaaaattagtttaaataaactagaataacacatatagaataatctaaaggtactataatagaaataaatatttatttattgtatacattataatagaaaatcatagcaaagatatgttttgaaaaccgtgtcattataaagaaaaagtcaaaaattatagaaccggagagagtatttattatatattgagatacg

SEQ ID NO: 13557 - DNA, 1622 bp, Oryza sativa
gaccgccatcataatggtcaggatggaggcgcggtctggatcgctgcagagggggaggattccttggggaatgagggccgcctctacggagttgagattcagcacccgttggaccaatatcttgaagtcctcaggagcccagtcccatctcactccctggtgggtcctcgtgaagtcttcggacccggtgtactcccaggcgccccgagcgcgccgctggagcggcgcaatccgacgacggaggtagtcgccgtacaccatggcccctgtgagcccctgggatcgcaggcccgccaggcggtcgaggacggcgtcatagccattccccagatctaccggcgcccgccagctggaggcctgcgctgggggctggctcggaagtcggaggcgcgcttcgtcggcgaggggagtgtagaaccagtcgctcttccagtcgtcccacttcttgcggagggcgcaggggatgtagcggttcagcaccggcccccgtggctggaagtagcagccaccgactaccgatggcggcgacaccgactgcacggtgaagaaccaccggaacagccgaagagatgggcgcaccccaatgaacatctcgcacagatgcgcgaagatggccaatgtcatcaccgcgttgggggtgaggtgcgccatctggagatcgtagaactccagaacatccatgaagaaagaagaaaatggcggaaccagccctgccattgcaaaggggagaaagaagacggaccgccccgggtagtctggcgccgggcgtccctcgcccagcgtgactatctcccggccggtggcagattccggcatgaagcggtgcgacagcccagcctgcctctcgctcacgatccgggaaggcggcagcacgctaccatcgagcagagcggaaccccgtgccatggcgccggaggaagagaagattaagagcgagcgcgtgtggcgaaggtagggcacaggaaagaaggagttagggcgcaagcggcgaagacaaggggaataatggcgaaaggaaggaaacagatcccttcctcagtgcctttatactcttgccaacgctgtgcccggctcctcgcttctcgcgcccactatttcgccccctcgtttcccgcgcccacgcttccactaatcccattcgcccgcttgcggcgcatgaggtggatatgcggttgtggcagtcgagatagatcatatcgtgcgcgcgttaattacgcttgccgaccgaagcgacgttaccatatcttcagacgaaacgaatcgccatgtccagattcgtgtgctactcaagtaatgtggcagtcttgaagagaccgctcattgttgacagccgagttaccattgccgatgtgcgtggtttgtgaccgttgggtttctgcccaattgtggagaccggtcccacctgtcaccaggtcttaggagtggcgtcacgcccgaccgtttcccttaaagagggcgatcgccctggcataacgccgggggctactgtcggtgacatgggatcaggagtatcatgactagaggtttgaggcagacacaatcgcacacgtggcctggtacccgcgagggacgtcgggcccgagggtgatgcgttcgccctcctcttagtccccccgaggggg

SEQ ID NO: 13558 - DNA, 529 bp, Oryza sativa
caggagcaaatgtctcatcatagtctcgaccatgagcttgctggaaacctcgcgcaacaaggcgagccttgtatctctcaacttgaccatctgatttggtcttaactttataaacccacttacaggtgattggaacagcatgagatggcaacgggacaacatcccacgtgttggtacgctctagtgcagcaagctcctctgacatagccaatttccaatgaggtaaaacaattgcctcctgataagtagatggctcaaacacaaccccaacaacaaaatcatctctattaggtgcacgaagagcatcacgagcacgcaagttgtacctcggagcaggagatgaatcatcaacggaacatgttggatcctcaagggtaggttgggagggttgtgattcgttaggaattttgggtctacgactgtagtggaaaggaaaagtgtctaatgttatagtggaaggaacatgtggaggtgatgaggaagctgggatgtgtcatggtggaggcgatacaggtgagggtgaagggga

SEQ ID NO: 13559 - DNA, 760 bp, Oryza sativa
tcctgcagcccagacatatagaaaaggtgttgaagaaattcaacatgtacagatgcagtgctacacctgctcctataatgaaaggcgaaaagtatggggcatcgcaatgtcccagaaatcagtatgagctcaatgaaatgaaaacaaagccatatgcatcagctgtaggaagcctacagtacgcgcaagtgtgcacacgacctgacttggcattcgttaccgggttacttggcagatttcagagtaatccaggcctagagcactggaaattggtaaagaaagtcttgcgttatttgcaaggaacaaaaggcctcatgctatcttacagaagatcagaatcactccaaatagtggggtactcagattctgactttgcaaaagataatacaaagtcaacatcgggatacgtgtttaccctggcaggaggagctattttatggaaaagctcaaaacagactatcactgcagggtctactatgtatgccgagtttatagcatgctatgaggcaacggggcaggtgaactggctaaagaagttcatacccggtttaaaggtggttgacagtattgagaaaccactaaagttatactgcgacaacgaacccgcagtaatgtacgctcacaacaatcagtcaagtggtgctgccaaacacattgacataaagtactatgttgtgaaggacaaagtccgggatcaaacaatcagtctcgagcacattaaaacagaaaggatgctcgcggatccgctcacgaaaggcct

SEQ ID NO: 13560 - DNA, 1707 bp, Oryza sativa
ctcccccatctcctccccaagggggcggggcggcgcgtgccagcagtaggcgcccggagggggccgcgccaacatcgcagcccgagggggagcgcaagaagaagcggccccgcaagatgggggagacagaaccatctcggggaaacctcatttcccctccaaagtggtcgtttaaccgaccccctcgcaggttcgtctctcacccatcgtgactgtattctcttaacgcgagttttcactcacccatcttgttcgtcttctggttttttcttttgtttcagcgagatcccgtcgcgtccctcccgccattccaagtccggccagtctgaggccgaggatccggcggccgcagaggccctcaggtgggaatctgaccggcgagaggccgcgggtcgcctacgggaagccgaggaggccgcccaggaggccgcccgggcccaccaggccgaggaaaccgctcgggaggaggccgcccgggcccgccaggccggggaagccgctcgggaggaggccgcccgggcccgccaggccggggaagccgctcgggaggaggtcggatttcgccaggacgaggcgatggcgacttccgaggcagctcgcgacgaggccgcgggcgcgtcgcttgggcccactccctcaggcgacactcaggcgacaacttccggggcagctggcgtcgaggccgcgggcgcgtcgcttgggcctactccctcgggcgacgctcaggaccaaccgggtccgggggacatccccgagtccggcacttccatcggcggcccgagccgcgtggcatcctctccaaggcggctcttccccacgccttctatcgccctactgaacgcagagccccttctgcaggccttggccgccgcaaacaccacggtgttggatgggttaagtgcccaggtggaggtcctgcaggcagagcgggcggagctcgacgccgcgtgggcgcgtgtcgaagaggggcgacgctcgatggaggccatggtggaggtgggccgtaaggctcaccgccggcacgtctcggagcttgaaacccgtaagaaggtgctggcggagattgccaaggaagtggaggaggagcggggggctgcccttattgccaccaccgtgatgaacgaggcgcaggacaccctccgccttcaatacgggagctgggaggcggagctagggaagaagctcgacgccgcccagggggtgcttgacgctgccgctgcccgagaacagcgggcggcggagaccgaagcggcgtcccggcggcgcgaagaggcccttgaggcgcgcgccatggcgctggaagagcgcgcctgcgtcgtggagagggatctggcggaccgcgaggccgccgtcaccatccgggaagcaacgctggtggcgcacgaggctgcctgcgccgaagaagagttcacgctccgcctccgcgaggacgcgctcaccaaacgggagcgagctctcgagggggccgaggccacggcgcaacagctggcggtcaacctgtccctccgcgaggcagcgcaggaggagcaggcgcgctgcaatctggaaggtgcccgcgccgagagggccgtactgaaccaacgggccgctgagctcgaggcgcgggcgaaggagctggacgcgagggcgcgcagcggcagggcggccacgggcgaaagcgacttagccgcccgcctcgcagctgccgaacgcaccatcgccgatctg

SEQ ID NO: 13561 - DNA, 567 bp, Oryza sativa
ctgcagcccagacgagccaacggctcggattcgccggagggagcttgacggcggcgaatcgcggcggcggcaactggcggggagggaagagggaaacggcgacgaggtcacgaggggtcgattcccggcggtgagagcatccacgcggccatgggaatccgatgctagcgtcggattgggcggagctacgccgagcgaggctggcgacgagcgggtgctacggagctcgagcggcgacggcggcgagcacacggcgagcgacggcaacggtcggggcggcgccggctagctacggggaggctactcatgctaccaccgaaaactaaggggggaagatggagcgaggagggagaacggagagaggcactaccgagatgaggaggggcgcagtgacgagaggccgacggcgcgggagtgatctctccggcctcgggccgaggaagaggaagaagagggtgcgcccagagtccccttccgcgtccttgctcgtgccggctcttccgacacgcgcaacgacgaacggcgacggcgaacagagcacgggaggcggcggcaatggcgcggagg

SEQ ID NO: 13562 - DNA, 585 bp, Oryza sativa
cttcctcctcctctacctctcctctgctcgctatctgttcgtccggttgctcaccgagaaagaattgaattcgcctcagatttcggacttcggcctcgcccggtggctgccgtcggagtggacgcaccacgccatcgcgcccatcgagggcaccttcgggtgagcacacatacgttctccatggaccatggccatggcagtaaaaacagggagacgagacgacgctgagccgacgacattgatgtgcaggtgcttggcgccggagtacttcacgcacggcatcgtggacgagaagacggacgtgttcgccttcggcgtcttcctcctcgagctcatctccgggaggaagccggtggacggctcccacaagagcctcctcgcctgggtacgtacgtagcacattcatacgccatcgccgccgtcgcgtcgcgcatcgcacaacacgcgcacggcggcgcgcttgtggcggccaggtgttcggccagggacattgacattggtgccgtggcgcgtgcatatgcaggcgaagccgtacctgaacgactgcgtggcgcaggggctcgtggacccgcgcctcggcgacgg

SEQ ID NO: 13563 - DNA, 3378 bp, Oryza sativa
catcctttattcaagcacacaccatatatttaatatacgccatgcatcatggcgatcgaagctagcctagcagctgggaaaggcgatgccgcaggcggcgatggtattgcgggcgttggtgctattgatgtaggacgcgtacatcgggtctctcgcgtactggcagaagcacccgtccttctcctgcgcgcgcaggttggagcagcacgacttcgacggcgcagtcccaaagaagatcgggaccgcgcacgccgacagcttcccgggatcgcactgcaccggcggtggcgcctgcgccgccaccaccgccaccgccaccgtcaccgccagaaccaccatcaccgtcgcttccgccgcccacttcgccattgctcgagctacctagctaggcgcaagaaccgcttggtcaattgattactggttgatgtgatgtgatcgatgcggcagttgactgctgctttggctagtggtggtgtaggggaaagcacgcacgtcccgggtatttatagatgatgagaggtgttgcagaaggcagaccatttcatgtactcctttagtaccaaaagaaattggtttctatagctcagactttatcatagtagtactagtgctacgactgtgttcttcttgataaaatttgttgcataacattataagtattgtaattggttaagagacatcgcaaatacgtgacattgctgataggcaccacaagatttatataagggaaattttgctacaggacactccttatatgtggttttagccctagagccctgcccaaactcacttttgggggaaaacactccataaacgtggtaatttgccagtggacaccacgccgattaaaataataattttcggttgaagaggagagtgaaatcgcgtgaaatatcaaaaatgcccttgggcctacatgtcatctctatcttctatctctcttctcctcttcttgcccacatttcgctctccaagccggccttcggccatgcccgcgcagggggaggagctgcgcacgagcggcgggcggcagcgggggaggagctgcgcgcatcctgctcctcctcgaactcgtcaccatcgtcgtcgtcgtccgccactgccccgctctgcaccgccggatccgcgaaccacctcctcgccggcctgcgtgctgtgccagccaccgccccgctccgcgccgccggtgaagacgggcgacagccgacggagatgagctggatgcggcgggcacgggtggtggcgggcgggggacgagctacgcacgtcctcttcctcctcgaactcgtcaccatcgtcgtcggcagcagtgtcgtgattcggcgattgggatgagagaaaggcggcggcggtggcgatgagtggctcggcgttggcgctggagatgcggtgcgggagctacgacttgctcgcgtcggccggcggcgggaggaagggtgggggcagagggtgagggtggcgaggcagcggggagaaggagcggctgcagctgctccaccgcgcgctgcggctggtgggccgccagagggccggggtgctgctgctgctcgccgttgcctccgccgctgtctgcgcgtgcacggtcgacgaccggcggggagcgacatgtgggcaggaagaggagaagagagataggagatagagctgacatgtgggcccaagggcatttttgacatttcacgcaatttctctttcctcttcaatcggaaattattattttaatcggcgcggtgtccactggcaaattaccacgtttatggagtattttcccccaaaagtgagtttgggcagtgtcctagggctaaaaccacatataaggagtgtcctgtagcaaaatttgcctttatataattagcaatagcgacatccgagataatatgttaccatttccggtgaaaaagatgagagagaaatttcaaaaggacaaaaatacccccaacctcagtagcatgtaacccaggttcaaccaaacgcactcaccgttcaaccccatacctgaaattctcatccaaatctaaccctaggtggttggaggtggcgagcgaccggctctgggaatcgacggggggtggagctgtgaaattggtaggcgtcgacggcattggggatgatgtcgccgaggaagaagttagcagggaagaaagtggcttttttttacgagcattgaggttccattaaagccccacaattgattcccagatccgctcgcccaccgccgccaaagccaccgccaccggctgcctagggttaggtttggatggggatttcggttgtgagggtgaacgattagtgcgattgagtccggttgaacttgaacaagatccaataggccaggccggtttacatgctgttgaggccggaggcatttatgttcttttgaaatttctatcctatatatctttttcattggaaatgatacaatattgtctcgggtgcgctacaaccagttacacaaattttgtgatgtccattgatatatcccaaccaattagatgactttttggtatcatgtggtaaattttgccaagaagaacggtcgtagcactagtacttctatgataaagtcagaactctagatgagatggcagtgaaactactactactatggaaatctactattggtgacaaacaaagtcaacgagttgattattgtaaattattgaaaaataagatgttatgggtttgtactatgttaaacttccttgggtttgactaaatatatagaaaaaatataacatcttctacggcatacatcaaattagtttaattaaatttactattgaatatatttcataaaatattggttttatggttaaaatacagtgtattttataccaacttaatcaacttttaagaagtttcatttaggacaaactttcaactacttataatataggatatagcgtatatatagtttttgcatcgttatataaattcatggagtgctcgagacatcctgctagttgggttaattcatttttttttgtaaaatttgcaaaatactcctgcattgcactgggtaatggtaaggtggatgaggtttgacctcaatgatttatccaagcaccggagcaaaatcataaacatcgacggagtgtaattaccacaaaaggtatatttttgtttgaaacaatggctctacacgttcgggatgtgaacgatgatcttgatgtgtgtgcctgatgatttagcatgggagaaacagatgggtgaacgcctgaattaaatttcaaaatatactgttcattcatttttttctcaaaaatattcggtatgcaaaaaattttacaaaaatatatcgccggtctcgcacaaccattacacgaagatgatgtgggaatgacgtcagacggtatcgcgcactggaagcgcgcagcg

SEQ ID NO: 13564 - DNA, 2311 bp, Oryza sativa
aatgtgcgataccgtgccatgccgatttcattagcgattaattaattattgattaataattatttaatcattaatcaggataattaatcactaattattattagttaattgttaattgagtaattaatcactaatcaaaaggagctgtcagacagtgtcgctcgttgctttagcgagaccgttcggtctcgctattccgttacgcgataccgcccacgacgtcattcccacatcatttttgcgcaacagttgtgcgagaccgacggtatatttctgtaaaaaattttgcatcccgaatatttttgagaaaaaaatgaatgaacagtatattttaaaatttaattcgtgaacgactcggttctttgcgctgtagtcaattgatgaaaatttagactgaggtcattaaatatttttgcatcacacgttttcttttatgaaacttctactgccttagtttcataaaaattgaatttctacctttaaatctttgtcccataaaaattttatgtctactaatgtgggacctaacaaaacaaattgattacatcaaaatttgtttccttgtaatctcctttctttccatttcatctcttaacctcttgtctcaaccttatttttaatcaagtttatatataatgtgtgtgcgtgtactgtgttcattaaataattaaggttaatgtgatcatttgtttatctttataatttgtccttaatttcatagaaatttttttttatggaggtagtatagtgttttcaaaaatggatgacttttttttgcccgtgcattgtataatcacacaatacaatagtgcaacgttttctccagttagtttgcacacgtttgccacgttgagttggccggctgggccagatcagcacgagcagccggtcaagacttatctctctctttctcgctctctcatcgattcttgttcaatctctctcctagctcgtctctcgtcagtgtcaagagaaagaaagggagaaggtgaacgtacccgcatgataattaaacctaaatcgagaaggtgagtagccggtggctgcgggttcgccacctccttctcctcctcccgtcctccgcctcgaccctcccatctccactcaaggtctgtggaggcctacagcggaggacggctaacaaggcggagatagacaatgggcgaagagcggcgagcaggactgaggtcggtgactaacccatcttctgtggatctgggtataggcgacagtggagagagggtgcaattagtgacggcatggccacggaatcaaatggtcccttaaagcgggaccagacccccatcgatcaatcctaagcctgaaggaggtcaagatggagtcgtatatcccatgggcatgttcgactgccattcctacgacagtgctacggctgcagcgcttgtgttgtgcagctgcagctagccttcgtgcagctgtaaaaaatgccagtcgaacagaccctgacggagcgtggggctcctcaccgggagaccgcgcaggcccccctttgccggttcggccgggggctcagggagagattctaagctctctgtatgtggaaggctcgcgagacaggaaacacacaagacacgggcgatgtatacaggttcgggccgctgagaagcgtaataccctactcctgtgtttttgggagatctgtgtataaaggagctacaaagtatgagccagcctctcccttgttctgggtttctaatctggaaaagtcccctccccttctcagtgggcaaggtcctccttttttatatcttaaggggataccacatgcaccatctctctctttttctgtggggacttaccctaccttttcataaatggacggagatttgtatagttgccgtccgagtcaccttctgatgagacgggccacaactacctccactttcgccgggagcaggtgcgacgtggaatcgtggctgtctgctgacgacatgaccggtgtcagaccagttacgtcggtcattcttgtcccccacgtgtcagcttagcaatctacatgttcgcccttcttcacacaacatcttgcctgtaatggttaggatgaagcctggcatatatctgaccaggactaacgtgccatctctgggaggtaacacgctagctccagctggggacgagcgcctagaagccctcgtcctgacgggatggggcgaggcgtgtgtcagatcgcctgtcgccacctaacccgcgatctgaccggtctgtgactggtcacagaccggataaacaagtgcactgcactgcgttacatgcggcgtgacacgctcaaccaaaccgcaataaatgtggt

SEQ ID NO: 13565 - DNA, 523 bp, Oryza sativa
acgtcgtgatgttgctacaaaaactgaaatgggaagaatagctcagcagcgtatgcagcaggctatgctggcaaacaatgctgccaataacttatctgaagggaacgcgaggacatctaatcttgggggtgggaacatgacttctgacaaccaagttcatcaagctacccagtcaggtggtgcggcagtttctcatgatgggggtaatctccaaggacaagagtcagacagatctaatgttgagggtggtacaagcgctggccatgatcaaggtcaaccgagttcaactggtgcagatggttcgcaaatgccagcaagacgcaataatggacttggctgggtaacttctgcagcaagtgcatttgatgctgcaaaggatataatggaagctcttaggagcaagcataccaatctagccaatgagcttgaggtaagaagtaataacaaagtggtttataaacctttaggaaattggagatgactacgaccattacttttttattaaattagagtcttaccatac

SEQ ID NO: 13566 - DNA, 504 bp, Oryza sativa
tattgcttagatataaatggtgctctcctctggctgtctacaaccttaggggaaatcaaaacaaattatacctcgcgtgaccaatcaagtgaggctccaagtgtacgtaattgtttcaatatggtaccaccatgctgatctttccattggaggacctgccaagaagattgaagaatgaaaaaaataaataaaaatgaaactaactgtgaagttaatacaatatgcaataggtaagaaaaaaatgattacctccaatagaaatttatcacgccccagatcatgtcttgacaggtttctgtcacgcataagccttttttccacaaccacctgatatgaagagaaattttgttacataaagcctgctacccttaaaaactaaaacagaatgttggttaacaatcaatgtgatgtttcagcaaaagtcaatttgtattcaagttaacaataaatgctgtagaggttatatgtaagaaacagataccatatatatgttatatgcatgac

SEQ ID NO: 13567 - DNA, 622 bp, Oryza sativa
ttcctgcagcccacaaagggacacagatgagattgccccaaggggatgccaaaacgacgtcttcaagaagagaagcgacggaagaccgccacagccgtccatcaggactccaaggagccaagactgggctttcacccggcaaacacccttgaggggtgagacagcacgacaacgccctcaggagggggaatgaaccatcgttgtcggtccggccaaggccggactaggttttcacccaccgctcaccacctgcgaatccacgactgacgcaccaatgctccaccacaacactagctctgccgacatgtgggacccctgcaccagcaccccccggcggccagccttcgtgcgccaaagactgctccacacccaccggcagctcctcctcacacctaggtcgcctcctccaccgccggccgtacctatctgcgccaggccagcctcctctgccggacgcgtctctcgcgccaatccggcctccctccatcggccgcgcctctcgcgccaagccggcctccatctccgccgcccgcgcctctcgtgccgagccggcctccgctgccatcggctgcgcttctctgcgccaagccggtctccgacccctccaccaaacgatgccgcg

SEQ ID NO: 13568 - DNA, 2473 bp, Oryza sativa
  unsure (1)..(2473): unsure at all n locations
ccacgaccacaccgccgccgctgtcgccaacagacgttgctagccgaccaacactcggccacacccagaccggccgtgagccgctgtggacgctccggataccgcggccgccgtcggcagccaccgccgccgacagcaccacctccaggagctcctgccgacggctgacgccgccaccgccgtgggcctcgcaccgccgtcgccaccgcgacgggcgctcctgccacgagctcgccctgctgccgccgccgccacgtcgtcgcgagctcaacaacgagctccttgaggtagctgtgcttgcggagcatgtcgatgacctcggcctttgaccgggaggcgaagaaacagagctcgacggcagccttcgggtcagacttgacgaggggcggaagttggtgactgtgtcatggccgcggaactgccgtgccgcaacatcgtaggcgtgccccgcctcggcctcgctggtaaacgtgccgagccacacgcagtcgcgccgctcccggccggagtcccctcgatgcccaggacacaaccgcgtncatcaccgcgctggcaccgntgcccacacgctgcatcgcctncgtcgacacagctgtcgcgcctgtgccttcttgcccatggacgcaccgctgttcatgtcatcgaagaagcagctcgaccagaggccatggctacggtcaatgcagtaggaagaaaagaggagaaacgaagaaaggacaagatgggaatgaacagaaaaggatattaaaaaaagttttttattggggcccatttgtcagttggtgtagaatttgtgatgctgccacatcatcgtccgtgtggcatgccatgtaggatcctggaggtgtcatggcagtttgtgatcggattgacacaatttaacaagttttgggatttggatatatgcattttgagagtttggggactcaaatgactcagtcgtacaagtttagggaccggctatgcactttacgcatactataatgagggagtccccaaccttccacaagcactaaaagactttatcaacttatgttgtaagtataaatatgcgaaatataatggattgaataaaaatatggtacgtggatgtgagtgtttgcatgagcaaggaactcttatcattttcctcttgttgcaagctaagttcatgatacgccttttttttttgtttgcattcaaaccagtagccactgggattttttttaatacacaaattcactgcttggcttgcatggaaaataatttattttgctttttcttagtgtgtaatcaatcaatttcacttagggttctgaaaagagtagaagcagatttccatcaaagttaaaaaatgcattttatatggagaagaaaattttctgttaggagactttcaacagtgaaactttctattaggagacttccaatggtaaaactttctactaggagacattcaacggtgaaactttctattaggcgatttccaacaggatgaaaagaaactttcagcaggtagccagttagctttgggtgatgccttaaaagacttccaatatgaattgtattcagcaatcggaacattcatatcaagaacttttacacaattactttctatcagactacatattcataaggtagaaaaaaatgcatgaaaactcatctaaagctgtgctaaagctatgcatggtcatgctagacaacagaatagctgctttctctacgtgtagataagcacgtgtctaacaaagcttaggacccctttgatttggaggaaaaacataggaattttggaggattttaatcctataggaaaatttcctatgaagccctttgaaacaaaggattgaatcatatccaatcctttaaaattcttatggaatggaaatcctatagagattttggagaaaatttagcaagagtttcaacctcctggtaactttcctttgagtctatctctctcatccaattcctgcgtttttcctgtatttcaatcaaacggtcattcctgtgtttttcctgtgttttgcaatcatctgttttacacttacattcctatcaaaatcctgtgtttttcatattcgtctgttttttcattcctacgattcaaaggggctttaatgtggtacatgaccaacgtaggccccctttgattcaaaggaaattcataggaattttaaaggatttcatttctataggaatttttccaatatagtcctttgaatcaaaggaaagaatcctatgtaatcccatgaaattcctatggaatgcttcttcccatgcaagatttggaggaaatttaggccccctttgattcaaaggaaattcataggaattatagaggatttcatttccataggaatttttcttgcaaagccctttgaatcaaaggaatgaaccctatgtaatcctatgaaattcttatagaatgtctcttcccatacaagttttggaggaattttaacaagaggtaaaacttcatggaagaaatcct

SEQ ID NO: 13569 - DNA, 615 bp, Oryza sativa
atagtctggattgcagtttcatgtaaagcaaaaggattctacgaagcaaacgccatatatatgacagcagctatttacattagtggccataatgcagaggttctaaacaaatggcgttgcttctaagggtgggtgtgcatactggtgacatcctggacatataaccaaaagggacagtaatgtgctgcatgttgtttccttcttcatccgctagataaagagcaaagaaaagtatggattagcaaatatgtattgagctatgtgtcctatgatatatagaattgagatgattgtttatgtactgaccttttcttatgtttctgctgactgtcatctttaaatagtttcttagcagctgaggctgaggctgaggctgcaggcctgtttttgttcaggatacagttagattatatttttgctagaatagaaagttgttgtaactgaggaatgatggaaaaatatacctttttgggggaatgtttttggtaggcggtgatggggatgctgatggagtatcttctgctgctattgctagtgcctttgccttgtaggatagtttatgttgtcagtgtttatagtttttgctgaaagcagggataagtattaattaccttg

SEQ ID NO: 13570 - DNA, 2040 bp, Oryza sativa
ttcctgcagccccgtatcaacacctgaagaaattacgccacatttaagcattcttagcttcagaaatctttgctatcgtgcgtgcaaaattgacaatctaccaacactggatttcgttattctgatggttgctaatccaatagcgcatagaatggttgtgattttccgaattattactgcaaacaatcgaccaacctgcacattgcgatccttccagaacgcagggtcctcatcgagctcgaagtgcggcacctccgcgggcacctcggcggcggcgaggtccctgagatcgaacaccctcctcgacgacgtcccaatcgaggaagtccgatccctaaccccagaccccgcggcgcaggcggcggcccggggcgtgccggccagcgacttgggcgtgaccggcgctgaccgggggttcctacccgggtccgcgatggccgcgagcggcgacctcggcggcagcatgaacggcagcgcggcggggccacccaccactgaggaggaggacggcgccgccgcggcggccaggtcgtcgttctcgttggtctccgcctccacgcggcgggcagcggccctcgaggtggaggctcgccggccgccggcgccgtggccagccatggctgcgcggaaactgagtgaggtggccaggtgggggagccggggggtggtagagtagaggagactagtaatgggcgatctcgctagaattcaaatttgaactgcgcatgcgtgtgggtggccatgagaggaagtggatctgatgactgatgagtctctgactgtgtgaaagcttttcgggctttcggccacccccgctcctgtgattaagaacggtaattagggaagtcgttttctttttgatgtagattaattaatgatggcgatgtccacttgtactatttgggttgcttaaatattcattaacgctgagttataaactggagtggttagacttctaagtgccaactattaagggcctgtttggtacagctccaactcctaaatataactccaggagttgagtctggagtggagttgcggagatgcctaaacccagctccacaactctagtacattttgtgagagagctccacccaactccactctcaattttggtggagctgaaactgtttggctgagctccagctccaggaggggtggagctggagctggagctgtgccaaacaggccctaactctaattcatctttagccaatctaatagctcattcatacaataattatatactacactattaatacttggtcccacctgtcatacacacgttacgtcttggagtccgtgctgcagctggctataaatctgtagcccgctgcccttctgtctcctcatttatgttcttaaaatatgtttgcagcaggtttatagcctgctattgtacctgctctaactcaactttctcgttttccacaggcacgtttttcaaactactaaataatatttttcttttaaaaaaatctaaagttactttaaaatatcatcttaattcatttttcaaaaaaaatcagctaatacttaattaattatacgctaatgaatcgctttgttttgcgtccgtgagagatgagttcctaacacccagcaaagaactcaacctaatagtattaacttatttatatattgatcatgttataaaattatgaggaccctttgaatcataggaacagaaaaacaaagaaataagaaaaatgtaggattctgacagaaatacaagtacaaaatggagaatcgcaaaacgcgagaaaaacacaggaaaagactgtttcagtggatcgtgggaaagaagtagaaatcagataagagagacatacagaaaattttccaaaaggttgaggctcttgctattctcctccaaattctatatagaattgtctattccatagtaatttcaaatgagaggatatgattcaatcctttgtttgaaaaaaactttatgggaaattttccgatatgattgaaatcttccaaagttactatgttttttctaggaatcaagggacttaggaatcaagggaccct

SEQ ID NO: 13571 - DNA, 1698 bp, Oryza sativa
atctcttttggcttacacgaatatggagtagacagaaagggaaacaaccgagcaattccttcactaatcaacccagcatggtttgtgtgggcttgtccttgctctgaccaaaatcagcatcttccgaccagcccagctgtgttcacacctaatcaaccctttaatacaaatatataatgccactctcacaaaacagcaagcgaaatcacccaagtaattaagcaggagttcatcatcattatataatgtttttcaaggcaaaaacataggacagcagagcagagcagagcagctaagtaaaacaaacagcgcacgttcgttaaaagtttcttggtaaacaagctcagaaagaaaaatgcagggactcgactctgcgcattgaccccaaactcgatcgaatctgccagctcactcatgagcttaagagcgttcacacgcagtcgaacacgaacattcccacatttccgcgccaggtgcactccatcatccatgagctgcatgcatgcaattatgcaaattaagcgtggtactcctagattgtttagtagtagaacatcatttgccttgatcagctagccaacacataaaaaacaccatctttaagcccggtcagtgacaggtaggcagggtagtcactttttgccgtgcgaagcaagcactagagttaattaacccctggattaggataacgacaatgaacttttctttccaagatcatccagatggcttcctgatagaaatcgcagatgacactgtgcccaaacgtgatcgatccgtgcacgcacatgcaccacagattccgttcgtcacgcgcccgttcacaccgatggtgtcgagtggagtgacccagcaaccactcaaaaagtcgagtaccatccgaggaattttaactcgttttctaaactctttaaattttgatttaaaaaagacttttaaaattattttgaaatatttattcctttttatcacgttattcgtttgacgtggcaaaacaatactgtcggtctggccaacaaattcgaatttgaatataatttgggatgatatatttttaaattaaaaataaaagttgttaaaaaaaattgccgagtagataaagctcgggcttgggccccacctgacagcgaccggtccaaccgctaacctacaaatacccgcctcgcttcggacaaacacctcactcacctcacaggctcacacacaggcacacacacacttcccgatggagcccaccggcacgatcgtcttcgccaccgtcggcgtcaccaacttcggcttcgacgtcttctccgccgccgtgccactgccgccgatggaggaggacgccgagcgccgccacacggacggcgtatccgtgaacttcaacgcgcagttcgtcgacgatggcggggaggaggtggcgttcgtgtcggagcgaggcggcgcggcggggctgttccggtgccggccggggcccgagcagcgggccgagccgctgccgacggtggaggggagcctgttccatgaccgcccgacggtgaggggcgggaggttgtacttcgtctccgcccacgagcagccgccggcgccgttcaggagctgggcggcggtgtacgcgacggagattgggagcaaggagacggtgcgggtgagtcctccgggcgtcgtggacatgagccccgccgtgtcggactccggggagctcgttgccgtcgcgtc

SEQ ID NO: 13572 - DNA, 4068 bp, Oryza sativa
ctgcagccccttctccccgtccggcgaccgcgtcgggtaccaccgcttccgcggcgccggcgcgcggggggactcggtggggccctacctgcagccggtgcagagcccggtgagctcgctccggatgctgcgcgtgtacggcacgttcccgtcgttctcgccggacgcggcgcacctcgccatgaacggcgacttcttcaagacgccgggcgtcaccatcctccgatccgacggcgccaagcggtgggtgctcacgcgggagcccaacctgttctacacgtcgtggagccccgccgagagcggggtcatcttcacctccatgggccccatcttcgagaccaccaaagcgacggtgaggatcgcgcggctggagttcgacgccggcgagctcaccaccggccgcgacgaggtcgcggccacgctcaaggtgctcacccggccggaggccggcaacgacgcgttcccggcggtgtcgccgtgcgggaagtgggtggtgttccggtcaggccgctccggccacaagaacctctacatcgtcgacgcggcgcacggcgaggacgttggcgccggcgaggggactatccggcggctgaccgacggcgagtggatcgacacgatgccgagctggtcgccgaacgggagcctgatcgcgttctcctccaaccgccacgacccgacgaacgccgccgtgttcagcatctacctggtccggccagacggctccgggctccgccgcgtccacgtcgccgggccggcggggagcgcggcggcggacaggagcggatcaaccacgtgtgcttcagcccggactcgcggtggctgctgttcacggccaacttcggcggcgtgatggcggagcccatctcggcgccgaaccagttccagccgtacggcgacctgtacgtgtgccggctcgacggctcggggttggtcaggctcacctgcaacgcctacgagaacggcacgccggcgtggggcccggcgagctcgccggcggcggggctggagtcgctgtcgctgggcccgggcgccggggacgagtcgctgggcgagtttgatgagccgctctggctcacttgcgacgtctgagctgagggcgacagatgatgatcgatgagctgcacttttaattagaataaaatctgtggtgaatttgatcggttgataataacgggacgagcctgattgtgtgggctagtacgaaccttgttgggaataggttttttatgcatgaaaagggaataaatgaataatgattctgggtacagggtacgtttttgttccgttgcttgataaagctgattgtgattatgtggacattatccatcttcagttgtactactgtcgactgtcgtgtgaagtcacttttgcattatcaaaagtccaaaaacaaaactggacttctaggcttcttccctaatacagagtacagtacaactgccggtccaaagctttacttattccctgtttagttccccgtaaacttttttaaaaaacatcacatcaaatctttaacatatgtatagagtattaaatataaattaaaaaaaatcaattgcacagtttgcaggtaaatcacgagacaaatcttttgagcctaattagttcatgattagcaataagtactacagtaacccaaatgtgttaataacagtttaattatgctcaaaagattcgtctcgcggtttgcaagcgagttacaaaattagttattttatttatgtctaaaaactcctttcaatatctggtcaaacgttcgatataatattaaaaaatttccatttggccgactaaacagacccttactgggcttaactggaatcgttcgtcgaccaaaggggacaggacgaactgactggggtgggacggaaagcagagcagcacgccacggccatttctgagcggaataagttcatctgacattcctcaattatacgccgagtctgtctgagatccctaaccacaatactagaaatgtgtatcccataactatataaaaccatccaaaaaaaagtcccgatacagtatagatgcttggttttgctgacctggcatcctagtaagaaaaaataaaattaaaatgcggggcacacatgtaactgagaagaaaaaattacgcggtcaacaatcctacccagtaatcttcttgtcttttcctttttctcttctctttcatttttatcttcaccgcagagggggagcggtagcaagccagcgccgcggcgacaagcgaatgacgcagcgggtgaaaagagaaaaatcccgccaccgcctctccgcggccgcactcgcccgctcccctccctctgctccgcccgcgcccggagctgctgctcgccagccgccgccggcctccggtcacgcacgccgctgcccgctgccgctccccctcaacagcaaagataaaaacgaaagataagaaaattgctgattagaattgtttttggaggaaaggcgttaaacgcccggttttcattaaaaagcgaaatagttcatacatgaaaacggaagaacaaaaacaaggctggaatgaaaccagcacacataagttaggcactttagctgctggcacatcttaggaacaagccaggaaactagacaagaagaagataaagctacgaacaaactgataggcatagagatcttcagttcttcagcttcaggtgtttgctcctacagtccttcgggtactggcaagcagtgagtcccttgtagcattcaaagaactcttctcctttgctgacgccatttttttctccgctgtaaaagaaataagatagctttatgaggcaagtgagaggcatccgaaatcatcttgtcattgaacacccaatcatttctcatgagccaaatagcccaagcgcccgcagcgaagcaagcaagccaaatagaatgcgacccttctttgtacaagtttagtttatgtaccagttcgcctctagaattgagaatactatcccaacctagagcatctctataacagcaccacataaacctaggaatggcacatctaaacatcatgtggtccacgtcctcgacttccccacaaaatttacaatttggactaccttcccatttcattttcttcagctggctggcagcttgaattcttcccttcaacattaaccagaagaagattttgacttttaagggaatggaggacctccacaggtcctgcaaaaccctatctttaacccctccaaaacatagggcctggtaaagggatttggtagtataagagcctgtcgatgtttgatgtcgcgattccggtatttgcatagtatggggatcgttggtactatgatatacgtgaggctgaggtaaaagagacggagacagggatttttatacaggttcgggcccctgaattgtcaggtaataacccaacatcctgttggccgaagccggtattactcttattcaccataatcacactagtacaatatttgggataacctatcaaactgttgtcgatatggcggtgtgaaggtctgactcgtagtcgataacagtgtagccttcctcctcgaatccgcatccggcgagatcagagacagcgctatatctctcctgctgacagtatccgtaggcaccgtaagggactagccatgcctatctctgaagtcgatatctggcgtcttgtcttggcgtatgtcaacttgtatgttgtggcttctgttgttccatgtatgttgtggtgggtgtcttccatggtgggtgtgtcctctctcctcttagggggtcttgtatttatacccataggtgtccccttgtccaagtagaactagggaaaccaatatgaatacaatctaagtagtccttgtcgtttccatgtaaaactctggttatcttttcttatccggaactcctcctatatctgtaggttgcttccgtataggacatggtatgtagtgggtcctaccgagatttagtcaactactattaggtatgtgatatccataaccctgacagagccagacttatcagcttccaaaacatttgatctttatcacctgaaagatgaatctcccctacaaattatgtagttcttcccattcctccatctcc

SEQ ID NO: 13573 - DNA, 554 bp, Oryza sativa
taattgaaattacttgacttgatgaactctccaccagcctccgcctcaatccagcccgccccgatgtgcataccaagaggtggaacgtccgggaagacacaggcagccccttatctgtcatatcctcaagcagccgccacatcgccttgagctccccacactccgcaaagatcttcaagatgaggttgtacatgctcgtgccgtgccggtacccctcctgttcctccgcccacaggaagaacttgtaagccagcctcgggtacctagcgcggttcacgccatcgatcgagacaacaaatttgagcagcacttccctcacaagggcattggacaccctcgggcgcatttcgtcgagcgcctggcgggtgttgaaccccgggccatcctgaagcaggatcttgacaatcctatccgccttcaacctcagctcctcaaagaacctcctcctggaaccggaccccgcgccaggggacaagttttcgccatcatcgtcgtcggtctcagcccggccgggcggcgtcagcagccggagcagcacttactgcgggacgcgt

SEQ ID NO: 13574 - DNA, 1114 bp, Oryza sativa
tttttagctatagttacatcttttttcaccatatgtgcaccccctcagtgcaaacttaagcacctacatcagcttaatttggtctaaaacagagtaaagcaagcatgtgacacccctctccatttcgctctaactcctccctgcctactccacctctcctagcacctctcttcttgctccacccctctcccactccctcctgctccacccgtcactctcctctgccggctattttttgcacccgatgcggcagctgggatgtggtggctgaggtagaggcttgcaaggaggcaaatctgatgaaggcgatggtgtcgtcggatggatgcagcgctcagctgatgtgatgcaggagaaggtggaggcgacgggtggatgctacaccgttggctgatctgatgcagatttctctttttctctactcttggtacttgctagttcatgttggtgaattcaaagcatttgtttttttcttgcccatctttactatgagaaaaattgataatgcttcccttcgtcatccatatttttcatccatggtccgcataatgccacaagatgcttctccataaccgatcttctccagtttaagcatatctcatattagtcctatatttcggaaggaaaaagtacgaattaccccctgaactatcgcggtcgtccgaattacccccaaccacaaaaccgggtattcttcacccccaactatgcaaactggacaaattaccctcctcgatctaatctgtggtgattttggtccacgtggtgttcgcgtggtagtccagtcagcactctaattattaaaaaattgtgggacccacctgtcatctcctcatcctctcttcctctctctcactcttcctctctctctcaaaccggtcggcgacggcgtgcgggggaggacgcggcggcggcgggcggcgccggacaggcccacttcgccgcccaacccacctggatcgccaccggcttgtccaccgccccctgcgaccccgccaggcaggcctacaccttcggcctccgcaccatggtctgcctccccctcgccaccggtgtcctcgagctcggttccaccgacgtcatcttccagaccggggatagcatccccaggatc

SEQ ID NO: 13575 - DNA, 2455 bp, Oryza sativa
cgcaatagttcgggggggggggtaattcgtactttttccatttcggaataggttttaactttgtaccatgtgacatgaccgcttagaagtccacccaaaaccaatagttttaaaatgtaaaaatactgggtcgttgcccatgctagattgaaaccagggggatccacatgaaattgctacgacacttccaatgatagtgatttaactagtgggccaaaataaaaataccagtccaaatctgaggcaagatgaaatgttcgtgattgctaccattaacaacgacccaaacaaaggccctaaatgactagtacatcatgaatattattggtagcgactctagacaactaaatatatagttggctaccattgacaacaccccaaacgagatgcgtgatccttaaatttaatttaaagtgttttggtacgggaaacaaaccaaataaactttaggtgctgtttggttggagattgcaaagtaaacggtaaggacatcagatagcactgtgatagtaatcagattacggcaaacttagattttgtttggttctcacacgtgggtcgaggggagcggcggaggcgacgcttgattctttctcgtgttgcctctccgtatcgttaacgcttatcgctcctgatcgagcggtatcgcctctgaactgggcccgtaatgggttccaaggtatccaattacggagcatctcaaacaaacaacgggaaccggatctgtttgcgctggaatcgggtgcgggctgaattttaccgaaccaaacagcaccttagtgccataacattacccacctccactacttttaaaaatttgacaacacttccattagctatccaaaaatttcctcaagcgttcgcacaatgcccaagtcttttgggaatatgcaaggagtgcatctttggaaggaataaaagttatttacatggaaattaagaaaacaatgaaggggacaaggtacatgaaaataaaaagactaggagctaatctcgcaactgatggtgcgaccaaatgtctccgtccgacaaacgcagctccggcactgccaatcttgcaagtcgctaaagttcagcttctgccgccattgcactggccacatgtaggatctttgctgctgattgaagactctattgtttcgctctttccagatggtccaagcaaccagagccacaatggtgtcaaatccccgtctatgttccttgcattgcttcatcgtgctgtcacatagccaaagatggaaagacgaatctgaaagtggcaagcatcctgcatgtccaatcgcattgagggccatccaccaaagctggcaagattctggacatacgatcagcaggtgatcaatgctctcctcgcattgatcacaaaggacacacttggcaggatgtggaagtcctcgctttcgaagtctatctgctgtctagtatctgttaagggcaacaagccagatgaagtaccgatattttggtgaagctaaagatttctagattgggctggactggaagcgaatgcgacccaggaattgtgcttgataggccgaccgagaggagtattcacctgacgtctcccatctccagtgcagcgaatcctcctggtccgagagctgtatagacttcatcactggccagaggctaagatactcgagaatagcctgcattcccagggcaccagttatgtcttgaatccatcttttgttgagaagtgcttctgcaactgtcctgtgattgcgaaatctcgcaggaaccgcatcatagatggaaggcgccaactaacaaatcgatgacccatttatccagatatcctcccagaacagtaccaagtttcctcttccaaccgaacaatgcccgagtcttgatgcttctccacaacctctcttcacctacatgagtgtgtccgtcatctgtgcgacctgacatcccacatcggtcccatattttggtatcgaccggtaacaacacggtgcccgtgtgagacgatcggttaggccaccaaaacccccacagttcttggcttcttgcacatgtaatacatccatccaagcccccaaaatttacagggagtaaaaaaaaaacaaaaaaaaaacaacaaggtaacgacctatactagatccaaaccagggtccacatgaaaaacacttcatcgttaccactgatagcgattcaactggtagcccaaatgaaaaatactggttgaaatctagaggccatatgaaacattcatgatcgctactaccaaacaagggcccaaatgaaaaatacatgatcgatattaattaattgttggtaacgaccacccaaacaaatagtactacctccgtttcaggttataatactttttagcattgtccacattcatatatatgttaatgaatctaaatatatatatatgaatatacacaatactagaaagtattataacctgaaacgaggaagttgcctgcattcgtagcaacgg

SEQ ID NO: 13576 - DNA, 842 bp, Oryza sativa
ggggtattgatgaacagatattcaacttgtggctttgccatggctctcttcctcctccaactctacctcctatgattctatttctctaattccaatctcatgcttctgccttccctatattactcttcccaatccctgattctactctcttgattgtattcctgagcacttgtattcttgagtggatttgcaacatatcggtggcacttgtgtgagaaatttggtgtgattgtgttggttcgtgatagcgacctagaagtgcacttgctgagttttcatatatgagcaatcagaagttagatctattttttcctctcgctctctcttttttttttcaagtgaaacacgacgatacgatgtaaattgaacaaccttagcacatatggcttacaatgtttactccaaacacaaatataaccagagtgccccggtcgtgttaaacttcaacacattcttcaaagaaaaacagaacaaggcttgcattgaaatttcccctgaactcacgagtggtcgctactggtacatggcagaaagctcgggcggattaccggcgcattgtgctcaccgaggtaggggtgaaaacggtatggaaatatccaagaattccggctaccgtttccggtttgcaccgaccgtttcagtcggtatcggaaattgtcggtgtcggaaatgaaaacggtaatctcttccggaaatgttagcggaaatgatatgggcttttttccgaccgttttgtcggtaaccgttttttatcggtaatttccgtcaaatttccgacaaaattccgaagaaggaagccgtgttctcgaagactcaaatctatatctaaaaaaagtcggaca

SEQ ID NO: 13577 - DNA, 5075 bp, Oryza sativa
tgcgacgacgtgcagtctcacaaggactggatcaaggacatcgaggcctacaaggtcattttaattaccttcctggcctagttaaatttgtgtgaaaacgtagtaactaattaactagatcgatcgtaataatatatatttttttggttatagcctgggaaccgcgtgacgtacccgatcatggccgatccgagccgcgaggccatcaagcagctgaacatggtcgacccggacgagaaggattccaacggcggccacctcccgtcccgcgcgctgcacatcgtcggccccgacaagaaggtgaagctgagcttcctgtacccggcgtgcgtggggcggaacatggatgaggtggtgcgtgcggtcgacgcgctgcagacggcggcgaagcacgcggtggcgacgccggtgaactggaagcccggcgagcgcgtcgtcatccctcccggcgtctccgacgacgaggcgaaggagaagttcccccaggggttcgacaccgccgacctgccgtccggcaagggctacctccgcttcaccaaggtcggctagatcatatcgatatcgacctcgctcttcgtacatcatgtgcgccacgcgtgcgtgatagcgtgtgctggcgtgatgactatgcgagatgcatccctgtgtgtgttggtgtggataatgccgctacgtttggaacagtagtgcatttactctgtgctactgtctgaactttggctgtttggcagactgtttatgtacccgtatgttcgcccctgtactaatagagtgggtgttgtggttggcaagtactctcctcggacaacattttaactttgactactaataacaaacaaattaaaaagatcaatcagatgttactagacatcttaattttattaattttatagatattgatattgtttgttcaaagtaacatcgtaaagttctaaaatgtttatatttgggacggaattaaaacatcttaattttataaatattgatcaaaatagcatcaaagttctaaaatgaagccatcatttagtatatttcgttaatgaaatttagtatatattgttaataaaatttttatatacgtcttcttagtaattaaagagctttacaaaacaaacttccataaaaaacccctaaaacaaacttcgataaaaatttttatatacgtcttcttagtaattaaagagctttacaaaacaaacttccataaaaaacctctaaaacaaacttcgataaaaaaacccctcgaagataaaaaaagaccctcaaaattaatttgaggttaaaaattaggctaaaaataaacttgataaaaaaaccacccctcgaagataaaaaaagaccctcaaaattaatttgaggttaaaaattaggctaaaaataaacttgataaaaaaaaccttaaaattacttttaaaatgatttatattcatgatttatattctagtacggagaggattctagtacggagagggtgggtgcatacatgcacattccaatgtaaccaaagaatgagaacaaatgattaaaataataataaaacagcgtacacgaaaaagagaaaaaaaaggacgaagagattttagtgagacgtacgcgcaaaattctcagtcgaatccggccgtaaactctccataggaaaagggtcgacaataggtaatcacccaaaccaagtggttaacgaactaatcaggttggcattgcaacgtcatcgatgatgaaatcaaacgccgccttttagtattttatagtaggagggtcagcctcttctttggaaaaaaaactgtgatactacgaggaagcaatcgtccgttggcatcgctcgcgtggttagttgtcaggtcgctccgcttcattctgctgtgcattttggcgagtgcctagacagatccgtgatgaacagtatatgaaattttccacactttggcctggtttagttcctaaatttttcttcaaactttcaactttttcatcacatcaaaactttcctacacacaaacttccaacatttccgtcacattgtttcaatttcaatcaaacttttaattttagcgtgaaataaacacaccctttgattacggtttagtcagaacatttgcgaattgcaatgcgcgcgggtgaaacacctttatcagacgcgatcgggaattcaggatcgggaacagctgcgtgccgtgcagaataatacttcgtattacagaaagtttagaatccgtattacgcgagagcagagtcgatgcagtgtgttttgagtaggggtgtgaacgcagctgaacagcaagcagagttggcagattcgaattcttgtcccgtaaatttttccttgccttatcctacacccaggcctagatgcttgctttttataatcctctagtggcaacacagcctcacctataaatgctgtgactgatgataagtccagtgcattccatcacagacagttcgcagaatcgcagcagcttagcttaattacttttttcaccaactcaactttcagttaatttccggttaatcctcgattcctcatcatgcctggactcaccctcggcgacgtcgtccccgacctggagctcgacaccacccacggcaagatccgcctccacgacttcgtcggcgacgcctacgtcatcatcttctcccaccccggtatatatagtgtactactgcattactgtcgtactgcgtgtgtccgtgcagcagacgagcttgagaagttgagatgttgatcaaatccgtgcgtgcatttcagctgacttcacgccggtctgcacgacggagctgtcggagatggcgggctacgccggcgagttcgacaagaggggcgtcaagctcctcggcttctcctgcgacgacgtcgagtcgcacaaggactggatcaaggacatcgaggcctacaaggtatgtacacgatcgagttcatcgcattcatcaatccttgactgattgatacatttgcagagtcgtatctgattataatttcttggttcaatttgtgatcgatggttgctttagcctggccgccgcgtcggcttcccgatcgtcgccgacccggacagggaggcgatcaggcagctcaacatgatcgacgccgacgagaaggacaccgccggcggcgagctccccaaccgggcgctccacatcgtcgggccggacaagaaggtgaagctgagcttcctgttcccggcgtgcacggggcggaacatggcggaggtgctgcgcgcgacggacgcgctgctgacggcggcgaggcaccgggtggcgacgccggtgaactggaagcccggcgagcgcgtcgtcatcccccccggcgtctccgacgaggaggccaaggcgaggttcccggccgggttcgagaccgcccagctgccctccaacaagtgctacctccgcttcacccaggtggactgagagactgatggtgagggagggagggagagatctgggccgtcggtttcgtgtgtaataaaccaacgcacgacgtagatgcttccacgtgtgtgtttcccgtgctgcttcgattgatcgatcgatcattcggtaagtactctagttatgtgtaatctgctgtttgggtgtagtggtgcatttgctgttctgttgcctgaaagtgacgaacggattatgtttgtcatttgtatgtaaaatgtaaccgtatgttttttatttatcccttccgaaattactgtggaatatagtgaagtaatgctgttaataaacagcccgtttaaatatgttttgtccgtgatgggttgggcgtttgagatgaaacccatcaagagtggtccggtacagttcatttaactaatgggccaaaattctcggccttacaaagattgtaccttacaaagtccgtgatgtactgaaggaataagttcactactttagattcttcagcgtcaaaaaaaaaaaaactactttagattccttagttcgtagccggtctgaaattacgcgtctctcaactttttaaaacaaatgcaaataaagtttcaaggtggtttagatgacggtttcggctaacatgacgcttacgtggttggcttgacttgatcctcgtcctatgtggcggtgacgtggcattagaagaaaaattaaaatgtagggctcacatgtcaccaaataaagataaagaaatagtggaacccacctatcaataggtcccacactcctctccatctccagcgaacaacgacgcttcaacacctcctcccccttctctcttctgtccctcctggccttctctcctcctccccgagctctcttgccagccggctgccgccgttgatgtccatagtcggtggtggatccagaaaattagttcgttggtatcgtaacatgtttagcagtgttatagtgtgttaactatatttagattataagttataatatatagataaacagtctaagtatatttttttttctgaaagtcgcctgacaccagtccatacgcatgtcactgaaattgggcttggagctcagttacagggctcgcagttcatcggcaaccagattagcaatcttcaggatttcactgacagagaacatcaatactattttttttattatattatgtatgggctagtatatatgcattgaaatttgacagtgaggcaaccaatggaatgcttcctttcaagaaaagaaaagggattgcaacctacagggaatctcagtcatgagagcgagtcgatcttaatgcatgcggcatgccaaaacaaagcggatttttgccgaccattatattcagctccacaaagataaatggaaattaatcctattatatcataacaactaattcattgctgatcttaaccatgccctccgaggaatttggcgtgtgctttgggctaatttggcgaggtaatacggtagtatagcacggttatagccaagctgacatgcatggcgtccttccagtcgccggctggcatcaccggcttgtgccgaatcattagcattgctgtgtctttcgtgcatgtggtgttggatcatcttattatggcatgccaatggcagtgatcgcactgttctctactgggcttacgccatgagcctcgatcgtgctcctacaatataat

SEQ ID NO: 13578 - DNA, 593 bp, Oryza sativa
gatcagcttcagtgccctcgaggcaacagagcgaagggactcttcgtactccaggacagagacgcctccagatgaaagcttgaaattctcttgccatgcccttctggctgtctgctgcgccatcaccagatcgtcccgcatttagcagtcgatgaaatggtcgatgcagtgaggttcaggcttcagttgcgccatccatatgacctgctcaattgcggatcttctgattccagggtgtacgcttgcttcagttctatgtgaatttgcttgcttcaggattaatttcagcttctgtacaaaattccttaagccgattccatttccgttgacagcctcgatgaaatcggtctcacagagaagtttgctgaactgcaaaacaaggccaagaaaggcctccatgtcctcccctataagattgtctgtctgatacatagttctaagtgcctacaaattaaccagcataaacattagtcccttgtatgcatcaaacaacacaactatcaaatcttaatctgtttagctaaattattaggtacaaaactgtgttcttaccatcgagatgttgtctacagaaaatttctgcatggagtatt

SEQ ID NO: 13579 - DNA, 557 bp, Oryza sativa
agtgtgaccccgggctgctgtcgccatgcgcggccccgatcttcttcgggacggcgccgtcggcgtcgtgctgctctagcctgaaagcacagcaggggtgcttctgccagtacgcgaaagacccgacgtacgcgtcctacatcaacagcaccaacgcacgcaagatgatcgccgcctgcggcatcccctttcccaactgcagctaggctccgtcgccgccgttcaccggtgcgggccatgatgtgtggcaacatatataaatatatggtgtactgcgtgcttgaataaaataaaggacaatgtgtggaaacatatataaatatatggtgtactgtgtatttgaataatataaaggatgtgtgtttgaatacataaattatcgatcgattaatgcacccgtgtttgatcgatcgatcaggtatcttctgggatttaagtttgagttttgaatttctaatcttgtgggagcgtgaaatgctactttaagagttaagtattctaagatgatttgtgttttcaagtttgtctatcgacctctcaactcaaatttctcataa

SEQ ID NO: 13580 - DNA, 1177 bp, Oryza sativa
aagaaatagtggggatagtgcatgcatcaagtttgatgctagagtaaatatagtatgagagagttattaacttttcttggtcttagtgtacctatgaaatatgtagatcaatttggaatggagggagtactgagctaatataaacaataatgtcaaatctgatatccagaacaatccaaaaaatctgactaaagcagccatcaagctcaagccacagttgtaatgaaacaagcaattgaaaatgtaaacatacaaagggaactcttgaggacaaatgccacatatacctgtgataaagaatcctctgcccacgagacacctgatttataatagctctggaggcataagaacaggacagttgcatatatatgtgactcaaatttgctagcagaagaatcttgatcatagtggtgaacgagatcctgcaacagtttagttcattagttcctgatgtaacagtacttatgctataacatttgagtgcttgcagacatgaattctcttataccagatttggaccagagatggtagatctctttccgaccagcaattgtttctctatgtactgtgccattatccgcccagctaaaactatatcagctggcaaaacagctgcccaacaggcacctccacattcatgcctatgttcagcaatttgtttagagtctggagtcttgctctttgtagaagttacactcaattttgcaatatccaccacattattgttagattctagatgagtattttgattacaagacatttgtcctatagccttctcctggcacctgtttgaacagtaaatgggtattgtacatgaagggcagactacgacatctgctggagcttcactaaagcaatagtggcagtgagtatcccggcaagatttcatgataatctgcatacaactgtacaagtaagaggcatatagaacttcagttcaagattacaatagttgactgattatttaacaatgctcatagagataagctactgccctggcataataaaacagtaaaaatatactataacttatcaaatttcatatttgactaggacaaagatctaatgaaactcagtatagctttaggtggcacgtaaaaaactcatttggcataaacaattgaggagatgattcttgatcataccacagcaagaggatcctcagcatgaatcagtg

SEQ ID NO: 13581 - DNA, 2629 bp, Oryza sativa
acattgttcctacaaatcaaaggggccctaaagatttcaatattgaaatgatgttggtaagttatcaatggacctccacgaccccttgaacgacccctagcagtaattgtatctgacatatctgcagtggcgtagctagctatgtggcactgtggtccatggaccatctaaaaatttgatcgagattaaaactgtagtatatgtgtgagttaatataataaaaattatatagtaggccacccatttaattgatctattacatatagatagaccacttttactctaaattctagctacgccactgcatatctggtacaataatattattatactcagaggttggtttagtttaggaaatattcccttttccgccatctcctataaattaataagcatgcacaactcgagccccacatctcctataaattagtaagcatgcgcaactcgagctccacatcacagctaataaaagctgcagctaacacgtactgttttgcatgcgcgcgcttagcttaattctcacgagctgatcgatcacaggttattcaattagttaagttcagctacttaattagctagctccattacactgcaagctaggcccagatcgatggcagcttggtccatggcgtctctgatgatcgtcgccgccatcttcctgctcagcctcacctcggcgagcgtcgtgcatggccggagcagcaggaggagcttcttctccagctacgacgagccgtgcatggagatgaggctgtacctccacgacatcatctacgactacagtaacagcacctccaactccacgtcggcggcggccaccaagccgacgccgctgagcaccgccgtgtccaaccccggctacttcttcggcgagatggtggtgttcaacgaccccatgacggaggggagggcgctgccgccgtcgccggcgatggaggaggagacggcagtgcgcgcgcagggggtctacctctacgacaagaaggaggcgcccaacgcgtggttcgccttctccgtggtgttcaactccacggggcgccgcggcacgctcaacctgatgggcgccgacctcatgtcggagaagacgagggacctctccgtcgtgggtggcaccggcgacttcttcatgtcccgcggcgtcgccacgctcagcaccgacgaggcctcggcggacttgtcatacttccgggtgaaggtggacatcaagctctacgaatgctacgtctgatcccatgcatacgtacgcttgctctttcatggccgtggatcggatcatcgcgtgtcctaaatatgcgcttgtatttgtgtgattgtgtgtgttgaatttccttcttgacattcatcatctttgcgtgacgagtcatatgcacggagaaatgtgcaaaatgtgttttttttttcgtgttttggatttgcatctcatgtattgtttgagtgacgagtcagcgatcggcttggcgtggtggtttgttttgtctttctttttcctggttataatcttcatagttataatcttataattttttttctacatcaatataaaatcttgtattatctggtgtagtttgttaaaaatacttgcctttttcaatcaattgtcatagatgtgaccggacgtcgaatgacagttattcgcttggatgtcttcgcgagtgacggttgaaagtcggttatgccatgggctagatcatctaaccactggaagtgacctggctgccaatcaagagtgggcccagtacagtgcatttaactaatgggctaaatgacgtccttcatgggtatcttttatgtgttcttttggcgttagggtagcatcgcggtgaagtcgaagctgctgtgtcgtttgggtggcaagctcggcaacgataacatgcgtgggctatttgtaggggtgggtgttcggtcagaccgaaaaattcggtctcggtcttcggtttttcggtcagttcggtctttgcaaactcaggaccgaatttcatccaaaaaaactcaggaccggcaaattcggtctcggtcttttcgatctcggtctcggtctgaccgaaattttttaggagaaagtttggaacgaaaaaatttgacagaggcgtcgccggcgcggtggagggcggaggcgtcggctgcggcgcggtggaggacggtgtcggccgcgttgcggtggaggacggcggcgtcggccgcggggtggtggaggacggcggcggcggccgcagccgcggcgcggtggaaggcggaggcggcggtggcgacgcggtggaggctggaggaggaggcggcgcggttggggcggagccggcggtgggggctggaggaggaggcggcgtggtggggttagaggaggaggcggcgctgtgcggcagtagtggtagggttttttttatgggcttattggacttcctaggcctattgggccaaaatttctgtcatttcggttaattcggttaactgagcccaataaccgaaatgaccgaaataaattcggtcttttgagggctgagactgaaaaggttaccgaatttctcggtctcggtattttcggtctcggtctcggtcttttcggttcggtctaaatatgcccacccctagctatttgtgtcaccacggcgatgccttgtgtcgggctccattg

SEQ ID NO: 13582 - DNA, 532 bp, Oryza sativa
aaattttataaccatttagatgacatgcaaacgattaggagatatcctctcgagtgttcataatcctttccctaatagctaatactaagtatgtatgtttaactttgggcattaattaattggtgttatgaacttatgatgatgttaattgcagggtttcaggaagatagtagctgacaggtgggagttcgccaacgagttcttcaggaagggagccaagcacctcctcgccgagattcaccggcggaagtcgtcgcagccgccgccgccgccgatgccgcaccaaccctaccaccaccaccaccacctcaatcccttctcgctgccgccgccgccgccggcgtaccaccaccaccatctaatccaagaagagcccgccacgacggcgcactgtactgtcgccggagacggcggcgaaggcggggacttcctggcggcgctgtcggaggacaaccggcagctgcggcggcgcaactcgctgctgctgtcggagctggcgcacatgaagaagctctacaacgacatcatctac

SEQ ID NO: 13583 - DNA, 1875 bp, Oryza sativa
agcttcaactttttcttcaactccattggcaactctaatggtgctttctcttctttgcgtagtcctcgtcgaacggaatgcctttaaacaattacaagcatgaatagttgctccagaatcaatccaccatgtggatctagagtaaccaacataatgagattcatttacaaatgtaataatgttctcacctttctttgccatgatcattttcaaaaagtcaggacaatctttcttgtagtgtcctgtcttcttgcagtggagacattgatctttctcaacagcgaactgttgttgctgaggcagatgctgagactgtttaccttttgaggtgggagacttgtggttctttttcttatctttaacatagtttattgaaccaccatttgattctttgaatctctcctcctcttgcacacaattagcaatgagcttctcaaagttccatttctctggacttatgttgtagttgacaataaaattgtcaaactactttggcaatgaggccataaccagatggaccagaaagtcatctgttatgcccaaatccattggcttcaacttggaagccatgttgctcattctaagtatgtggtctctaacaccacctccatggtacctttctgtcacaagctgcttgatcagctgtgtagcataagtctttgaagagccagtaaactgactctttattctttcaaggtactctgagacagcgtcacactctgggatcgagcccaatatggtaggctcaatcgtattctttaccacagccaaacatttcttgttggctaaggaccatttcttttgttcaatgtcatacgacatgacgagaggagcattgtccctctgtctcttttgccagtcagcatctgactcattttcacctctgacaagttcagcaggttctataggacatggggtagtcaatacccagtccacctctcccaagataaaagcaaggtcgagttttcttttccattctgcgtagttatctccttttagggtcggaatatctttaatgcaacccatcaaggagtagccacctgaaataatcatgtgcggtgagaacaaaattaacattaaaatattatgcattaagcctacatcaccgttgggcagaattagacataacacatataaccataactataatattgcaattaacaacgttggtcagaaaattacaacatcatagcacatacttaatgttcctaaaattaaattctcccgttggttcgaaatttaattttagaaacactgattttcatcaattacatctatttgcagcggaaaactatataaaaatcatatgaacagtagcaaaatctctgtaattctctctctgtgaaaattctcccgttggttcaaatttaaacagaggtaaaacatgcaaaaaactattcaaaattctattgaaatttgcatgaaaattgacaaaataaaatggaaaattgctactgttctcttttattcattttcggcccccgagggacctaatttgaacttttgccggcggccaacggcccttttggcatgggcgggcgccccctttccccaagccgcaacctgggcctgggccaggaaaaccgccccccgcgcgcgccttcttgggccgatttcggcccggccggcgtcgaccgtccgatcagctagggtttcgatcggacggccgggcgccgagatcggaggatcaaaacccccctctcccggccggccgccgaaaaaccctagcttctcttctcttctctctctcacgcgaccgcgtggacggcgtcgccatcgccggcgaccttcgcgccgccgcgccatggccggcgctcctttcttttctcttcttctccgctcccccaccgtctctaacccccaccgtgtgagaga

SEQ ID NO: 13584 - DNA, 971 bp, Oryza sativa
tgtctctcaagttgcaacctgaaactctcatccttatcacaaacaaagacctgatttatcctagttgtctcgtcctaatcatttgcatctagattcttgaactccaaacactagattgtttttgcagatatcaacagataaaaaaaaatcctctaaattgctgtgttttctacacctgaaattctgaacatgtcaaactcatcagttaactgtcatcaggtgttccatggactgaagaggagcacaggaaattcctggtagggctcgagaagctcgggaaaggcgactggcgcggcatttcccggcacttcgtcacgacaagaacaccgacgcaggtggccagccatgcccagaagtatttcctcaggcagagcagcctcacgcagaagaagagaagatccagcctctttgacgtggtaaacttcaaacatctttgcaacaatatctacacagacagtttcagacagcaagaatcatgtatttatatgagtgagttacagtaacctaacatgtctgaaaatttgatgttttttttcttttctttcagattgaggatgcagaaaaggctccgagtgtgaatgaacgtctgaaactgagacacgagacagcctctgtgcctgctgaaatgggattccctgcactgtcactgggtatcagcagcatggcacagccagaagccatgctgctgcctcctccatccttaaccctgacgccagctgttcatcaccagcagtgagcagcagcagcagcgaacaaccaagaacaatccatccttctctgatggtggcaaagcctcagtgcaactgcaactacaccacctgatctggagctcaagatctcgactgtccgtcagaacgatcagcccagttcgtcgccgaggacgccttttttggggacaatcagggtcacttgaacttaaagagagagagaagaagaagaaaaggaattatcttagagattactgaattatt

SEQ ID NO: 13585 - DNA, 1136 bp, Oryza sativa
  unsure (1)..(1136): unsure at all n locations
catagagcaaaccttatttcgcaaaacatttgtaccgataaccgcatacaagtaacaaaaaaataattggtatctgtgttggtcgatgttcaaatggcaatgcaaaaataaattacaatggaaaaccataaaatcagtttcaaaattaaaatttttgcagcgacttgtaagctgaaaggtatacaatgggatttacgcacctacccatgcgtcttgtgtagatgacagttatttgaagtagtacggcgttcagtcaagtgttttacagggaaagcatacagggttcctctacattgacaagatcaggttcacaatcccaatagaaaaccgatgaaatccagttaaattttgttaaaataaaataaaattcggttgatttttttaacttggcaaaaaagagagagtgaattgtgctttctacctattctggaaagtccagcaggatggaattgtaaaccctggacaagattcctacagggatgtgttccaagcagtaggaatcttctccagacttaaatccaaaaactaaagatcagatatcttgtagactaatcgagtgatgtccaataagaaatacgattagtacattaagtacagggcgttgcacagaaaacatatcacaaccccatgctgtgaacacacgctaaaacacatacgcgttaaacccacacacacagcttcaaatcttcatcgaggaaatctgaagcttgagcatacacgttgtcacgtaactacacaggcgcagctgggatcggaaacaacaggtagagtagtacggctactgcttttttcttgttttgccataacaacagtgatgaaaaagaatcaggtctctcctcgaattgaggagagtggaagagattgttctagcctctgtacacgccggagggatcagcgttttgaactatccaagggtgctcgaggagcttgtggaggggcagacgatgcgccgaattcttcacgagcatctgcagatcaaaatgctntcttgaggttcacactctggtggatgttctacttgtgtccaaatgacgatttacttgtcacagttttacagttatgtaaatcatcaggacaggagcatgcttcttacctgtgaaattaggtctttcgcagccggggacacgaatggtttc

SEQ ID NO: 13586 - DNA, 657 bp, Oryza sativa
tcctagttagtaagatcaagaggcttgaaggagcaagagatgaagtcgctaatgtcgctataccactcgtccaagctatgttcctcaataacagtggtccgagtgtactcgacgcaaccgaaatcttcgacaagctgagagttgctccggatgtatatttcaagaatatcaagaaagctggaagtatgggagctagcacggcattggcgatgaccaaatccttgtacccgaggattgaaattgacgccattgatggctttgcagacaggacaagcgtagaggctgctcttgatcttatcagcaatgctcaaaatgcggctgacaagattgcaagtgacgtcgtagatcaattccgcaacaccgatcttcagccgagtagtaataactctgatgatgaaaggactgattctgactgagcataaatgtagcaaatggaggcataacttgtacaatactggtgtatttatgctgtgcttgataattctagccaagtctttgatttcttaaaagcttttatcaagctttgttgagcctaaaacccaaagaagctattaaaaactttcagtcctcgcagactaagtagaaaaaatcacacaacccaatgataaaccaaggaagcaaattgaattgataaaaaatcacactccgttattatga

SEQ ID NO: 13587 - DNA, 605 bp, Oryza sativa
aaactaaatctctttataaatatcaaatagagtactaatacgagtaaagctaaaagccgatatttcttatctacatgatgagactacgactagttcacggttgttgccaaataaggttaatatttacatcacctacgagcaatctcggttaggctacaaaaggctatggtaaatatttggccaggcgacaataggctgagtttgttttcacttttcagaaccacgggtgccatgtcggatccatcatgcacaggttcctcgaagataatgccgcttccacgagatccgtgacgcctctttggaccgactgaggtggctcagatgaattctcctcctgaaatagggagagaaaatgctcccagatgtgaatataagagcaggtaaaatagcaggctataagctagctataaacatattttaaagagataaaggaagagagactcccaagaagtaatgtgtatatgacagataggatcaggtattaatagtatagtaagcaactaatgtatgaattgggtattacattggctatagatgatttggagctagcaattggctatactattaaacttgatctaacttgaatgacttgataatgaatttgg

SEQ ID NO: 13588 - DNA, 638 bp, Oryza sativa
agatctctgaccagcacaaatgcccagtgcaaccgcttgagcgttttctaagcgatcgaacagagacaaactaattcgtacggattgaaacaagaatcatcttctgcagactcccagatcccatgaaccaattaaaactcccagagtaattctcaattgaatttgagcaacagggcagctaaatcattgcactactacacagcagccaagaacacgcactccagcgaatcagatccagacacactacaacaaacaaataatcaaaacaaaactacaacaattctaaccatcgaagcccgaatcaaattgcaggaagagcagcgagagccaataagccatttttaccatcagatctggcgcaatgcaccaaggaggaagcgaggacgaggaagcagacgagggagatcctggaatccattctcgccgacacaattcctcgctgctgcagcggtgttactgttgcctcggccggggaggaagaaaagtgaggtgcgaggcacgcaaaaagtatgagaggagtgaggaggaaagaggcgagtttctgtcaccaaccacttctttttaaatttactctttattgaatcttgataatctttactctttccttccgggctgggctaaaaactttttaagtaaaa

SEQ ID NO: 13589 - DNA, 561 bp, Oryza sativa
gcaacccttgtaagtatcgagccgactgaatcaaagctgcttcgcggacttcttccagtcggtgcaagtcatccactcggtcctcctcgtagcgttcttcgcggaaattacgaaagcgcaaagactcgaattcgacttcactcggcaacattgcttctgccccatagacaaggaaaaaaggtgactggcctgtggcccgactgggtgtagtacgcaaagaccaaagtactgatcgtagctgttccacccatttgccggcatagggttttagccggtcaaaaactcgcgctttaatcccttgaagtattatgccattggctcgctccacctgtccattgctcatgggatgtgccactgaggcatagcaaatcttaattccaaagtcttcacaaaagtctttaaaaactccgccagtgaattgtctgccattatcagtgatgatccgattgggcactccaaatctatgcacaatgttgatgaagaagtctcgagcgttatctgctgtgattgtgacaaccggtttagcttcaatccacttggagaatttgtcaatggccacaa

SEQ ID NO: 13590 - DNA, 1090 bp, Oryza sativa
attgctaccagattaggcatcactgcatgagaggatcatatcatatgtatgcatgtgcagatgggtaaaaagatgaagatgatattgttcactgttgacaaggaaatgttatgctaacctgcagatgggctgaggtaacaaacaatatcctggtatccaagagaaaagtacatattctaatgtaggagtatataattccaccattaagtaggatgtacaagcacagaaaccaaccaaaagttagttatcttggcacatttgcgcacagttgctatgggcaaacaaagccctatgagcaaattgagcatccatctgctcaccaacattaatcagtactactagcaatagcaagcctaacagaataacagcttgcaatactttagaaaaggctactatgttaacaaaaggtgcgagatgtagtgttagtcctgtcacatgtgatcctttatcttcatgttgatgcacatatgcagggattagttccaggtaccccactgccatctgatccccggataccttagcgtccaaactgatgtcgcggcttggcggatatcatcgctggagtcggcatggaaaagaatggtcacctcgcaagatggagcacagttattaaacaagggtgcaagatgaggaacatccttcaatggcggtagatgaaacaggagtctcctcaaacagcttctaaactggttgctggtgcataacatcaggcaatgcgtcatttcacatgaaaaccgaggggccaacttgacttcgctgatgcccgcaaacagctgaagaagatactcgggcttcactgcttcaaaaagttcatatttgtttgtagaagtgggcagctcaagctctaatgtagtgatatcatgattctcggcaaatacttgcaagaagggactttagatccaatgactctatccgcaaatttttcaaactcacaaggccatcggcttggacatttggtccaagtttatcaactgttaacttcagagtaaacatggatggggtatccaaaatgagcatatctggtcgaacacatttcagctcaagaccaaccaagttaggcgcacggattgttaatgaccgtggaacattt

SEQ ID NO: 13591 - DNA, 2100 bp, Oryza sativa
gtgcgctctgctttcggtctctcccgtttcttgcttgattcccctccttcaagcttggtttggtggggatttgtgtttggtttcatggtggttaaggtaggagcggggatattcctgctccctgattttggtttcttgctgttcttgattagagcagcaaatgcttcaaatttttgggggtgccatggagctccttttcgttactgttcacttgttcagggacattgcacaaattaggagcattagattagatgcctatgattttggtcagtaatagctagttcttgcagctcctcgttttgttatggttgcaatgttactcgagccgtaggagcaggaagagaggaaaaacaaaaatacacgcaaaaatgtagcatctttgtttgcttttaatgttaattaagaacggaagcccttacgctacagcttccaattagtgcttatcaacgcaatgacaacgagaatctttcttatgttgcttctatttgttaagcaatgtcggtggaggtttcaccgaggggaagcaatacctcttggttaaatgctggttctgattgattattcattatactattgtttcaaataggattgtcaaatcccaatgggctaaatttgtgtcctgtgtttttttaccaggaacaccgagtgcgaaccagatatggctctgtatctgtttctgtatttggagatgaagacaagccggcgctcataacatacccggatgtagctctaaattgtgagttttctgatgacctttcaagtttgtaggtgaaagcttgctaatttttccatggcagggtagctgatgttgctatttttttttgtttggtagatatgtcttgctttcaaggattgttcttctgcccagaggccgcgtcgctgttgcttcacaatttttgtatttacacatcactcctcaagggcatgaaggcagtcatgaaggctttttcttacccaatattattgtagcattcactgtttgcccgtatttgctctgatacttacatgtgttattttgtcctacagttgggagcggcttcaatttcatccgatgtgcccgtgccatctgttgatgagcttgtggatcaagtcgcggatgttcttgatttcttcgggtactggattaccaccctggccaaattgcgccttattattcggtggtgcttgatccaacccttttatgcggggcttttggctttggttattccaattaagaattgggatgtggttgggtgtcactggccgggccttccttcttaccctttttggaagaagtattactcttaaccgttatttcaaagcttggcttggcttttctttttctttttcttaagaatggatggatacattggcacagaccaaataccgggatagagtgattggccttatgctagtttccgcgatatgcaaagccccttcttggagcgagtggttgtacaataaggtactaacatacatttaaatctgtcggtactgcagtattggtaatgtgttctgtgaattaacctcaaactcttatgtaccaggtattattaaacttgctttactattatgggagtcgtgggctagtcaaggaatgcttgcttcagcggtattttaacacggtatactttggtcttctggtagctgctttttatttgcatccttttatgtatatcagcttcgctcaacagttttctgatgctatgtgcaggaagttcgtgggaatggacaagaccctgaatcagagattgtgcaagcctgtagaagtgtaagtagttcatctcctcgtcagctttctgatatgattttgacaagattggtagctgtctacttatagaaagttagtctgaagcaataggtttccttttatgcagttacttcatgagcccagggatctaatgtatggcgattccttcaggcgataaacgagtaagtggacaaattatcttctgtgcattgcctgaacatgcaaagaaacaggatttgaacatactcaagtgaatttttccatccatcaggagacatgacctgacggaagcgttgaagaagcttcagtgtcggacactgatttttgtgggagagaactcacagttccacgacgacgcagtccatatgacc

SEQ ID NO: 13592 - DNA, 630 bp, Oryza sativa
tataggcgaattcgagctcgtacccgttgatccgtatagttgactagttttcactgtgctgattattattaaccgggtggtctgtcttggtatctataggtaagttaggttcttatgtgaagttatcattttgaactgtttactatttttaagatgaaaaatccacagatacatctaggatgttttttttgttagtgtttaactatgtgatttgatcatcaacaccatgagtaaatgttttggcaagattccatttggcatgatggtccatttaccttggcattgacctggcataatctcagggacagaggcctgaacaggattcatcagttaattcacgccccacagtagaccctatggtcatatctaacatgaagaccgtcttaaaactcataagtgagagggtgatggcctcttctgagttcaggcgatctatgggccaaacacttcaagcactcctttcagaaaaaggcacagatcctagcgttcttctatgcatactggacatgataaaagcttggattgaggatgactacagacttgcttcatctactggctctgtcagttcacttaatccaaaggagataatagcttatcttcagaagttatcagttagtttgaccaggaaaa

SEQ ID NO: 13593 - DNA, 878 bp, Oryza sativa
  unsure (1)..(878): unsure at all n locations
agagggacagctaatatgtantggtaatttaatttntactttcacatttattatatgttacgcagggatgagtaggggtaatttncctgttcactactcaccccccaggatgatgtcagtctgcatccagcacngacggaaacagnntaatngaaggaaacacaaagaaaaaacancaanccaattncggacggccgcgaacactctagaaatctttctttatgttgggcccataaaaacctgggcccaaatcttaataggccgggaggcctttgtgatgatcgggccggatccaggcccataaaaaacctgggccaaaagctgtttgacctcctcttcctttctatttctttcacacagttacctttcacctcgggggcgggcggcggccggcggctaggtcctgacagcggagggagcaagcggggaggaccaggcattgggaccctggggcgggcgatctacacggcggggaagtggatccgcggcacggggcaggccatggaccgccttggatccaccatccagggcggcctccgcgttgacgagcagcgtaagcagcagcagccgccgtctctctctctgacaatttggcagttgttattgggaagaaattggtaggaatggattgggggtgactggattcgaggagtttcgaaatgaggcctaattatcgtcggttatttggaagttctgcattccaggttttcaactagtgatcgatcttagtgtgtgaacactgttacagtaaaacaagnnnnnnnnnnnnnnnnnnnnnnnncatactgcccattgggggagtgtcacattggcaatttggcatggccaaatttggagtggttaggcgattaattcttggggcgtaacattatgaaaat

SEQ ID NO: 13594 - DNA, 992 bp, Oryza sativa
aacgacatggactgctcggattgtatccatattggtttccttagttctacttggataaggggacatctatgggtataaatacaaggccccctaggatgagaggggacacgaacaatagatcaagacataagatcgatatacaagccaacatacgccaagacaagccgccggacatcgacatcagagatatgcctagatcgaccctatctggtacctacagaggccagccgtagggatctagcgctgtctctgatctcgctgggtacgaactcgagaaggaagaataccctgttgtcgactacgagtcagaacttcagaccgccaagtcgacaacagttagataggctaccccaaatattgtactggtgtgattatggtgaataagaccaataccgggcttcggccaacaggatgtaggattattacctgacaattcaagggcccgaacctgtataaaaatctgcgtctccatctcttttactacaatctcgcatatatcctagtaccaacgatccccatactatgcaaacaccggaatcgcgacatcaaacatcgacaacttggtggcctacaagagttggtagaaatgacacataagatataatatgatatagtagtaaaaatatagctaatatagcagtggaattggtgatttaattaaaacaatctacagctgctaaagtgtatgcgtagatcgtctataaaaataattgtttatttacaacaccaaatcacttgtattgtaaattaaattcctagcgtttgcacgttcacactcagattactctctatgaaaaaaaccgatctaataatttatgataataaattatggtgtacatgtatcatgtaatttggaaaaaaaaaggagaattaggatctggatggcatcaatcgagctcaccgaggcagatcagtctccatgaaaatgatcacaaattatgatgcacatgtattttgtaattagtacgaagggtaccgagctggattgccaa

SEQ ID NO: 13595 - DNA, 1095 bp, Oryza sativa
acccatgaattcagaaccccagagtccgcacatcctcaaatacaaagcacttccctagttagatgtaggttagacttcccgttcgagaaactctaccttctacctgccctcaatttatgcacgattaatgaatgccacctgggtggaagcgagaggtggaaatggaaggtcttagttcggaggtgggatctctacctgatagttgcattgccattcatgatgatcccctggcattcgtccattcagccattcaccattcacccattcaactggaattttggttgaatgccggaattgtgtccacaaattgtggatggatagttggttggctggctggatggctggctggatggctggctggatggatggtgaatggctggcggcggttcggttgctttgaagcatttgttgctatctaaattccatttaaggtcgtaccttatcgcccagcatcatcttattctctatttgtattccctccatctttcagatacggatgtagccttggatgtgcccgtgcccaatgaagaggaagagcgcaacatgaaacgtaagtacaaaagtaccggacacccacccagatcccaatagaatccgccaaatcctgcgggaaattgtaatcccattcaccagctcctacatttaattaacaagagaactattgtatttatctaacacctggattatctccacctttcatttgatccctatttatagattacgctgcgttgctaacgggccgcacctcctatttcctcaagggtgaggaaatgaagtccatgtacaccacctacaatccgcagaatgtggtggccaccgcccgtttcctgttccacaagaagaatctatactactccttctacacctcatcgcgaatcggtcgtccgcgtgccattcaattcgttgatgatgcgggtgtaatcctggaggagcatcaactggagaccaccttggcgggcactctcagtgtctatcagaatgccacgggcaagatctgcggtgtctggcgacgagttccacgtgattacaagcgcatcctgcgcgacgatcgtctccatgttgtcctcctctggggcaacaaacagcaggccgagt

SEQ ID NO: 13596 - DNA, 644 bp, Oryza sativa
gaagatattgtgacagagacagctgttctcaatgtaagtcccatgacctacatgcttcaactgggttatgcacttatgtttcagtattgtctttttgttgaggtttgaaatacagatcaagagataattgtgatttggttgaccgtctggaggtgtagataacattcataatgaatactacttcctttgtgctcgaatgtccttccaatgcacggaattgtacttgacatcttgtgtttattctgtttctatgcagtcctttgatctggcaactatgaaggaaaatgaaatggattttacttcaagctttgagctgaggctcagtgaaagtggtgtatcacaatctggagtaacctggtgctatggcattatattatggtttgacactggctttacgaaccgattctgcaaggagaagccagtcaacctctccacctctcctttctccacaccgactcactggtctcaaactatcttcacctttgaagagcccatcgcaatggcaaaggaggaatcagccgttgtctcatctgcgtcagttggcacagatgagtgcccagctgtgatgatcagatcccgcatcagcatcctgagggcctctgagcaccgcaccatatacatatcgactgaaactacaggaatca

SEQ ID NO: 13597 - DNA, 2411 bp, Oryza sativa
caccaccaccaatcggagccaccggagagcggcggcgcagcagacggcggcggctgcggggggcgagaggccgattcgccggaggagagaaggagagagagagagagatggcgttcacgatgcgcgcggtgaaggtgccgccgaactcggcgtcgctggaggaggcgcggcaccgcgtgttcgacttcttcaggcaggcgtgccgcgccatcccctccatcatggagatctacaacctcgacgacgtcgtcaccccgtcccagctccgctccaccatcgccaaggagatccgcaagaaccagggcgtcactaaccccaaggtcccaacctcgcacccacccccatcgatttcatccgtcttcccgatttcgtcgatctgcgcctcgtgaatgagaattctctagtggcttaaccaactgctcgcctgctctctccgatctggtctcttctggtccttgggagttgatgatttatcggtgttaggtgctggatcggtaggttttgattaacctaggatttgatagcctcttgtttgcagcaggggatttagactaaccttctgcctcaaggacagtagtattccggcaggtttgatgctatgtgggcagtaaattgttttcaccgatggttggtcaatttctatatctagacatctggatatcatttagtgatctactttctgtgacatagcacatgattatctgaacttcattgctgcttccatgttatatttatactaccagtatcaacaatgcgattcacatttgtcgatggtggtagtagtagctagggatatcatctgtacaatgcgggctctcacagttaagacagtctaatgaggtttttggtctttgcacaatcttctgataggtatcttctggcattttagtttagactagagagagcggttttgtcggctggcctcctttgcttgtaaaaattgagaaaatttgtcagtttaattgagcaagagtgcttatgaatacgattcaatgcacataatattagatccataccacctctccatgtacatgtttctagatcccctgaagaaacattttcttttgttatgatttgcatctttgtaggctaactatgtttgctggcttcaatttgaattacactcatttgattaggcccttaggaagacttcacctgaagcatgcacttaaactaaaaaatgttaatgtcagtaaaagggatctatatttttatcttggataatccaaagctgcatcagcttgagttgcaaggatcagagattgcacgcgttgatttgatccaatatttgaagaaacctcaactttgtaacaaaacgcagcaaattcatgttttgtttttggataccttttgtcgtttgttagattagagttgttacgatcacatgaatactattgggaatgcttctgttccatacctcaggtttggtccagtccttgctcgtattgcccagttctccattgtatctgagtgcagtaaattcagatgaatgcttcttttgatcaaacgccaatttgaattcattgatcatcacaatctaaaatgataaatttctccctcataccccctgttttggtgattgtgttgcatttgggatccctgtattatgttgcccctctttatgttaagtacattttctaccagtgcagaattatcttgttgtttgtagcttctcatgacgcatcacgaatgacctgaaaatttggtcgttcacattttctttttgtctcacttaccttaatccttactgtatcaatgcctcatctaagctatttttgtttgcaaacaggtcattgatatgctcctgtttaaggggatggaggagctgggcaacatcaccgaacacgcgaagcagcgccatcacgtcatcgggcaatatgtggtcggccaaaagggactggtgcaggatatggagaaagaccaagggtcctcagacttcctgaagaaattctacactagcaattactcctaatctgtgctgcaaactcctcctccttcagtaatacccgagaagtgatctgaataagacgctgagaacccacagctttaattgttttatcactggaatctttttgttattctgcttgatccttcaatcatctgcgcagtgtggcgctgttgctagtgaattgtttgtaacttgtagactgtactctgcaaagttgatgttcatgagttcataccgtgtgtcaatgggttcgaactcatgtacccagcacatgaccatcactcgtttgtcgtgaagtcattgattcgattaatctgtagcataaaaggtcatggccatggaaacaaataataagtgttgccgttctctaatatactcttgagtagttgtgacttgtgaggtatattaagaattcagatggcatcagatgatcagtattcaggtgtccctgtctgcttagcaa

SEQ ID NO: 13598 - DNA, 615 bp, Oryza sativa
tgctagaatccatggctcctttgccgacgctgagtagattttaggtgacgggtggtgacaatgagtccgtgtcgagcgctgattttttcggcctttagagcgagatttatacaatagaatttggcatgagattggattgcttttagtcagcctcttatagcctaaagtctttgagtgactagatgacatatcatgtaagttgctgataggtttccagttttccgctcctaggtctgcatattgtacttttcctcttactcgacttaaccagtaccaacccagcttctcaacggatttataccatggcactttaaagccagcatcactgacaatgagcggtgtggtgttactcggtagaatgctcgcaaggtcggctagaaattggtcatgagctttctttgaacattgctctgaaagcgggaacgctttctcataaagagtaacagaacgaccgtgtagtgcgactgaagctcgcaataccataagcccgttttgctcacggatatcagaccagtcaacaagtacaatgggcatcgtattgcccgaacagataaagctagcatgccaacggtatacagcgagtcgctctttgtggaggtgacgattacctaacaa

SEQ ID NO: 13599 - DNA, 838 bp, Oryza sativa
cttctcaatacattattgaaactctccgccatattactagtcatgatgctatgacgacacccgttggtatcaaatgctcttgcccatttgaccttaagtggcatatggtcttctacccacttctttggcctctctccgaccacacccatgaggcgttttatctcatctaggaacaatgctttctcatttatttgacatatgcgctcaagatctttcatctgatcagtcgtagctccagctgtgtagaagttagcacagaagtgcctcatgcaccacctgtggtgaatggttaggtgatgaggcatgatgtggatgatggagttcaaaatgccagggtgtctatcagaaattatacacacttctctattaggaccgatcaacttgtttctcaacatgttgatgaaccactcccagttggatgtattctccttctctatcagagcaaacgccaagggaacaagatgtaacccggcgtcgacccctattgccgtgagcaatgtaccttggtatttaccggttaagaaagtgccatcaattgctagcaccggcctcaagtgcttgaatgcttctatggactggccaaatatccaatatgcacgtccaaatactcgcctctgtactccatccaccatcctggacttctcgggatgagcctcaacacggaaatgcatggtagggttctttgctttgatggcacgcatcagtgtaggcaagcaaacatacgcctcgtcccaatctccctaaataaccttcatagcaacttgcttagcacgccatgctttgccatacgtaggccgatagtgccatatttgctcaactgcctcgacaatcgctgctg

SEQ ID NO: 13600 - DNA, 1714 bp, Oryza sativa
taacatcaggcgctttccatgcaggattcggtctctccccaaaaacttttggttcccggtcaacatcgcatgtgtgctcccatatctacaataaacaaaataacctagttaaaaatcctggagaatgagacaggatgtagatgattaaacgagtgtcttagagttcacaaaagaagacaaattaacctaatgtaactaggaaaagcaccaaagtacctcaatatcaaacatctcaagtgatggtgcagcttcaaggaggtttgttgtccataacaattcaaattcagaaaagatgctatgtatagatagcttccttagattgctgaatgcacggaagagttgttttccttctggctttatccatagctaaaacaagaaacattcacgtcaaaaaaaaaaagaaacattcacgacaaaaatgaaaaaagaaacatgagaattgatgttatgcatggatgagcgtacatttgaattagttaaacaaaattaaggcatgcatcagctttagaaatgcatacatataatcattgaagtattgctacttaacattaaacatttgttcttgctcatgtgaaaatatactagtagtacatcacgaacaactatatgctaatgataacagcagtccatgaaaaaggatggacttaccttttctccttggaaatccaatgttagagtatgtatatttgtagtaccacttggaacctcacttaaaataaatccttcatgtttatttgttgcaccgcagataagagatacttcctgaagattcgggacaacatcgaatgacagcggggcataagggcaaagccaagtgtcccaatttagtcgctccaatttgggaaggcagagcacctcaagtttctccaagcagcatacatcaagttcaagaacaatgatgttcgaatttggtgcacttattttccatatcgcattcttccccacatcacaattggatagactcaggtatcgtagttgattgcagcattcaaacagatgatggtgcaagtcccaacgggcaaaacatagattgtaaagagagagccttgtgaggcgagtaagcacactaggatagccactgaaaaggtctttcacagatgaagcttgctgtagaatgtgcttatcggtgcaatctacaatctcctcctcgtccagaacagaaaggtccatatcttttaaaatgccaacctcaattgccttatcaagcataggaccgacaacacgtgagtaattattgatcaggtaaagctttagttgaaacctattgatgggaaattcgctccgagctatagtcaataagctcctgatccctttggttagagatgccattgcttcatccatatgttcaaccttgatgcggttcggttgtgggacaggtagaaaatccttgacatcaatggtgaactcagggagcaaccaaggcagatgtttccagcgtgttgacaccacacttgtccttacagccgagattatgtccactctccccaagatagacagtaaaatgtcatcagttagcattgagagccgatcctcatgatccatatcctacaacaaaacaaacatcagagcacacatttgtcaaaggagccaacagaatagacattataacataataagcaacaagagctagtacaacttttcttgattctaaggtatgtttaccaggattctttacattataatgaaatattgtgctctaattttttcccatatg

SEQ ID NO: 13601 - DNA, 9716 bp, Oryza sativa
tatatagttttgtgttaacagcctcttcttccaactcagtaatctcaagaacaatcaaattcaaatacaatctcagaaaaatagaagaggaattgagatggaagaagtagaggaagcttctagaagtggtagtgaagaggaacacgagagagagtaagagagggatagagatcgacggggttcaaccgaaccaagccgccgccgccgccgtggccgaagccgccgatgtctcatctgttcgatgcctcgagcagggctgctgctgccttttgtatcctttcttcagtctccatgggctgggcttgtagtatggctaacatagcccatgtacaacccaattgagttcctaacaatcccctcttcttagaattcggcttgtcctcaagccgatgcaaaatattgcagatgtatgtgaaccatctagaattccaatagtcatcttcctgaagaacaaactgatgggtgctaagattgttgcttcgatataactcctttggagcaaaattgcatgcttttgattgatcgttttttgcccagcactcttttggcatccacctttgattggtttggctcttttcatagcactggtccttcctagtcatgccaagcaacttagtatcccatatagccatactgttatatgtaagatatttttttgaaattgcacataagtgtagtccagccttgaaactagatcctctgctcccatggacaacgacaataacactaagtagaaatttccatgtcctgtgtatgagcaggcactgcaattgcttgtgtgtcataagattcagcagcccaattgacttacaaatattcagtgcatgtgcatcaagtacttgagtagaagctgaatatttcagaacatgtgtgttcatctcaagtatagaagtgtcaaaactgctgatcatatttacctcttgcaataagttcttcaccataattttaatttggaaagtcctctcattccttatcagttcaagcaatttcctcatggacccacatcttgctccagcctctgaaacatgtagtatatgtgaaccattcccgatgccaagctcatgcctgacaaatgctcttgctggcctgacaactgtatgcctgtcttggtcactgtacacagtaccagcccacccaaacttaaccatctcatggcaaactagaatggccaaagcttcaagacatgtaaggccaacaatatgccccagatgatagcagtgcactagagaccaactattcaacagaattatgtcaattgaggtcctgttgtctcttggattccaaggtttgcataagatttgttcttgcccattaatatgctcctgcaggctagatactgcaaccattgtgcaactttcctgattcaacaaattccactgctccatcctagcacatagactcattcccactctagttttccagcacttgcattgcgcagcctgaacaaaagtatttctacaatttgtttgatttggtggaggccatggcttcaactcaccacggtgcaaattaatatccttcagctcagtgagaatcattacattaccttgacataccaatgcaagacaacttacttcggtaggtggcagccaaggtggcaaatgatgtacccttgaccaattgagtttgaattctggaccagccataggctgcaaatcccatccattaatcactccatcacaggttggaggtggccatggtggcatcaaacctacacttgtccaaaaggaatcgagtacataccatgggatgtgccacacctcccctcctctaaccacaccacctgaccagggaggtggccaaggatctctcttgggatgccccaccagcaacttcttgatagctttgaggcatttcatcaaacactcagtgggcatcagcttggcaaggtccatttcagcgatcaaccatggcgacaagacttcggatgatgcatcaggtaatacaacaccctcaggcacacccatcatgatctggcatgtgaccctggcgtggtctgcaccacccttgacatcaaggccaactgtcgaacagttggcgggcatcgccttggtactatcaggggtgtcaatgttggtgctgccagtggtgccgtcaatagctaccaactccattgatgacacgacaagggtggcgcaagtaaccacagtagccacagtgtgatcaggcttggtgtcggagctggaacatatcgtcgaacacttggtgggcgtgaccttgggaaggtccttggcggcaatgtaggggacaggatccttgtcctcgacgtccccaagctcgaaggcaaccatcggggcaggtacctcgcggatgtgacttgaattcactgccacccaagtgaagttgtggttgtggcattccatcaaacagttggtgggcgctaaagaaggtgggtgccataggtgtcaaatatgatgcagcgttgaaaatggcggtggttcccttagtgtcagcaatcgtctcctgggaagccttgctctgacgagcctctatgtcgtccaacttttgaaaattttgattaagcttgtcctctggccggcgctggcctgccatttgttcaaacttctccaatatccgatccaaagcttcatctaaccatttctcctctttattcatggtggtattgatgagaacgggctgtgatatcctctgatcttccttggacatcccaggttggcttggcattccatcgagcagttggtgggcgatgcttggatgaaaaccttcccaactcaattcttgctccatcttgcatggctgcctccccaacacctccatgacaaaaatcccagtgaaccgaacggctctgataccagattgttaacagcctcttcttccaactcagtaatctcaagaacaatcaaattcaaatacaatctcagaaaaatagaagaggaattgagatggaagaagtagaggaagcttctagaagtggtagtgaagaggaacacgagagagagtaagagagggatagagatcgacggggttcaaccgaaccaagccgccgccgccgccgtggccgaagccgccgatgtctcatatgttcgatgcctcgagcagggctgctgctgccttttgtatcctttcttcagtctccatgggctgggcttgtagtatggctaacatagcccatgtacaacccaattgagttcctaacattttgttacagtcaccaaccactggaaactaagctaatacagtcaccaacgacaggcagcaccaaccaagaagttcagggaatttcaccaaaataaaaggcgaaatcctaaatagaggcttgctgcttgggttcctaatcatgttctagttgagatcacgcgggagttgttactgtaacaaaatcggtgagcagataatactggtgcctagtggcgaatcgggtcagaacaaactcacattgttgtggctgttatcgagctccatggataatccagccttggtctgattcgcctccccgtgtgatggagtcgatgcggagcaggaggggatgggcgcagaaagagaaagcatcctcgagcgctcggcgacggcgagaccctgagggcgccttgaggctgataagagcggcggcgggtggtcggcaggcgccggtgttgaggagagcggcgccggcggccgccgcggcgagctctcgccggcaatggaggagaatccgaaaaggaaattggattagtgaccttacgttagatattaattacggatctgccactcggttttccggtgggccatagagaggcaagcttatatgggctgggctggctgtggatatatcacaacttcatgaaaagaaaaaagtctgatttgacttcctcaaccattggccgccgaatcttattcgtatccatggactgcaaattaggaataattaggctgtgtttgagggaggggggattgagaagattgggaagatacgtaaaacgaggtgaaccattatcgtatgattaattgagtattaactattttaaatttcaaaaatggactaatatgattttttaaagcaattttcatatagaatttttttttgtaaaatacacaccgtttagtagtttgggaagcgtgcgcacggaaaacgagtcacaatctcccccaatctcttttgaaagaacgcagccttagtattagtagcttctttggacttagctattggtttgtcggaaaagacatttaaaattgtgaagtgtaaatgatctacgaaatagtggtttaggttatcctgatttggcatactagaaaagcaaaactgcaactgctacgatgctgaaataatgattaagattgcaataattcattaaacaaacaatccgtgccgagaaggatgaactcatgcatactgagatgttcatcaaccaatcgcccaaattatgtcttcagcaagtacagcgtcacttgctctctgtccaaattatcatacaaactcatcaatcacgtcagggatccgcgatctacatttggtaaccgcggcttgtgattgattatctggcatcttcggcaccatctctgaattttctgtgtctatggaggttcagacatgacagtggccgtgtttagttggatcaaagtttggattttggttgaaatcagagatgatgtgactgaaaagttgtatgtgtataataggttgatgtgatgaaaaagaactgaaatttggatccaaactttggatctaaacacagccggtgtcactcactcagggtgtgtttagttcgcaaaaatttttaggtgtcatatcgaacgtttaactggatatttgaaggagtttacggaaacaaatgaaaaaactaatttcataactcgtctggaaacgtgtgacgaatttattaagcctaattaatccgccattagcacatgtgggttactgtagcacttatagctaatcatagactaattaggctcaaaagattcgtctcgctatttccatacaaactgtgcaactagtttttttaatctatatttaatgctctatgcatgtgtccatagattcgatatgacgttcttaagaaaaaaaaattgggaactaacaaggcctcactgtggtcacaccaaatccaattcaatgaccgagcaaagtcagaatcactcgccctccaattcaacatctcaaagattgcaaccctgcaatctccggtggtcgccggagctagcgacgccgtcggtggtggtggtggggctccggcgagcagaacgcactaaagaagctacacaactagctccacttttagtagttgtgtgctcagctcactttgatcacttcgtcactgcgcccctttttctctgacggcattgtagcttcttcacatgcattgcactcctctttctcatcctaataatcctagggccttgtctccttcctcctgtccatgcatgcaaatcatgttctgttctgttcgccattgacgatcgatttatcgagagggccaccaagcttctttatcttttttccaagctcgtgcctttcaacgaaagttcagagaacacgatcagtggagcgaaaacaactctcccactctgaccaatcatcggaaaagttcatttttttgatacattaaaaaaaaactagcttaatgatggctttatgatcttatgaaagttactctgaaacctgaaagggggtttgattcctatgtatctatgattgccactgattagctttcgattctttgcttttgtggctgtgtctgaaaagtgttgcaaagatatatcttccaaagctagtagcttcagaaaacacatgacaacgaaggttttttgtttaaaaaaaagttgcaaattgcgatgagccaaactaactttctaagagaaattaaatgaagagccaaaattgagctgaaactaatgaggattccgtagtgaactgtacaccattagtccattacacctaccgctcattcaaagttgcagagacaagaaacacggcaagagagcttttcgattgcttgcatcagaaaccggaggtaggtgtggtcaaccccatattgacaggaagattgttgctccctccgtcccataatttaagggattttaagtttttcttatactgtatgaacactcgtcttattcaaaaaaattagaaatattatttattttttgacttactttattatcaaaagtactttaagcacaacctttcgtttttttatatttgtataaattttttgaataaaacgagtggtcaaacagtgcaagcaaaaacttaaaatcccttatattatgggacggagtgataagtagaaagtaaagtgaccattagttcggtaaaaaaaatgaaactattaatgatttaaagttcagtaaaaaaatgaaccattaatgaattgacagtagagtacgagtagaaaaggtaagggcatccaatcatccacgtgcttgtgcagttagtgcgttgatccataatatcaaagactacagtagtacctgaactgtcccaaatatcataccagtagaagatctgctctcttttttttctttgtaaagatttcttgtatcggtccatgctattctagatgtagattttggtacatgcttgagctgctcgtgattaatgctgaaaaatgtttgttgtaacaatgtacaagttacttaaacctatattggccttagttttgaaatcacaattaaatacggaaatgtctaggataaccgggttttggtgtatatatgcagagcatgaattcattttacaatcaaagtatattgccaataaaatcctatttattttactataaccaaaattattacttcgttcgattccaaataaattgttggttttgactttgagttgtcgaccaatagtatttgaataatctaaatatctagcatcaaaattgtataattagacggggttgtttagattgcaaccaaaataaaccttactaaattttagcaatgccaaaattttggtaatattgccaaaattttggtaggatttcttatatatttatcaaagtttgacaagaaactaaatggatacacatatttgataactttactctaaaaaaaatggtatggtttgaaatgacatcaatctaaacaagcacgtaatctaaagtactttagtaatatcttatatacaaatctatttactcttaaattgcttaaaacataaaagttaaattgcatctatttgggtcaaagccaataattatcacaatccttcaacatcaacaaggctagtacttaatcaattatatctcatatgaactatataatgatattgaatcatgtaagaaacctatcgattctccaccatcgtcaacgtcaggtcccaactgcctctcaacacaactgcagaaatgacaggttcgttcactggcacacaactgcagaagtgagctggagtacacatttctgctgtgacctggtctctatgcgatgctgaaaggaagcaaagaggcaatgcaatgcatctgcatgcattgggattggacttgggagtagtcggagatgagccactgagacagccaggttgcctccgttcgaacgttccgttaagactgcttcttgcctttccaaaatcagctgtaacactttgcaactgtagtgccattatgcttaatgctttccagcatattgtgtctttgttctctttgctcttttttttttaatcttctgaaatgtgtttcatgcggtgtgttatacggctttttttagtgatggataaaccccggccgctgtgtcagaatgtggtcttgttcctaggttcagagcattccactgcacaattatggataagggctcctttgggtgtgtttagttcacaccaaaattagaagtttggttgaaattggaacgatgtgacggaaaagttgaaagtgtgtgtgtagaaaagttttgatgtgataaaaaagttggaagtttgaagaaaaattttgaaactaaaaatttatttataggagtggcaaagaattttgttaggatttaaatttatatggtttttttccctaaatgtttctttggttcatagaaaatgaacgaaactttatatacgattgtattcctatgcttaacatttcataggaaaattatcgagatgtgtgatttttttaataaatttttctttgtttcttccatggtaccaacaaagggctcttatatatcattccctatgttctggattctggtaggattcgagaaccatacgacttcgattttcgtgttgttcaaatcctgcgaatcaaggggcctaaatgatggctgtgaactttgctttgttattgttcctaaaatattatagtgcgatgatgcaatacaagccgtttttttgacaaattgacccttttcaaaaacttatttcgaaactaacccctgccaaaaacttcaaccaaaaataggccgtcgcctcagcgccaaacacattggcgctgacgttggccgtgttagcgccaacgggactggcgctgacattgtgccaccgtggcggccggggccgatccccagctgacgtggcagctacctcagcgccaaccggactggcgctgaggtgggacttggccgccaaggcccagaccagcaagccttctggatggcttgcaggctgggacctcagcgccagccaaaatggcgctgaccttgggaaactcagcgcaagccaacctggcgctgaggtgggacttggccgtttcggccttggcccagaccagcaagccttctggatggcttgcgggctgggacctcagcgtcagcaaaaatggcgctgaccttgggaaactcagcgccagtcaacctggcgctgaggtgggacttggccgtttcggccttggcccagaccagcaagccttctggatggcttgcgggctaggacctcagcgccagccataatggcgctgactgtgggaaactcagcgccagtcaacctggcgctgaggtgggacttggccgtttcggccttggcccagcccagcaagccttctggatggcttgcgggctaggacctcagcgccagccataatggcgctgactgtgggaaactcagcgccagtcaacctggcgctgaggtggtacttggccgtttcggccgtggcccagcccagcaagccttctggatggcttgcgggctaggacctcagcgccagccataatggcgctgactgtgggaaactcagcgccagtcaacctcagagtcagggaacagaatactgccgaagatgtacagcacgtacgccctacagtatcgctgtactgtagcctcatctgcctcagcgggacactgaccgaagttggctcgcaaccaactcaaaggaacccctgatgtcttcgtctgcctctgaccatcaggtgccactggaggctccagaccaaggtactcctcgaccctctccctccagttccccgacgctgtgtcacctgtaaccggaaattaaatggaatcattagtaattgcaaaaaaattaacaaatgaatacgaagactcgttagtaattccctgacgctgtgtcacctgtgaccgcctgaccccggataggaagacccaggatcatggcgacgtcctccagagtgaccgtcagctccccgcacggtaggtggaaggtgtgtgtctctggacgccaccggtccactagggccgtcagagcagcggcgttgtacagaggcaccggtcgctgcgccatggtcacgaacgccaagagcttcgcccgccgtaggtacgggatgtaccggtcgtcgaacagtatgtgggccgtgtgacctcttactcgaagggtcttcaagcgctgcatcaatag

SEQ ID NO: 13602 - DNA, 590 bp, Oryza sativa
actatagggcgaattcgagctcggtaccctccttttctaatttattttgttttgctttaaaaattcaaattctagattgcgcttgcagcatctagcatgttctcattgatgatttgcattttacaggtcgttcagcagcaaaggatgccaaaagatcttctgcaaagcagtttaaggcccatcttagttaacttagcacatacaaggagtcttaccatgccgttgctccagggattggctcgtctgcttgaattactatcaaactggtttaatgtcactttaggtgctaagttattggatcacttgaaaaaatggctggagccagaaaagcttgcccagagtcaaaaatcttggaaagctggagatgagccaaaaatagctgcaggtctgtcataattttattgcattttcctctctaactatcaatattttgtttgaaagaggacacatcacacgagatttagaaaccagatcttcattcttttcatatattattgtactaatttgatacacagaacttaaacctttttttcgcaaatgtgtaccaaatgatgcttgtgctctcggtatcttccaattttactgtagaa

SEQ ID NO: 13603 - DNA, 3792 bp, Oryza sativa
aagaaggaggggggagagagagagaggacagagagggcgaatggtagggggggactcgggatcgcggtattatgagggggggcgcgtttcggtcaggtcggtttgggtttggggttgcgttgcatcgggttcgcccgggtcaaccgcggtggatcgggtggagggagttgggccgtgtacctacacgcggcggcggcccaattttgtactggagatgggccaccggcatttggtgagtccagctacgtctctagatcggcctgtgggtgtactgggacggaaactatctttgttgggttagatgggcttcaatagtcactaggaataagtctattttttgtctatcctatcttgctgagtactgggaccgaaactatctttcttgggttagatgggcttcaatagtcactaggagtaagtctactttgcgttcatcatctcttgctcctgattgaattgtctccctctatcgtaaaactagatataacgctttccacgtcttgggaaaccggtgcaaatcgatttctatggtggtttttggaaacggtttctaccgacatcacaaattgaccacaattgactcattgagtgagttagcaggggttagtttttccttccttccaattttacgtcggcctataagtacgggaccgaaacaaatattgtcaatgggcttcaatagccgctatgaaggcacattgaggtgaacactaaagcccgttcctccgtcagggcaatttaccactccttccgtttaatactttaagacgtaactttttccttgcaagtctagctagttttagagaaatatagcaacttttataacatcaaaatagtttttcgctacatcaaaaattaaatatattttatactttatttgtctggtgttgaaaatatcactactatgttttctataattcggtcatacttaacattgattaagaacaaagttaaagtcttataatatataacggatggagtaattatcatcgcaaaaaatcacgtcaattagacctagactttaacatagtaccattttttacaggcaacggtgttttgtatttttttttattgcgatacttttaaattttctctactcctaataattatatgtctggttactcacccaccttacaatgctcgtattatttgcttcttagcagtgtaaactaatgttgcttcttatgagtttcaccgtctttaccactacaccagtccttcgtcctaatagtcatctccaccacgttggtattgtttacaccaatattatcccctacaaccattaccccacacccctagaagcaatctcaaccttaccgaccccatttcgcctacctttccctaggagatccattactggcttcttacatattcatcacgctgtcattaatcgcttgcctaaactagcggaataatcggttcccaatctcctattgatatctttgaccttataagttatttgccatcaccattaataacttggaggtaaaggataccttacaatagttagttgttttcaaattgagatttgcttagacattccctaaacatataggctgcgttcgatactccaacaagaattggatgaaattttgaatactcgtaacatgtttttcaaactgctaaacggtgtattttcgtgtgaaaactttacatatgaaagttgctctaaaatatcggattaatcaaattttcaagtttgtaataattaaaactcaattaatcacatgttattaccacctcattttacgtgaagcacttaatctttatctttatcttaatcttcatcttcatcttcaggagattcaaacagccattcccgtcgcatatgagattaagatcataggtttgcctcaagttacaaccgataaatctaacgcctctttgggggaaaaaactgcatatggtacatgaaaagatatatgttcttttatttattttgctcactccttcgctttccgaaatgccttcgtcagtaaaaaggggaaacaatgccttgagcgcccggcgtgcaacggtgtttgtgaacttcactctacggcttcaaatccggcgttttccacacaacaccctgtgtgatctgacggcatccaacgttttccattcggctggatgaaaacgaactggtcagttcatcctgacagatacatttgcaccaatcgatgcctgggtcactcaagtctctcttcagattaagtaccttcgaagattgccaactcggttgcttctcatatatcctttcgatgttgttcacacgtattccttgcccatgtcaccaaaatctcaaaacaattcgaattagtgtacataataactgcagtttatctaacaaaaaatgcaactagatttcataactgtacatgtacttcgctatcaacaaacagtgcacgcttcggttcttgtctgttggaatagagaaatcagaactgcagaaagccaatcggtttgcactaacctgggctacatgattttccaagtcagcacttagtatatactgttaatataaccgggtcaagatggcacgaggcggctgcattgatcagcaatacagtgaccgttgagatgattgttttttttaataaaaaaaacagatatagttattaagatgataatttcatccttacaagaaactgtctaaccaatcgggatttcgtgagctgagaagttgctgcactgatttaaacaaattgagtctacatcttcgagtcatgaacaagcaaacagcatagaccaaaaaactcacaggaaactataacccatatggatcactatcaaaatctccctgctaataaatttcatgcttatcatagggataatgtgccttcgtgttaagtagccaggcacgtacatgtgtgtcgatctccttaattaattgccacatttcaatcgaaacaagctactattctcttcaagcaactaacctccaaattcatcatggatttctttacacccaagtggcctataaaatcacgagaattcgatcagcttagaaccatttaaaaggaggaggtagccaatggaagaaggcatcaaggaggagacgaaggcagcagcagcagcgagctcaggtcagacgacggcggcggcggcgacgagcaagagcaacagcaccaccgtgggcgacatggcggacacgacgttcaagagcatcggcgacgtgctgaagctgctgccgacggcgacggtgatcgtgtacgaggtgctgaccccgatcgtcaccaacaccggcgactgccacgtggcgaacaaggtcgtcacgccggtgatcctggtgctctgcgccttcttctgcgcgttctcgcagttcacggacagctacgtcggcgccgacggcaaggtgaggtacgggctggtgacggcgagggggctgctgccgttcagcggcggcggcggcgccgacggcggggacgccgccggcagggacttctccaagtacaggctgcggttcggcgacttcgtccacgccttcttctccgtggcggtgttcgccgcggtggcgctgctcgccgacgccaacacggtgtcgtgcttctacccgtcgctcaaggaccagcagaagaaggtggtcatggcgctccccgtcgtcgtcggcgcgctcgccagcgtcgtcttcgtcgtgttcccgtccacccgccacgggatcggctacccgccggcgaagcccgccacggcgtcgctggcgtcgctgtaggcggcgagcccgattagtcgatttgcattgccatgcaggcatgtgcttcctttttatgggttgtgtttttttaaatatttgcacgtgtgcatatgtgttct

SEQ ID NO: 13604 - DNA, 2105 bp, Oryza sativa
ccttgctcgccgttcgcgccaggctcgcctgcgccttcaggatgcccttgggtcgccgcccgccgccggcggcgggggtggtgacacgccgcgcggtctcggtagctgtctctgcggacgacgccgccgccacggccggcgccatggagaacatcgcggcgttgaacgtcgccacgcggatggtcaccgcctcccccgtcgcgccatcgccgcgattatcccgacgcgctcccgctgccgccgccgccgcctccttcctcccgttcgaccccaaccgccgcacggtcaccctcgccttgccctccgcgccgccgtggcggcgccggcgcggccgcgggtgcagcgcccggaacccggcgagcacgcgtcgcagcatgagcgtcgtcgcttgcgtgtgcgtgtgcgtgtgcgtgcgcggggggcgcccagtgcggggctccgcggcgagggggatagcgtaataatataccgctgcgtgagcgagagagtgtcgccgtcgcgcgcgcgcgcccgcgtcgtgacacgcgtggcgacgacggcgacgcgacggatcgcgtccactctactttgcttgggcgctggatatgacaagcagagttagtgacacggcgaaattttggttgtttattttgggtatattcgtatgcgtgtacgcagcaattgtaaactacctaggagtacgtggctatacgtatgtctgcatctgtcacaagtgagatttgttgcttcctgtacctatgcgtacaccgacctctacctcacggtatcttggcatcttgtcttctccatgtccaaactgccgttgtattgccgtttttttgacaaattgacccttttcaaaaacttatttcgaaactaacccctaccaaaaacttcaaccaaaactaggccgtcggctcagcgccaagcgcattggcgctgaggttggccgtgtcagcgccaacgggactggcgctgacattgtgccaccgtggcggccgggccgatcccctagctgacgtggcagctacctcagcgccaaccgcttcggcgctgaggtgcacaacctcagcgccaagtaagttggcgctgaccttggctacttagagcccggccgaggccgccccagccagttcttcctccgttttttccccagccgcccgcctagggttcggtcgccaccgcgttctcctcgcccaatctcccccaaaaacctctctaatcgaaggtgatttgtgcggcattgagtttgggatcggaagagaaggtaaacccctctataaaccctaagttccccaaagttttattggatattttgcattgttttggttgtagacgtggtttgataatagttggctaaggatggattattagatggataatatgggtggggatgaagtgtggaggtggcatatctttatccatttggttgttattgatacatttgacaaaatatatttgggatggatgtttggtgatgcactagggtttgatgggagatggatgtgtggtgatggcctaggatgtgggatggatttgtggtgattgagagggtttgaaaggggttgatgtgtggtgaagggtaggtaatttgtaggagtagagttttttttatcaataatgtgtagtatttgagtaatgtacttatttattggaaaaattagacatgttgttagcttttgaagtattggtattgcaatggtaattacatattattttcaagtaattaatgtttatgcatgggttaaaaattgtagatggatagattggtccggcttcattatggtggttgtgtggtagatgaaagtacacatggaagccaatttgagggaatgacagttagacaattagtgttttttgcgaagcctacctttgaggagttaatgtctcgcatcaagcatgaattggattggaatgatgagtcggttggtatgcaagggagatacgatgtgggcggcgtgtcatgtcacataaatttatgttagacttgaatggagagatcgaatggcaaacatatatagatatagtattggagtcacatttcaaatctcttgaggtgtttgcatggaagaaagatggtaggatagggaagaaagaagttatagaccttaatgaaagtccactca

SEQ ID NO: 13605 - DNA, 6731 bp, Oryza sativa
atatgtattttacaaatttacactgttttcagttaaacagaaaagtctttaaagtgttttctttatatttcccagattttatgtacatggggtccacaggtcataggcttggggaggagaatagcagcagcagaagcagagctcaccggccggcgggcttgacggcaatgccgatggcgaacgacgactcttcggctgacatatacaaaagagaaaatgtggaagacattcttgcgaactcgtcggtggtggtgtcttggccggaggtggccagaatcgaagccgacggcagcgcgagcagcagcggctttgaggctgcatgtggaagacaagtcacgggcttggttcggttgatttgatgcgtgcatgagctttctttggtcactagggagactcaccgcaggattgtgttaggactcagtttctcaagaacaatggaggatggattgatggaattagggattcggaaacacggaatgtttagagtctctcgatcctacaggaccgaaccgccgccgccaacgccgccgccgagttttccgttcatgcctcctcctctgttcttcttagtatttaacaacacgcaactccagctggcacagcacagcttacgcacgctactcacgcttacaaggcctcacttggcccacatcggtccagcaattctagtattggccttcttgttgcgcagcccacgacccagctttggctttgtcctgtcgccgtcctgtagctcgtccgggacgcttgctgtttcatcgtcaggttgctcctcctctgcttcagcccgacttgcagacctgacaatcccccactcttggtggctggcttgcccccaagccagcgcgccaggaaagcgagcacgcagttcctccatgtcctcccaggtagcttcctctgcaggtgaatctgaccaatgagtaagtaactgaacgacagttttgttaccttttttagtgagacgcttgtccaagaactggagtggaatttgtagttcccctaaagagcttggtaattgagacataaccggtttagagaacccggcagccgctcgcaattgtgacacatggaagaccggatgaatagcactataagagggcaactgcaaacgataagctacagcccccactctgtccagaacttgaaatgggccgaaatatcgaaattctagcttatgattagctctcttagtcacagaagtttgaatgtatggctgtaacttgagataaacccaatctcccacattgaattccttgaaactcctcttcttgtcagcttgagacttcatttgctgctgagctcggttaaggtgttgctgcaagagttgctgcatgaactgtcgctcttgcaaccaaatttttagatcagcaatttgacaatcatcagagctaatgccaaaatgtgctggagtgtagccatataagacctcaaagagagttttacccagagttgagtgatatgaactattgtaccaaaattcagcaagatataaccaggtggcccatttagtaggagtagcatggacaaagcatctcaaatagatctccaaacactgattgacacgctcagtctggccatcagtttggggatggtaagcagagctcatgtgcaatttcgtacctgatctagagaatagttgatcccaaaactggttagtgaatattttatcccgatcagagataataaccttgggtaacccatgcagcttgtagatgtgtttcatgaactcagtagcaactccattagcagtaaaaggatgagttaaagggatgaagtgactgtacttggaaaacttatcaacgaccactaaaatgcagttatagtgcccagatcttggcaggccctcaataaaatccagggacagagtttgccatgcaccttcaggaactggcaatggttgcaagagaccgggatacttggatctatcgggcttagcctgcaagcaaatctggcaatgttgtaacttgttcttaatcatctttttcattcctgcccaagcaaacatagttttggctcgtcggtatgtaacaggaaatccagagtgaccaccaatgggagaagcatgaagttcattaattaatttatcctggagcactggattgttgccaacctagattcttcccttgaatttaagaattcccttgcataactgaaaatcaggcctgctattaggattaacagctaattcagcaatgacttgggtggaaaaagcatcctattcatatcctgagagaatatcttgcacccacaatggaatacattcagatattgctgctaactcggctgaatcaggtagttccttgcgagatagagcatcagcagctgcatttgataatccctttcgataacaaattctatattgaaggcccaacagcttagtgaaagctttttgttgccaaggggtatgcaaccattgttcagacaaatgcattaggctgtggtggtttgtcagaataacaaattccccttgttggatgtatggcctccaattttccatagctagcagaatggctaagtattccttttcataagtggagagtcccttggtttttggacccaaagctttgctaagaaaagcaatgggatgcttgtcttgagatagaactgccccaattccctgatcactagcatctgtctcaatagtaaaaggtttggagaagtcaggaagtgccagcactggggcagcaaccaaagcatgtttaagttgttggaaggctgacttagtttctgcagtccacttgaatggaactccttttctcaaaagcatagtgaggggtttgctgataacaccaaaatttttaacgaacctcctgtaataaccagctaagcctaggaatcccctcaatttttttaaggtagttggttgaggccaattcagcacatcctgaattttggaagggtcagtagaaactcccagtaccccaatgatatgacccaagtaagatagttcttgttgtgcaaaagagcacttgctcaatttaacttgccatttattgtcagccaacaattgcaatacaatctttaggtgttgcagatgagattctttatcaggactgtagatcagaatgtcatcaaaaaagaccaaaacaaacttcctcaacacaggagacatggtatcattcattgcccccagaaaagttgcaggagctccggtgagaccaaaggacatcactttgaattcatagtggccagagtgtgtctgaaaagctgttttgtgttcatccccttcagccattcttatctagtgatagctagctctgaggtcaagtttggaaaaccatcgggatccagccaactcatctaacagctcctcaataactggaataggatatttacttttaacagtgatagaatttagctgcctgtaatcaatgcacaatcgccatgttccatccttctttttaactagaagagttggggaagagaaggagctttggctgggttgtatgacccctgacctgagcatttcagaaacctgacgttcaatttcatccttcagtgcaggtttatacctatagggtcgaagattaacaggttttgcaccttccactaatggtatatggtggtcacacatcctcttgggaggtaatccagtgggttctgagaacacatgagcaaattcctgtaacaagggttgcaccatgtctggaacttctttttaattatgtagttcaacagcctgaagctgaaccaagcacataacaaaacccttcttagtcataccctgcagctgttccccagaaatggtagcacactgagatgtctgtggagtaataccttgcaacttgaccactttacccagatgagaaaactccaaccacttgtgattccattcaatttgcatggggctgaactgctgcagccagtccattcccaatatagcatcatagctgcccaggggaagtaatctgaagtcactagaaaaattatgaccctgaatccaccaatcacactttggaatcacctgagaacatgatagctgccctccatcagcaatttgaaccttcaatggttggggcaggtgttttaagccaataaaggtagagccaattctttcatccacaaaagaatgagtgctgcctgagtctactaacatgagcaactcagttccttgtacccatccccttagtctaattgaagtagaagaatcaatcccatttaaggactgataagaaatagacattaatgcatcatctgcagtttctggtatgtcaccagaaaacttttcttcttcagtattgaactgtaatgcattgagtaattcctccaccacatgaagctgaatagatgctgcacatttgtgatccttgccccacctttccccactcttaaaacacagtcccttagaccttctataagacttaagagctaataacttgtcttctctagttcttacagatttagctcccaccttgtcttcactggttgttcttgttgggaggactggagtaggggtgggtctgcttttcacatatactccagaatcttgtctcctaactccagattgaactaccccttctagagcctcttcctgcaaaagagctaaagaacaagctgtgtccaagtcttgtggcctcagcatcataacagcaagcctgatattgtccttcagaccatccacaaatttagtgacaaaataaatgggttcattggctccacgataggccagcaactgatgcataatgctatcaaacctctcaacataatcacttattgtggagctctgaaaatacgaatccactgacgtatgagtgtctgttgcctatctctagaaaatcttgcacagactctttcacacaattcaaaccaagtggcccctgccaactgagatctaactgattgtaaccaaaaagctgcattcccacagaaattcagtgtagccactttaacccaattccgggggtgaataccatacacatcaaaatagatttcacaatttgctttccacatctgtgggttgtctccattgaactgtggaaatgtcatcgggggaatactatacactagagcagaggactggccatggctactagactggaacgcagaatcatcatgcgggaaaggaataggagagatcagggttgaatcgcgcataccatggtggagaggggttgattggaagttgcgcgaatcctgaggttcctccttgtgggcttcaggatacacagctgtggtcaccttccccgcgaattcatcatccttgcgttgcaacgcaatactgccctccaactgttcgaccttggcgctcagagtcttgcacacggtgttgagggtctccaccttcttttccaccgctggtaggcgcacatccagcgacagcttgagctcggcgaagtccgcacgcgtgcgagcctccgcttcctcccgcttcttctcgttctccgccatcgtcttcaggagtaaatccagtttcccatcttgcgccatgacttcctccacaccttggtacccccttactttgcttccgaatccagtcaacctgaggaaggcaagttgccttttcgtgggatcagttccgaagaacagccccaatccttcccctggattttgcgaccgactcaaggaagcagagcaagtttggctctgataccaaactgttaggactcagtttctcaagaacaatggaggaggatggattgatggaattaggggttcggaaacacagaatgtttagagtctctcgatcctacaggaccgaaccgccgccgccaacgctgccgccgtgttttccgttcatgcctcctcctctgttcttcttagtatttaacaacacgcaactccagctggcacagcacagcttacgcacgcaactcacgcttacaaggcctcacttggcccacaccggtccagcaattctagtattggccttcttgttgcgcagcccacgacccagctttggctttgtcctgtcgccgtcctatagctcgtccgggacgcttgctgtttcatcgtcaggttgctcctcctctgcttcatcccggcttgcagacctgatagattggttggagttggcgtcatccaaacagctgcggcgatggaggagatggcttggcggcagaggaaaaagcagggtgacagcggcggctcgctccagtctatcaactctgagatgaaatcatacttgaggctactgaggtcctagagatgattcctgcacggggaatcagatggtggcactggaaaaagagaaatttggcgatggtgcttggtagccggagttgaggaagaagacgccaatctcccttctctctgtggcattggctggggttcttgagggctttcgaagagaaggtcgaggcgacgcggatggcgcggtggctcggcttgaggcgcaccggatcatcgggaacggcgaagcgacgagcggcggcactctggacaccgagagcggcgatgagcgcaacacagttgtgttcgacccatgcaaattaagaaccaaggaaatgaaagagttaggcatggcgcgcagatcacgttcccatgaatagaatgtcccgaagctctctggagaagattttccacgtacggatcaaacaccttcagctgagaaggagtgagcgtacttggctagacagagaagttcttggtctatctcttagtggaacatgatgagagatgagagaagaatagagtggtggagtggctgctcacatggtgaagagtgtgctggcaggggcatgctaggtgtccttctatggcatagacacgattttggagagagggcaaggttt

SEQ ID NO: 13606 - DNA, 990 bp, Oryza sativa
gtggtaaaagtcttgaacacgtcacgatgtgaaaagatttcacaaataattgcgtagccatgaaatgctcggcacttccttctgctgccccacactccactaccaagtccatcacttccttaatagagttgtacctaaattcaccttgcatcaccttgttggcaatactacaattggtgtccaaagtggactgaatattcttcatcaccttaaccatggggttcttaaccttcttcagtggactattttcagtggtaatacaccctcgtttcactgatttgttattcgttgtgtatctatgcaatgagatgtccactggtgtgtcatcaaggctttgtacaccagcccctccaacatcctctccaggtgcacaagcagaagaaccatcaacagcaacctcagcaaacatttgactcaataaatcttcacaatccgggggaccatgttgtagcttcttccattcagaatgaccctagaaataaaggaacaggccgtgagtactaattattgaaaacactaaaaacaatttcatgaaaaggattattaccttagtgacttgcttccagtatttatcacttgctgaaactgttccttgtgtactatcccatccaagccctgtatctttgaggaggccaagccaaaagctatacaaggcttttagtatatcccatcggttcttcaattgcatcttgctgtgtcgtagccctgttttctgcaagtacttgacagcaatgttctggtaccccctagtagtcattatcccgataggcctattgccggcttcgatttgttctacgcatagttcacaaaatatcctagtgtttgtggtagaccattctgctttgtcaaactccttctatttgatagaacaaacacattgagattcagttttcaatgttgtcgtacatctatagctctaactataaaaaaacatgactatttagagctccagagcacatgaatagtattttattatagcttttagatatg

SEQ ID NO: 13607 - DNA, 2784 bp, Oryza sativa
acccttagattatcttaaaccctacttaggatatgattatcacaagtaatatataaattattagtcgagttcactctaccatgatctttccatgggataaaataaatacgatacacttaaaatactctcgggtgaaatgctacaatggtatatccgtgcgcttgcggatgaattctgtaaccataatatagcaggagtgtttctgcgccattgtttttagtaatgacgttaagaaataccaacagtagccttgttaagtttcctataatctatgcacatcctccatccggttacggttcgttgtgggataagttcattttgagcatttgcaaaaaccgtcattcctcccttcttcggcacaacgtggatcgggctaacccactcactgtatggtacgggataaataatcccggcatgcaggagtttcaggacctctttctttacaccttctcttatcgcattattgagccatcgttgaggttctctggagggagtactctcggggtcaatagggatacgatgaatgcaaagcgacaagaacagcacaatgcttttctaacacagtcagaagacgttgagtctcgactttggagagcttgtcactgattatgacaagggcttctttgtaattgtgcatgaaggcataccataggccttgaggtagaggtttaaactcaagcggaggtcgaggtggcggttccaagattggaagatcgagagtctcttcgggttccgcttcttccttgatgaagtcagggacttcatcttccaaaagggcctcgggagactcgtgaggaggaactgttgtaaccttctccgctgactcaatctctaggagagaatcgatcaaggcgaaccttgcccgtgagaatgggactgagaattcattccctcccaaagttatcttgaggctatctagccggggtgtgcttatgaggagttgctcaatgggaagcccgattagaatgtcaaaatcttggatttcaaaggcatggacatccaagactggctccttgtcacgcccggaaattcactagtaatttccgaacttatttgtgcataaaacagtcatccaggaatcagccgaggtacataaactgacaatttaatatacaaatccatcaaaataactaaagcaattaatacttactgaagaggcacttagtcctcacaacgaagaaaactacagcggaaaaataaaatctagcgaaactccggctccactcccactagcaactcaactgggtataagccaaacgtcttctccttttggatccttttcttcaactgaggttgattgattattgcaaggtgagcatatgacatggactccctagcgacccccacggacttctcgccgcttctcagtatggtaccccgcaatgaatcatgctatacagaagataaagccgttgcccacgctggcttgtggttagcatggttaatgtctcacaacagtagctcgcaaaccggtccttaattgtcatgagcacgaccttcaaaaccatgtgctcacaacccaccattaacaagttttaattatcaattaattatcataacacgattaaccatcgtgagctaccattaaatataatcataaataataatgtagtatgattcatcccattaatgagctaatgtttctaagcatggctaagcaattatatatatatagcttttagctgaaccaaaccaatatataaggttcaagctaatcaatttgttacccaaggtatcaaggaatagagtaatcaatgcaaattggccataacaaaggaataggttcacaccacccggtgacattcgaaaataaatgcacagttgaaataaatagagaatttaaatataggatcaacatgctcaaaggaattgtgtttgggatctgtgtgacttgccctgcaataatcggtcttcaattagtcttctgaatctcttccgacacactcacgagccttcgcaacgacggaaacgacaagctaacacgcaaaacggaaaaaaagactaataaaaaccaaataaacagtacatataaagtaaacaaacatgtagatcatgattttaagtgaatttagcagcttgaaccactcgaatccgagttacgatgatttagttatgaattttctaagattaatctgattttaagatttatttttagaagggaaaaaggcttcatgacatcatcgatgatgtcaacaccggcgagaggctcgggacatcacggtcaccggcgatctaggtcacgacggcgagaacggagggcaccaacgcgacgagcacgacgcggggaactcactgaggggcggcacgatgacgaacgacgatgggagacggccggtgacgagatcgaatcggcgacgggctcgacttgacggcgtcagaggcgctacggcaggcttcggcttcgacccaggggtcgacggtgtgcagttcctccttgcgaagctgggagaggcgacagcgcaggtcgacgacggccgaggcggctgctaggggcggctggagcggctgccggcggtggacagagaagacgaacgcggcgacggcgctacaagcgacggcggagagagggagaggtgccagccgaaagaggagagggaggggactctatttatagccatgggagagagatcgatccaacaacgagagaatcggagccgggattttctagggtttggtttggagagaaaaacacgaatcgagctcgattctgcgttgatttcttcgggataaagtccgattcttgggggaaaagataaaggaggataacaggaatatttcccctca

SEQ ID NO: 13608 - DNA, 2478 bp, Oryza sativa
ttggaaaaatgtcttaactccctcctttcacttgcctttagatgccgcgctacaagcctgagtacttgtttggtgttgagggatttgtccaagagttgcgtacgatgtcctttgccataggatttgggactgcccctttttatgcccagattcctcatgatcgtcacgaagaaaagtgccgagtcaaagtcaccttgaacagtaatagtgaagatatcccctcagagatgttcgaagctggaggaagaaactacatccatgcatgtcaggaggtggcaaggatcgccataggggagctccgcgatagctacagtgatcagttggccgacactgagtatcgctaccatcctcgccaaccacagggaagtgaccgtggcagctaccttgagactgagggaattgagaatgatgctaccacaaggcatttggttgagatgctgtgggctatggatgaaacccgtgcggagactatgttagcagttcaagatcgtgaagatcggaatcgtggtaagatttgcaagctagaggacaaggtggatcgtttggagaaggaactagccgcgttgaagggagaagcaccaccgcagaaggccaggattcgtcttaccgcaaggaagagagctctatttgtccctcgctaccaattggcgccaaaggtccgtgtggtggaaaaagaagttaccccagccctagcggatcctccggtcgttaacgtaagtgatgatgaagaagaagaatccaagcacgcccattccaagatcgagtggggagcaactcaagatgatgaagacgaaccgaacgaaccttcaatcaactccgatgcccggaagaactagaatgccttgtcaagtcattgtcttagatcgttgtgttagttagtttgtttaagtttggttgtgtgtgtctcgcatgtgatttacatcagtggtgggatgtaagtgcatgcgtttgtttgctttcgagtgttaggtggttggtaagtttagtggtgtgagagtcttcagttttgtattaatgaaacacacttaagatcaataaaagttaaattaattctctgtcctaagtagttttccccggtttctcttcttgtgcttctgcccatgccagatggtgctcactcgcagcaacgggaatggccccaacaacaacaataacaacaacaatggagagaatcccacacttgcccaagtcctggctcaacaggcacagcttatgaacatgatgatgcagcaactccagaaccagcagaaccagctcaaccaaggaaacaacaatgctccgccgccgcagaacaagttagcagaatttcttcgtgtgaggccgcctattttctctagcaccactaatcctgttgaagctggtgattagctgcatgccatagagaagaagttggatttgctccagtgcactgatcaggagaaggtctcatttgcatcacaccagctgcatggcccagcctctgaatggtgggatcacttccgccttaataggactactgctgaacctatcacttggcttgagttcaccgctgctttccggaagacacatataccatcgggagtggtgtttctcaagaagaaggaattcaggtcgctcacccagggatctcgctctgtcaccgagtatctgcacgagttcaatcgtctggctcgttatgctccagaagatgttcgcaatgatgaagagcgccaggagaagttcttggaaggacttaatgatgagctttcttaccccctcatgactggagattatcctgatttccagaagttggtggataaggctattcgtcaggaggacaagtacaatcgcatggaacaaaagaaacgccggattgctcacttcaaggcacaacaggggaatagtctttaggaccccagtccatgccacagggaggttcttcgtctgttgttcgtccgcagcgtcagttcttcaacaacaatgctggcaacaacatccgtaatcaagctccacgccctgttgcagcttcgacacagcaacaacctgccaagaaggagcaaggcagcaagcccgtagtgtgtttcaactgtggagacccaggacattatgctgacaagtgtccgaagccccgacgcgtgaaagttgtccctgcccagagcaactctaccgcaccagcatccaaggctcgtgtcaatcatgttgctgctgcagaagctaaagatgctccagatgtgattttgggtacgttctttgttaactcagttcctgcaacagtgcttttcgattctggtgctacacattcattattatctatgagttttgcgggaaatcatgggatggaagtagaagatcttagacgtcctttgatggttagtaccccaagtaatcaagcactctctttgcaacgtagcccctctgtcagaatagaaattcaagaagtaccatttctggccaatcttattctgttagaatcctagggatggactggttagccagatataaaggtgtgatagactgtgc

SEQ ID NO: 13609 - DNA, 13559 bp, Oryza sativa
atgctgttaggtgagcacagctgtgctcacttatcccatatacgtggcgcagacttcctaaagggggtcggggtgccccggccctcggggccagggcaagcgcaacccgaccccccctcgggggaaatcaggaggagggcggacacctcaccctcgggcccgacgtccccgaaggtgccaggccacgtgggcgattgtgtctgcctcaagcctctagtcatgatactcccggtcccatatcaccgacagtagcccccggcgttatgccagagcaatttcccttcccaagggaagcggtcaggtgtgacgccactcctaaagcctggtgacaggtgggaccggtctgcatagttgggcaaaatccccaacggtcccagtccatgcacattggtattggtaactttggttgtccataatgggcggtctattcaagactgccacatcacttgagcagcgcgcgaatctgggtgagcagatttgtctcgcccggagatacggtaacgccgcttcggttggcgagcgtaattaacgcgcgcacgatacaatccgtttcgattgccacaaccgcatatccacttcaagcgccgtaagcgggcgaatgggattagtggaagcgtgggcacgggaaacgagggagcaagatagcgagatacgagggagcgaggtagtgggcgcgagaaacgaggagccaggcccagcgatggcaagggtataaaagcatcgagaaaaggatttgctcccttcctttcgccattgttcctcttgccttcgctgcctgagctctaactctttctctaccacgccctactttcgccacacgcgctcgttcccaatcatctcttcctccaccgccatggcacggggctctgctctgctcgacggcagtgtactgccgccttcccgcatcgtgaatgagaggcacgccggactgccgcgccgcttcatgccggagtccgccaccggtcgggagattgtgatgctgggcgaggggcgcccggcaccagactacccggggcggtccatcttcttcctccccttcgcaatggctgggctggtcccgccattttctcatttcttcatggatgtcctggagttctacgatctccagatggcgcacctcacccccaatgcggtgatgacattggccatcttcgcacacctgtgcgagatgttcattggggtgcgcccctctcttcagctgttccggtggttcttcaccgtgcagtcggtgtcaccgccatcggtggttggcggctgctacttccagccgcgggggccggtgttgaaccgctacatcccctgcgtcctccgcaagaagtgggacgactggaagagcgactggttctacacccccctcgccgacgaagcgcgcctccgacttccgagccagcccccggcgcaggtctccagctggcgggcgccggtagatctgggggaggagtacgacgccgtcctcgaccgcctggcgggcctgcgatcccaggggctcaccggggccatggtgtacggcgattacctccgtcggcggattgcgccgctccaacggcgcgcccggagcgcctgggagtacactgggcctgaagactacatgcggacccaccagggagccagatgggattgggctcctgaggacttcaagatcgtagtccaaagggtgctgaatcttagctccgcggaggcgtctcgccttcctcaggagatcctccccctctgcatcgatcccgaccgcgtctccattctaaccattatgctgggggtcggggcctcagaggagagagcccctaagggccacgacggcgcgggcgagagtcgcccggggaaaaaatctgccccaggagggggtcgtgcttctgggccccgcgtcgggggctcggggagcagccgccctgccgacgccccggggaagaggaagctgggaggaacacctcccccatctcctccccgagggggcggggcagtgcgtaccagcggtcggcgcccggagggggctgcgccgacgtcacagcccgagggggagcgcaagaagaagcggctccgcaagatgggggagacggaaccagcccggggaaacctaatttcccctccaaggtggtcattcaaccgaccccctcgcaggttcgtctcattctcattgcgaccacctttctcccaaagagaagttttttcttacccattttgttcgtcttttggttttttcttctgcttcagcgatgtcccgtcgcattcctcccgccgccccaagtccggccagtccgaggccgaagatccagcggccgcagaggagcggaggcgggagtctgaccggcgtgaagccgcagcccgccttcgggaagctgaagaggccgcccgggaggccgcccgggttcgccaagcggaggaggctgctcgggaggaggccgcccgggctcgccaagccgaagaagctgcccaggaggaggccgcccgggctcgccaggctgaggcggcagctgctgctggcgcgtcactcgggcccactccctcgggcggccctcaggcgacatcctccgaggcggctcgcgacgaggccgcgggcgcatcgcctgggcctacctcaccgggcgacgcccaggaccaaacgggcccgggggacatccccgagcccagcgcatcctccggggggccaagccgcgtcgccttttctccaaggcggcttttctcctcttctctcgtcgccccagtgagcgccgagcccattatgcaggccttggccgccgcaaacaccgcggtgctagatggatttagcgcccaggtggaggccttgcaagcggaacgagcggagctcgaggccgcatgggcgcgtgtcgaggaggggcggcgctcggtggacgccatggtggaggtgggccgtaaggcccaccgccgccacatctcggagctcgaagcccgcaaggcggcgctggcggagatcgcccgggaggtggaggaggagcgagaggccgccctcgtcgccaccaccgcgatggtcgaggcgcaagacaccctccgtcttcagcacgcaagctgggaggcggagctgaagagcaagctcgacgccgcccaaggggttctcgactccgccgctgcccgagagcggcgggcaacggaagccgaagcggcgtcccggcggcgcgaggaggccctcgaggcccgtgccatggcgctggaagaacatgccggcgccgtggagaggagcttgatggaccgcgaggccgccactgctctccgggaggcgacgctggcggcgcacgaggccgcctgcgccgaggaggagtccgcgctccgccttcgcgaggatgcactcgccgagcgggagcgggctctcgaggaggccgaggccacgacgcaacggctggcggacagcctctccctccgcgaggcggcgcaggaggagcaggcgcgccgcaaccttgaaagcgtccgcgccgagagagccgcgctggagcagcgggctgctggcctcgaggcgcgggagaaggagctagacgcgagggcgcctatcagcggggcggccgcgggcgaaagcgacttagccgctcgcctcgcggctgccgaacacaccgtcgctgacatgcagcgcgcgctggactcctccaccggggaggccgaggcccttcgcttggcgggcgagatcgggcccgacatgctctgggatgcggtctcccgcatgaagcgcgccggtcggcaagcgggcctctggggaggccagacgtcggtgccccccaccaatctggaaggcctcgctccgcacctcaacaggatggcttgggttctcgagcgactccccgaggagcttgagaagaccatcaaggcatcctcgagggacctcgcccggggggcggttgaactcgtgctggcgagttaccaggcccgggatcccaacttctccccctggatggcgctggaggagttccctcccgggaccgaggacgacgcgcgcgcgcgggtcggggacgctgccgaccacatcgtcaacagcttcgagggctcggcccctcggctcgcgttcgcccccagctccgacgaggagggcgacgccagcagcgaggacggcggtggcgacgaggccggcgacccgggcgcatatgaatgagcccccaggcccccgccactcttatcttttttcttgttctttcttctaaggccttcatgcctcttttttgtacaatctaacttaatctgcaatgagaaatgatgaaaaatttttgtgttagttttattttgctatatatatgagttgaggatgatctgtgccatggtccttttgcgccttagcttgaaataagggctcgcgcccaagtcccggtcctcgaatggctcgggtcggggctagtgcctggggagatccgcatgtcgagactggccaggccgggaacgtggtgaccgaggggtatgggtgacccgattgtgggtttttgccgattcccccccggagttcaccacgccccggggcacggctcggttctgggccccgtttggcgattttagctgaccgaaccgagcccccgagggcaaggttgagcacgagtgacattatttcaagtcaagattcttcaaaaggaaaaaacggcacagacacaacctttaggaaattgaaactgcttctattgaaatgctgaaaggaatatatatgcatgtgtggtagcccccggctaaccctgcacacccgagggggggtgcggggttagcccgagccaaaacctgacacccgacccccccccttcaggggtagaagcgacgaaggtgttcaatgttccacgggtttggcagctccgtgccgtcgcccgtggccagccgtaccgagcccggccgggggacaccgatcactcgatacggaccctcccacattggtgagagtttgctcaatccagcacgcgtttggacgcggcgtaggacgaggtcgtcgacgcagagtgatcgggcccggacgtggcgctgatggtagcgccgcaggctctgctggtagcgcgcagctcggagggccgcgcgccgccttcgctcttccaagtagtcgaggtcatctctacgaagctgatcttgatcagcctcgcagtacatggtggcccgaggagacctcagggtgagctcagatgggagaaccgcttctgcgccgtagacgaggaagaaaggcgtttccccggtcgctcggcttggtgtggttcggttcgcccagagcaccgctggcaactcctcgatccatgaatcgccgtgcttcttgagaatattgaaggtcttggttttaaggcctttgaggatttctgcattggcgcgctccacttggccattgcttctggggtgggcaggtgaggcgaagcagagcttgatgcccatgtcttcgcagtagtcgccgaagagctcactagtgaattgggtgccattatccgtaataatacggttaggcactccaaaacgggccgtgatgcccttaataaatttaagagcagagtgcttatcgatcttgacaaccggataagcctcgggccacttagtgaacttgtcgatcgcaacatacagatactcaaacccgcccggggcccgtttgaacggtcccaggatatcaagcccccagacagcaaatggccatgacagtggtatgatctgcagggcctgggccggctgatgaatttgcttggcgtggaactgacacgctctgcatcgccggaccagatcgactgcgtcattgagagctgtcggccaataaaatccttgacgaaaggccttgccaaccagggtgcgcgaggcggaatgggctccgcactcgccctcatggatgtcagcaagaagctcaacgccttgttcctgaggaatgcacttcaggaggattccgttagccgcgcgccgatagagggtcccttctaccagcacatagcgtttggaaatgcgttgtacgcgttcactcccttcgcggtcctcaggtagagtcttatctgtgaggtatgtttggatctcagagatccaagcaatcaatctaagggagcttggaacactctcttcgggtcccgaggcctggactccgacgggcctcgggggccggtcaggcgcatccgtctcccctaaggggtcgggtcgcgccgacggctgggtaagcctttcttcaaaggcgcccggtggggtctgggctcgcgaggacgcgagccttgagagttcatcggcaatcatattatcccgtctgggcacatgccgaagctctatcccgtcaaaatggcgctccatacgccgtacttggcgtacgtaggcgtccatctgtgggtcagagcaccggtactccttacagacctggttaacgactagctgggagtcgcctaataccaagaggcggcggatccccagtccagccgccactctgagtccggcaaggagtccctcgtactctgccatattgttagtcgctcgaaagtcgagacggaccaaatatctgaggacgtctccgttcggagaggtcaacgtgacccctgcaccggcgccctgaagagacagagaaccgtcgaattgcatcacccagtgggcggcgtgaggcagctgtgaggggttcgtgctggcctcgggcattgagacggtctctggagccggggtccactctgccacaaaatcggcgagggcctggctcttgatagcgtggcgtggttcaaagtgcagatcgaactcagaaagctcgattgcccattttaccactcgtcctgtaccctctcgattatgcaagatttgaccgagggggtaagacgtaaccacagtgacccgatgcgcctggaaataatggcgcagtttccttgaggccatcagaatagcgtaaagcatcttctgggcctgtgggtatcgggtcttggcgtcccggagggcctcactaacaaagtagacaggccgctgcacctttcggcggggccgatcctcctcgttaggggccgtacccccggggcgttcttcgtccaagtggcccctcggggcgaactcgtcttctgcgctgatgacctcggggtcggaggatgacaggagcggccctcccacagtggcctcggggccgtcctgggggtcggggactcctggcatcgtcggacaagcgggcaaagggccaactccggtcgtcaggggcctctggcctccgttcggctcgggggcctcttctccctgctctttcctgggtcgagtcagcacagggttagcctcggggccaaagggctttaagtgcagccttccctcagtggccttggggccttcctgagggtcgggggcacccagcaccgtttgacaagcgggtggagggccgactccggtcgtcgggggccttaggccaccgttcgactcgggggcctctcctccctgcctgctcccgggccaagtcggcacagagcgggggtgcgcagaatgaggattgtcctcatcgcgctccacaaccaacgctgcactaactacttggggggtcgccgctaagtaaagtagcagggactcatttggctccggggcgactagaaccggaggagagctgagatacgccttcaactgggcgagggcattttcagcttcctccgtccaagtgaacggccctgagcgcttgaggagcttaaacaagggtagcgccttctctcccagccttgatatgaaacgacttagggcggccatgcaaccggtgacgcattgcacgtccctaagtttgctgggggggcgcatccgctcgatagctcgaatcttctcggggttggcctcaatgcctcgggcagagaccaagaacccgagaagcttacccgcaggtacaccaaacacacacttatcggggttcagttttatgcgggcggagcggagattctcaaaagtttccgctagatctgaaagtaaggtctcttggttgcgcgtttttacaaccaagtcatcgacatacgcctcaacattacgtcctatttgactacccaaagaaattcgagtagtacgctgaaaagtaggacctgcattctttaacccgaagggcatttatgtataacaataggttcctacgggggtaatgaacgcagttttttcctcatcctccctagccatgcgaatctgatggtaaccagagtatgcatctagaaaacacaaaaggtcgcactccgcagtggagtcgacgatctgatctatgcgaggcagggggtaaggatccttaggacatgccttgttaaggtcggtgtagtcgatgcacatccgaagcttgccgttcgccttgggaacgaccaccgggttcgccagccactccgggtggatgacctcacgaatgaacccggcctccaaaagtctagccacctcctcgcggatgaaggcttgacgttccggggcttgccgccgcactttctgccggaccggccttgcgcccggccgcacggcgagacggtgctcaatcacctccctggggaccccgggcatgtccgctggtctccatgcgaagacgtcagcgtttgcccgcaggaaggagacgagcgcgtcttcctatttgccatccagaaaaccaccgatccgtgtggtcttggatgggccgtcgcccaaggcaacctccttgaccgggacctcgtcgcaagtggccatccgctgcctcggggcggtgggggcagaggggccaagcctctcgtcaccaccctcgggcttggacgcagcagcgaggcggtccgcgcgctgctccatgcaagcaagcgcgactttaaggtcgccacggacagagatggggccaccggggcccggcatcttcatctggaggtaggcgtagtggaccgccgccatgaacttcaccaacgcgggtctccccaggaccgcgttgtagggcagactgaggtccaccacatcgaagctcacccgctccgtgcggaagttggcgggtccaccgaaggtgaccggtaggtcgatgtgacctaacggccacgtgtgccccggcgtcacaccgatgatcggttgtgacggctggagcaccatccccggggccttgatagcatcaaaggccgcgggggaaaggatgttgagagccgctcctccatctatgaggacacgtcccaacttcacgttgcagatggtgggggaaaccaccatcgcaacctgccctccccgggcaatgcacggtgggtggtcggtctggtcgaaagtgagagcaacctccgaccaccgcgcccgacgcatcgcctcatgggtaggggccatggtcagaagctctcgcttcatagccttgaagctccggcgagagacgtgagcacatgctcctccatcgacggtggcaatggtggctccaggttcttggaaacctagatcatcatcaccatcatcaatgtcaacagcgggggccttcttcttggcctcacttcgccgtttgtcggaaggaaccgccggggacttgccgtcacggcgttcctgcctcctgtcctcctcccacttcctcgttcgctcagccaagtttttgactgcacgacagtccgcgagatcgtggagggaggtgttgtggacggagcaccacctgccggcggggcgctccctgccgggagtaccagcctctttctttttgtcgctcgcaggcctcccctttcgggtggcccgcggagcgccctcgacggcgaggacatgaccctcgtcgccggaacggtccgacctcttcttcctcctcctatcacgccgccctgtctgagcggcggatccgggggcggccgaagctgccactccggaaccggaggagttccaggtccacgcttcctccttacgagccactcggtccgcgagctgaaaaagctccgcggtagtctggggctctttggaagcgatcttttcgagcatgcggttgtgccgcacgccccccctgaacgcgtagatcaccgcgtgtgcagggatgcatggtatagtgttgcggacttggcaaaaccgctgaatgtacgagcgaagcgactcatcatcgcctcgctgtactgcatgcaagtccgcttcttcgcctgggcgcggatatgtgccttggaagttcatggtgaactgttggcacaaatcttcccaggagtggaccgacgcgggtggcaggttcattagccaaccccgcgcctgtccttttagggccatgggaaagaagttcgccatgaccctgtcgtcacccccagcggcctcaatcccggtcgtatagacctggagaaactcggtggggttgacgctcccatcgtacttctcggtgatggtgggccggaaccttgggggccaacggacattccgaagactcgccacaaaggctctacagccaacaccaccggccgggggcacggagggctgatcttcacgtccatgtcgaggtgacactctggacgaggaggctccctccgttgcacggggagtacgccggctattacaccggcgcccgatgttgaggcgggcatccggctccccatgctgatcctcccgagtcgacggtgtagacgagggagtggcagccgaatgacgtgcagccgccgccgctcgccgcgccctccgccttgatgacacggagccggtggtagcggcgccggaggtcttggtggtggtggcggaccgtccaccagcacccaggcgctgctgtgccgtcatgaccaagttggccacgtcttccagccatcgttgggctggagactccgggtcatggacgacaggcgggtgtcgtaggagcgcgccagcagcttgaagcgcaccctgaggcgtgctgccgtcgccgtagacgaggaggcgacgctccccgtctcgccgttctcctgcatcacctgcggccggtgacgccgcggacttgtcgaccctctcaagcgcctccccctgcttagggctttggcgcggaggaggtggaggagtacgagctcgacggcgtggattcggctccccgtcgtcgccgctcacactcggcgagaggtcgtgcgtttttccttgctcggccattaggctgaacaagaaaaacttggggcacacggaagagtctgagagctctgaaagcacacgctgagccccctacctggcgcgccagatgacggagctcgtggctcctcaccgggagaccgcgcaggcccccctttgccagttcggccgggggcttagggtgaaatctcaagctctcgctctctctgtatgtggaaatatcgtctgccagccagaaaacacgagacaccgacgatctatacaggttcgggccgctgagaagcgtaataccctactcctgtgttttggtggatctgtgtatgaatgagctacaagtgtcagctgacttctcccccgttctaagctcataatctgggaaagaatcaaccaaccccctctctatgggcaaggtcctccttttatacttcaaggggataccacatgcacccttctctttccaaactggactgttctttttctcttgaatgggcggagatcagcacggttgctgtccgaatgacgctccgatgggacagcccacacctacctccacttccgccgggggtgagcgcgtcgtgggagcatggctgtgcgctgacgatatggtcagtgtcagaccggtcgcaaatcggtcattcttgtccaccgcgtgtaatcttggcaacgtgcatgtttgcccttcttcacacaacattttgcttgtaatggttaggatgaagcctggcatatatcgatcggggctaacgtgtcatctctaagagataacacgcttaacgccggcttgagacgagtgcctagaggctttcgtcttgacgggatggggcatggcgtgcgtcagaccgccagtcgccacctaacccgtgatctgaccggtctgtgactggtcacagaccggataaagggacgcgccgtgctgcactgcgtgcagcgtgacacgcttgaccagactgcaataaatgctgttaggtgagcacagctgtgctcacttatcccatatacgtggcgcagacttcctaaagggggtcggggtgccccggccctcggggccagggcaagcgcaacccgaccccccctcgggggaaatcaggaggagggcggacacctcaccctcgggcccgacgtccccgaaggtgccaggccacgtgggcgattgtgtctgcctcaagcctctagtcatgatactcccggtcccatatcaccgacaggggcagagcaacagaaggctttggatattattaaggaatatcttagctctcctccagttttgatttctccacaaaaggggatacatttagattatatctatcggccggtgagaagtcaatcggttcagtcttgattcaggagcttgacgggaaagaaaaagttgtattttacctaagtcgtcggctcttggatgcagaaacaagatattctcctgtggaaaagttgtgcttgtacttatatttttttgtacaaggttaaggcattacctattgcccaatgaatgcactgtgatatgcaaggccgatgtggtcaagtacatgttatcggctccgattttgaaaggaaggattggaaagtggatattttccttaacggaatttgatcttcggtatgaatcaccgaaggcggtcaaagggcaagctatagccgattttattgttgatcatcgtgatgattcaatcggctcggttgagattgtgccatggactttgttctttgatggatcagtatgcactcatggttgtggtatcggcttagttattatttctcctcggggggcatgttttgtgtttgcctatactattaaaccttatgcaactaacaatcaagctgagtatgaggcagttttcaaagggttgcaattacttaaggaagttgaagccgatgctattgagattatgggggattctttgctagtgatcagtcagttggcatgggagtatgagtgcaaaaataatacattgatagtttacaatgagaagtgccaagagttgatgaaggaatttcggctggtgactttgaagcatgtatctcgagaacagaatattgaagctaatgatttggcccaaggggcgtcgggatataagccgatgatcaaagatgtcaaggtagaggttgccacattaacagctgatgattggagatatgatgtacatcattatttacagaatccatctcaatcggcttctcggaaattgcgctataaagctttgaagtataccttgttggatgatgagctgtattatcagacgattgatggggtgttgcttaagtgcttgagtaccgatcaggctaaggttgcaatcggtgaggtaaatgaaggaatttgtggcactcatcaatctgctcataagatgaagtggttgcttcgacgtgcaggatatttttggccgacaatgctggaggattgtttctgtcacgaccggaaataacccaacgggcgttccttacgtgcgtgcattaatccttgtcccaggaggcaaggtacaccaaaagttgatacaattcagagtttaacaagcggaagcgtaaataattaatttattacacgggcagcgaaggcccagcacacacaaagacaaacgagaaacagcggaagactagggcgacgaccacaggcacttgacggcaggcacgagctagacaccgaagccttcatcctccaggaactcctcttctgagtttgggaaaaattgagcaagactgagtacaaccaccgt

SEQ ID NO: 13610 - DNA, 1095 bp, Oryza sativa
acgctcggaggttgaggactcctagacggctaggtgtcactcccgagccaccgatctacatgtggttggccggtagaagtttgtgaaggccggatctcgcctccacaaggaaagagatctccctttagtggaaggaggagtgcttagtgcaacctcttgagaaaagggttagcaaagacccggctcttagtgagctcctcaacggagagtagaatcccctcaaggatttgaactccgggaacaactcagtgaacttcatttttggtgatatctcttctcccattatttagctttgttttttgtgccgctataaatctagtcgctgtttgcgccatactcttgtttgtgcacttgatctacttgtagtgttcttttagtggatcagacaatctgatccaacatcagactatctgatattttcggatagtctgactgtgaatcagactttccgaccctaactcagttttagcttccgcataaagttttaaattagtctattcacccccctctaggcctaattgaccctttcactcaccttgaaatccctaagaaccatcaccttgagctctttgagaaccatcaccttgaactccttgagaaccatctgcagcacctttatcacctgattgagtcgtactatctgagacctgttgtatttctccatccttggaagaacttgtcccagcaacatcagcaactagtttcatcttgtacctctgaacgattgttccttggcgagtctccataaatgggttaaagaatttcatcattacctctgtgtctgctgcatcattacctcaagatccttcttctgttcgggtgtcaacttgtccaaagtgatgggcacgatattgctctcattaacttcagacccaccaagcttagggatcctagatttgggaggaccctctttgctactgaggacggcgatgctggtagtttctcagccatgagagaacgctgttgtgattctaacttctaatcggtcccaccgggcgtgccaaaagcgtgttgatgtaaaaacacaaggcctgggagatctgcttaactccagtgcaggtccagaagcttgagtactctatgatgggctactgt

SEQ ID NO: 13611 - DNA, 1435 bp, Oryza sativa
ggatcaacttacactagagcaaaaggtagagtatgagcagatgatgaacaacttgcagaatcggtttttacattcatttgtgcaaactcgttcaggtacggttatccaaaggtataaattgaaagtgccatccaatgatgacttagaatcaagcacttccaaagatggcaagcccaaagatgacaaacccaaggatgagaaaccagaagaagaagaacctcaagagttcaggaacctgcaggaccagattgactatgttgttcatcatgcactgatcaaccaatcgggagtgcttgtcaatactctaactaacatgatcaattctgtggttgatggtacatttgctgaacatcaaagctaagggtctaactttttttcctgatggcgtgtttccaccgtatacgaatttagtgaccggcaaacaacagcccgtttctggtgtaattccagagcagccgatggcatcaacttcggctttgggagacagcgcatgtcaacatcagcacagggacaaccagggtttaatcctcatgtactgattagacctcagtctcagcatatggggcaaaacatacctcaagttactctagaacagatcgtgctatgtttaaggggaagccataggttgttgagccgattcagcaaataccggtggggcagcagacacctattgttcagcaacatcaacctgttggtgctcagtttgtctctaatcaacaagttcataatgtgcatcaatctcctcaacattatactggtggcaatatgaactttcagtaccaacctcattcacctcaaatgcataatcggccagggggatcacctcagcctcagatcttgcctcaatataatcagtttgatcaaatttaggtatctcaacagaagccttgggctgatatgattgcaaatgtgatgagggaagaatttggtcttaagcccaaagatattggtaacttatattgacacccatacccagaatattttgagagggttccactaccaaaccgatacaaggttccagacttttcaaaattctcggggcaagataatgtatcaacttatgagcatctcagccaatttttggctcaatgtggtgaggcatcggctactgacgccctgagggttagattgtttcctttatctttatctggatcggcattcacgtggttctcctcattgccttataattctatttcaaagttgggccgatctggaaaagcagtttcataaatacttctatagtgggattcatgagatgaaactttctgatttgacaacaattagacagagacatgatgaatctgttcaagattatattcagaggttcagagatatgaggaataggtgttatagcttggctttgacagattctaagttagccgatcttgctttccagcaattgttaactccgtttaaggaaagatttttggctcaa

SEQ ID NO: 13612 - DNA, 1394 bp, Oryza sativa
ttcctgcagcccgattatcaataaatatcaaaggaagtatgagagataggaagaaaagtattatgaagatgatggtggttttgatcctcattgggactgtgaattttttagattttgttggaatgaagggatgagattgccgtcaagagaagattgccgaggatgcagtgattctaataaaggtttcacggggagctcgagccgatcagaggaagctgcctgttcatcagagattgggtccgattcattaggattgttttcaggatgaaaatgagggcaggaattcacaatgttgtccttctggtattttcgccaagaatcaaaagagaagggtctagaggatgaggaacaaggagcgttttcaggaagtacagcaagagatcaatcatcggttgaaaaaggttggggcaaagcaagagtggcgtgttaagagtaaggtactaacggccgatgaagttgaagctgacaaggcaaagagactagctaaagggaaggctgttgcatcttcatcaataaacatggtttttgtgctacctgcagaatatgaagctaatcaggtcgatgtagatgttatggaagaaacttttactaagttggcgttgtcacctgaacaagctatttttgagaaaccagaggggacagagaatcggcatctcgagccattgtatgttaaggggtttgttaaaggtaggctgatgtccaaaatgatggttgatggtggggctgctgtaaatttaatgccttatgctcatcaaaactaatatggttcttaaagatttcggtggcaatccttcagaaaacaaaggagtgttgaatgtggtgttgacaatcggcagcaaaattgttcctaccacgttttttgtcatcgatgggaagggttcttatagtgtgttgcttggaaggaattggattcatgcgaattgttgtattccttcaaccatgcaccagagtttgattcaatggcaaggtaacaagatagaggttgtaccagccgactggtcagttaacgttgctagtgccgatttaactgtttgggagatggatggaattgattgccagtccggaaaaatttgggaaggaggttatctaaaagtgtccaattgtgatatacatccaattgaagacggagagcctcaattgttgctttgagggagggcgtcgtggagggttcaaatttctacaccaaggatactgtagatgatctcgatggcaaattaggacagggttttatgtcggccgatgatttagaagaagttgatataggtccaggagatagatcaaggccgactttcatcagcaagaatttatcatctgaatttagaaccaagttaataaagcttttgaaagaatacagagattgctttgcttgggaatattttgagatgccaggactt

SEQ ID NO: 13613 - DNA, 3660 bp, Oryza sativa
ttctttgttggtgagatcaatcagttagcgggggaatatgagtgcaagaatgatacattgataatctacaatgagaagttccgagaattgatgaatagttttcgggtggtgactttgaagcatgtctctcgggagcagaacattgaggctaatgatttggttcaaggggcataaggatacaaatagatgatgaaggatattgaggtcgaagttgctacgattatagccgatgattggacgtatgatgtgtttcagtatttaaaagatccttctcaatcggcttcaagaaaattacgatataaagctttgaaatatgccttgttggatgatgaattgtattatcggacgattgatggtgtgttgcttaaatgtttgagtgccgatcagggaaaggttgtaatgggagaagtacatgaaggcatctgtggtactcatcaatcggctcacaagatgaagtggttgcttcggcgagttggatatttttggccgacgatgttgaagatttcttccgacattataaaggttgtcaagattgccagaaattctgagcaatacaaagagcactagcgtcggctaagaatcctataatcaatccatggccgttcagaggttagggaattgatatgatcggccagatcaatccacctttaagcaaatgacataagtttatattggtgggaaccgattatttcacaaaatgggtggaggcagtcccattgaagaaggttgactctgggatgcgattcaatttgttaaagagcatattatataccgatttggtgttcctcagactatcacaaccgattagggatctatctttgtttccattgagtttgtccaatttgcagaaagcatggggattaagttgttaaattcttcaccatattatgcacaggctaatggataggctgaagcatctaacaaaagtttaattaaattgatcaaaaggaagatttctgatttccctccgcaatggcatacgaagttagctgaggcattgtggtcctatcggatggcttgtcatggatcaatccaagtcccaccttacaaacttgtttacgggcatgaagcagttttaccatgggaaagtgtcatcggctcgagaagaatagatttacaagatgaattaacagccgatgattattataatcttatggtagatgaaacagaagacttggttcaatccagattacgtgctttggaaaaagtgacaagggataaggaaagaatcgctcatcattataataagggagagttggtttggaaattgattttgccaataggaactcgtgataataaattcggcaattggtcgccgaattgggaaggaccttttcgaatctataaatttgtttctaagggagcttatatgttgcaagggctcaatggagaagtttttggaagagctctagatggaaagtacttgaaaaaatattatccaagtgtttggatcaattcatgatcggttcggttataccgatgcatgttagccgatgtgttgacatcgccttcagatggccgatataagttatatcgcccttcgaatttttattgttaccataatcggttgtgttatgcggatgtatgatggccgatataagttatatcgcccttagaatttttattgttatcataatcggttatgttgtaccgatgcatgttagccgatgtgttgacatcgcctttagatggccgatataagttatatcacccttagatttttatttttatcataatcggttgtgttatgccgatttatgatggccgatataagtcatatcgtctttagtcaagttataattttatcaatgtttactcagcattgcaaaattaagggggcatacatatatatgaaaatatgcgaattccaaaacaaaatatgtattcagttcaagttcagattacaatcactatgcacagataacttttaaccagatacaagcttgttaatagccgatatagctcgttgcccaatttgttctatgtcctctatggcctgagcgtcggttgcatcggtgtcatggttatggataccacatacctaatagaagttgactaaactcggcaggacccaccacataccacgtcttatacgagaacaaacctcgtggggagagaggacacacccaccacagacgcacaatacacaagccaatatataccaagacaagccgccggatatcaacatcacagattagtctagacataccccatccggctcttacggaggtcggcaagagggatctagcaccatttctgatctcgccgagtacggattcgaggaggaagactaccctgtcgtcgactacgagttggttatctagccaccaagtcgatgagagctagataggttatcaaaaatattgtatttgtgtgattcatatgaataaagagcaataccggcttcgaccaacaggatgttgggctattacctatcagataaggggctcgaacctatataaaaatccttgtctctatctcttttacctcaatctcgcatataccctggtaccgacgatccccataccatccaaataccgtagtcgtgatctcaaacgtcgacagtagcgtgccaggtagggggattttggtgtttcaagatttcgacgagatgggtttaagagacggactctccaacaacaagctactcgatgacttcgaaccagggagatacaacctggccagagtacgtcccccaatgagatcggaatcatcatcgtcaacaaatttgatctatcgagatcaatcaaggtgtcgcaagccttggactcacatgccgacgccgacaagaagctgcggcgcgcactggtgggcggcggagctagcaaggtcattgtggcgctcgtccttgcccttttcaggtcgccgggcagcgtgttctatccacagcaaggcactcttctacgcctattacgtgatcctgctcgccgttgccgtgttcggcgtggcggaggtggctgtcggctgctgggtctctgcttccccgagcgaccggcggcgaggcgtcgggaaggtggtcgtttgggcctctgtcatggcaatcgttgtcgtcgccggacttggatgtttcgccgtgcttaagtaatcaatcgtgcagcaagtaatcaatcgtgtagctgagttgggtgcctgcttgttcttgtcagtttaagctgcagtcgtttgcttaggaccaaacaccttcgggcgtcgccgccgccgtgctcgtgtgctcggtgccgccgctgtgctcgtgtgctcgtgcgccgggtggccgctgcgcttcgtcgtcattggcgatgggtccctagcggtgcgccgccgcttccccggcgtgcgttgctactcacccgcggagggaggaagaagaagaagggagaaagaaaagaaagagaggaggagagatggagagctgacatatgggcctaagggtatttttgacatttcacgcgatttctctctcctcctcaaccggaaatcattattttaatcggcacggtgtctattggcaaattaccacgtttatggagtgttttcccccaaaagtgagtttggacagtgtcccacggctaaaaccacacaataatagtgtcctgtagcaaaatttgcctttgctatttggagcgcatgcgccagaaacggaactggcacgcagcaactggcgcttcccatgggtttttt

SEQ ID NO: 13614 - DNA, 11538 bp, Oryza sativa
cccaaataatgatatcccgtaatctagacaccacgtctaactaccagatactactctaatatcatcatcatgacatagagtaattgcataagcaaacattatacccgcaccaaagcatctctcagataagctagctgtatattcagtataacatgaacataatgtaaagtaggcattcatatactcagaaagtactcctatttaagaaaattattccccaaacgtttgacaaattttgttttcatccttcccaaggggcttcaggaggtctcattgttctttggaacaaccatcttttctctgcaaacctggtttctagtcatccttatgagattactatgcacttttgctccacgttgacaacagatgaaaattggcttctcacaaatatatatatggaccctgctcaggagatttaagaacagaatttgttgactggctatatagtattacttttcaaccagatgaaaaatggattttcatgggagattttaattttatcagatcaacccaaaacaggaacttgccaggtggggatatgaatgatattatggtttttaatgaattgatcagtaacattgaccttcaggaattgcctcttaagggcagaacatatacttggagtaatatgcaatcacaaccacttctgcaacaactagactggttcttcacttccccctcttggacagttctctacccaaatacaatggtcactgctctgagtaaatgcatttctgaccatacaccatacccctctgagaccacagttccaaagacagacattttcagatttgaaaatttctgggtagagctcccaggattcatcgaagtagtgaaacttttctgggatatccctgtcagagcagacagtcaagggaaaatcataaatggaaagtttaaaaatctcagaagaggactcaagatttggagcaagaggctctcaaatttgaatacactgattggtaattcacatgaagcaattgactttttagataacattgaggagcagagacctctctttatccatgaatggaacttcagaaacattgtcaaaaatcacattttgaaacttcttcattacagaaatattttctggaagaaaaggtgcacaatgaggtgggtcaagtttggtgatgaaaacacaaaattcttccatgcttcagcaacccaaagatatagacagaacaaaatctcccatttaactctaaatgatggcaccattattacttcacatcaggaaaaggcccatgcctttctaaacttttacaaaggaagaatgggaacctctgaaggaattcaaatggcgatcaatctgactgagctgattactcctcttgctggcctagaaaacctatcaaacatgccatccaggcaagagcttgaatctattatgaaggcaatgcccattgataaagccccaggtccagatggtttcaatggtatgttcatgaagaagtgctggaatatcattgctgaagatttttacaaattggcaagagagttctttggtttacagtcctcgatccaaaatttaaacaactccttcatctgtctaatcccaaagaaatcttctccagaaactgcaaatgactacaggccaatctctgttcaaaatatgagtatcaaattcttatctaaaatcttggcagaaagactgcaggctgttattcttgatcttcttcatgaaaatcagtatggcttcattaaacagagaacaattcaagattgcctggcatggacttttgaatttctccaccagtgtcatcaaagtaaaaagcaaattgtgattctcaagatagattttgaaaaagcttttgactcagtggagcattcttccattttagcagtgttgaaagcaaagggtttcaatgaaacttggctcaaatggatatcagacctgttaacaacctcatcctctgctgtacttctcaatggaattccaggaaagaatttcaagtgccaaaagggtgtaaaacaaggagatccaatttcacctctcctctttgtcttaactgctgatcttctgcaatcaatgataaacaaggctcatgatacgggtattctttccaaacctattccccgaccggacaccaaattcccaattatccaatatgcagatgataccctgataatcatgaaggcttgtcaaaaagaaatttttagtcttaaaggcattcttcagtcttttgcttcttccacaggcctaagaataaactttcataagtcttgtatgattcctatcaatgttcctgaggaaaagactgaaatccttgctgggactgtggagattatgggtaccccatacccacacggcatggttatccgactagttataggggataacttatatatatgtaatatgtaacagatcatgacttgggtattacgtttccttgtatgttacggaacggcctaaagtcctggtttgataatattgtaaagtagatttaggaaaccgataccgtattggttaaggtttctatcttgtaatcctgccccccaccctatataaggtgggcaggaggccctctagggggcatgacacaatatgatcgtcagatctatactatacccggcggattcaaatccccaaacaggagtagggtattacctctcattgagagggcctgaacctgtctaaatccttgtctccacatccatccacttttaggtctcgtgcgctacccccttttattattgccgaattcatgtttcgacagggacctttggatgtaacattggatctttgccattcacctacctgggtctgcctgttggaactacaaggcccaaaatcatagactttgtccctttaattgacagagtagaaagaaggttgcctgctattaccatgtttctaaaccaaggtcaaagactcactatggtaaactcagtcttatcctccctccccacctattacatgtgtaccctcaaaatcccaaagaaggtgatagagcacattgatagagcaagaagacactgtctatggagaaaatcaaatgaagttgatgctaggtctctttctctagaagcatgggataaagtttgcaagcccaagcacaggggtggccttgggataattaatttggaatttcaaaactgtgctcttcttatgaaacacttggataaattctacaacaaaaggggactcccatgggttagactgctatggaatgcatattacaaaaacaaccctcacccacgacatgccatgcaagaaaaaggatccttttggtggagggatgtttttcgtcttattccaatcttcagagggcttagtgcaattcaaattaacacaggagattcaaccctcgtgtggaaggatccttggacagacatcatacctcagtttgccttcccgacgattttctcttttgctgccaatgaagacgtatccattcagaagttcatgcaaaatgatctagaccagaatttcttccttcctctctctgctcaagctctacaatagcttagtgaaatctcaaaccttctgaataatattcacctctctaatcaaagtgatagctggacatacatttggggaccatctttcaagcccaagaaggtttatgatatgttctttgctcatctatcaccttaccctgcaatcacatcaatatggaaaagtaaatgcacgatgaaagtaaaagctttcctttggctgctatttatggatagacttaacacaagagatatgcttcaaagaagacaatttcacattcagaatggaccatcatgtaggatgtgcaactctggagttctggaggatatgcctcacctgttctttttctattcttttgttcaatcttgctggaatttactaggcatcaattgggatgagaacctagagttctgtgatatgattcaatcggcatatatcaacttccatcaacctgttttttagaagttgtgggcactgcttgctggcagatctggacaaaaaggaattctttaattttcaacaacatccagctttcaatccacttgtggaggattggtttcaaagaggatttcactcttcttatgcatagagtgaaggaggaagacaaacaaaaataccaatcatggatagactcaattttctagatcccttgtaaagttttttttctttttttctctcttttgtaaatatctttatatatatatatatatatataatctattatcacagtaggagcctctcctactgtttctcgtcaaaaaaaataccataaatgtatatagaagagtattctaataaaagtacaaaacttacaaaatagaagagaaaagttactgatgctaatgagttgcagagggttgtgctgtggcgtggtgtggcgtggtgtggactgatgctactgtgctgcttcttgcttgctgcacctttttttctcccgatctgagattgggtttgcgtcacccaccgtctcgtcgacatatgtacgtctccgacatcggcatcgactctcttcaacttcatcattctgcctcacgcatcttcggtttgatcacccattcaagcgcccggctacaatgacttctaccgccaatcgtcttcaactatgcgtctacaccatcaagcttcgggttgccgctgcgtcgccccctcgggccacagtgccgctgcctgtggtccacacctcctcaagtttttgcaatgctgagaggcaccctcctcagcatggctacatcaccggtggacttctcgccactgcatcgacatggagctacagctgtgttgtcctcggaccgtagctttgctgctttcgtcgtctttatcgccgtttgcacatcgacaacctcgtcatccgcactagtcatcgtcagccacttgggttcttcttcatctacttcaagcattgccgctctaggccggtgctccagctacctctacatggctgttaccgacgacgccgtccaggccgttggtcccgctactgcgcctttttcttcgtcgaacatgtctcattgccagcgtcgtcatatcttcctcgactacacttcgctcttctccggcaactgcgtgctgcttcggcaattctctatctatgcaattctttcgccgcgactgtcttggaggccttctctactagtctcctccgacattggcgtatgattcatggcggtctccaaccttgcccgcacggtattggcaacaccgttgcgtgcgttcgttccaagttgtccccgggtttggcaaacccgacatgacgtctcatccttcacggttcgactacatcggctcttcaacgttatcttcctcaacgactgtcgcgattgtgtcaccgtctttgtctctagcgcgtcctcgcacaccttggtccacgacgccctcccatgcgtccacaaccactctacggcgccccatgctcgccttgtggcctggctacctcgacatcagcttcccgacttcggctacatcgaccacggctactctacacacggcttcatcaaccacggctccctcgcaccctttgctttagcaacatcgactacggcacgaaaggctatcatcgtgttgagtactcttgttggttttttctctagtccaagtgtccgcgctgctcacgtttggactgcgggggatgttagagtatatggtagttagagttttattaggataggattgatttgtgtggagtctttccatatctgtaatccttccttatctacttcccatgtactcctatatatatcggtcctctgagactcaatacaacgtgtccaatattcacattatctcctctccctatactatccaacatgatcgctgatctctgccttctccagtggttactgccttactggttggcgattcggaactcagcgtccacgaccaccagaccacgactcgatgtctagtgtgctcagtcgcaggctcggtaggacggacacactgtcgatgacaatcgacgaggagatagagacaagatcagcagtcgatgatcgctgtcgaggcatgggcggccgggcagtgggcgtcggggcgacggcgcctcggtggttcagcgctccactcgttcgccattcatggtctgccaatctcgtggcctcgcgggtggagtcaaggggtcaggccatcaagctgtcgggtgaggcgatcgttgtgcagcggcggtgcggcgtagggctcctcgatcggctcctcgcggcggtgcgcgtagcggcatgttggcaaggcgtggcgctagggctgactagactggctgcgaatggcgtgattgcgggcggttgaagcgaaaaatgaggagttgatcgcgacgtgaggagaggtgcacatgtccgcgcgacgcttcggtttccactttccatgccgcgatcaccatttgtttttttctgatatatggtagggtcggttgccattttttcggtggttcaatgaccacgtggaccaccctataaatccgcctaattgacacccaccgccggcacgctctggcttgcagctggcctatcgacgacgtcattatctgctgactgaggttaggatctttgctcgaatactggtattacgaaactaatatttagggattgaattgtatgcattgaaataggctcaaaggagcatataaagtgtacaagcagacaaaaaaaaaattaaaatacccttgctaacaatcagcgtgaggaagctgttcatgatgagctccttccactagtacacaaacgatttttccgtgacaaaatgcatttttccataccgaggtcccgcccgtctacccaggtgtctacaaaaatccatattttcacgtgcgggcggcctaatcgcacgagataatccatcttcccgtgtgttgacggtcattaccatattcatgttagaacaataatattccactagtattaggtttgctaaccttttgcatagaataaccataaagtggaggagaaccgacatcaaatcagatgataaataaatcggatggtgtcgagaatcagacttatgcatgaatgggccaagaactcagaaatgacatgacgaattaggccaaaattcacaagtctgcggagaagagcatgagatgaggccaccagccgaaatttgggctggttgggccggccctaggttcggccaaaccatcctcagcgttgtttgatccaggtctttgcctggacggtgtagatcagcccccaatgacggttggagggtatttccaaccattccaaccatcacaaccatcattgggaggcaataaaaggagctctcatcctcacttcattcacacacttcaagcaaaactctctcatattctctcaagtttagtttagtgttcttaagctagtggagtatgaatagaatagaaatcggagtccggaagcattcagaagagttcaggtatagctctagtagctcttatttcctcttttgcaagcttcgtactttatttagaatactcttctttatacatttctgttattgaaatactttccgagtatatgaatgccaactttactttatgttcatgttatactgattatactgctatcttatctgggagatgcataggtacatatataatgtttgcttatgcaattactctatgtcatgacgatgatattagagtagtatttggtagtttaggtgtggtgtctagattatgggatatcattatttaaggttatatgctgcggatgagaggtgggccgctgatggtgtcagctcagtacgtgtatatagtcctaagttaatttcctggggagtgtactcctccgtatttatccccgattgtatggttatgacaggatgttgtaaggaactcggcagtcaggggtgacttctcgaagtaccaggagggcatcagatagagggtattagctagttaatcatataactagaatgtatgtatactatgtataccagaagtatagcaatagattctctttctttttttctttccacttagcttagatattttagtatgagaatgagtagctccatgcttgtgtgtcactctaccctttgatttatcttaaccctgcttagactatgattattacaagtaacatataaattgttagtacggttctctctactatgatctttccacggtattaaataaatacaatacccttggaatactctcgggtgaaatgctacaatggtatatccgtgcgcttgcggatgaactctataaccataatataccgggagtatttctgcgccattgttgggaattatatttctagtaatgtcattaagaaataccaacatcgtacggtcgggttgagtggaccgcacaggataatcgattatcacgtgcagtcaaattatactgcccacacgcaaaaaaaaaaagaaaaacccaaaaaaataaaataaaaaaatcccaaaccctaaccctaaccctagaatcgcccaccgacgtctctcgtggtcgccatcgtcctcatcgtcgcgctgctgccgctcccagccaccaccgctgctcccgagcccgctgctcctaaccccgtctccgccgtgaccggttgtcgttgccgctctcgggtgccttctcctcctcgtcatcgacgcggcgcggatctggctggtcgcccgccgcaccgcctctcggtcgctagccgccgcgctgcctacgacaacagctgctgcgctgcctcccgcccatcgcctcctcggcggcagcggcggcaagccgggcgcctcccgcgccccgtgcgctcggtggggaggcgaggagaggaaagggagagagagaggactgattgagggagaataaaatggaaaaggaagagaaagggtgaaaggtttgaagtgaatgagagggaaaagatgcagaggtattttcacgtgcggtccacttaagacacccgcacgcgaaaatcaatttttgcgtgcgggcctcttaagggtccgcatgtgaaaataggcttatttttacatgcggaccgtttaggggcccgcctacgaaagtcgatttttgcgtgcgggtctcttaagggtccgcacacgaaaatgggagaccgattttcacagacgcacgcgaaaacggtctgtctggaaaaataggagctcctcgactaggaaagtcttttgtgtactagtgttccaatccctatggttgcggagctgatttgcaggtggacgctcatgccggagttgagggctatgatcttcatcacttaatcacgttgccatggatggtgtcatacaaccggctcacgctgaggttctcctggagagatttgctccagtccaacaaaaagtacctcgagataccgatacctcacggtaccaaatcattttcgattgttggatctaacaaagctcatcctgtccagctagatctaacgattgaaaatgttttggtactgtgaggtaccagtacctccatgtatttttttttttgaccagagcaaacctctctcctagaacaccacagcgaggaagaggaagtggggtggggcctcccagcgagagagctattaaagggcgttcgcggcatgggcgatctatcgtgactgcttgtcgtgccccttgtaaatcaatacatggattcaactgtttgtaccttaaggatgatagaaatgctcctcccataaagctccgtaccaatggatatgaacaaatcaactaccaatgttctttcacctactaattttgtttttcttccttgagaacgacatgttctttcgtacgtcattgtttgtatgcacacacatcgcttgctttcatctaagcttggtgctaacgaaagttatttgtaggtgcaccttccaatggggatctctcaacacactccgatagtagcaaccactcgtacaaacaaagcaactaaaccacctgacccctgaccaaaagagatcgacacccacagcgatcgatcgatcgatattattacatatccctcaactactcactggccgtagccctttgttgcagctcggtgcatgtgtttgcacaatgagctacctcctctcctacatctccaagatgctgtgcatcaagattccgtcggaggcgaggcaagccagcgaggacggcggcagcggtggcctgacggagtgctccgtctgtctctccaggatccgtgtcggcgaggcgacgaggcgtctgccctgccggcatgcgttccaccgggactgcgtcgaccggtggctcctctcatgcaggcggacgtgcccgctttgccgggtttacgtcgtcgtcgacggtaacaagccaggggtggcagcgaagcacaccggcgagccgccgctcgctgaagacatggtgatctggttctctgccatgctcgtccctggattctgacatgtatatctctgatgtctaagcgcaatgctttttatttgtttgtttcctgcctggaaaccggtttgttttttttttcttatattatgcaaattaacatgacgatttcacgcttgtagcgtttgtatgtacgcttacgctcacatcgtcagcattttttttcttttgcaagttttctattgggcgttgattacctattcaagagaactgaaaaaaaaataagtaggtatatataataaaaacggtttctttagatttcctttaacagtttttttcttttaatctgtcgaattttattttataccgtgcgatatacacacagatgatactagtctggtttatcagttcagcatttctttctggtttgcttggttgaaccatcatcactgttgagttgtctgtccatgtggagataaaacaaggggaaagtgagacaagggaaggaagctcgaagatgctagagaaggtcgtacaaatctgaacaggaggtgtttcttgccacgtcgtgagtcctcacccaacacgctgccatccactcaccgtcactaccagactttagcagctacctgtaggcatgaaacccacagaggaaaataggttttaccgtcagaaatttttaacctgtgaatggactgatatgaatcgccgacagaaaaatgaccacagagaaattccattttcctgtaggtttcatattataaatcgtttgatttttttattattataagacatttgactttttttatcaaactcctttaaatttgatcaagtttatagaaaaatatactaacatttttaatactaaacaaacatattatcaaaatatattcaatacaaaatttaatgaaactaatttggtaatgtaaatgttgttatttttttctaaaaatttgatcaaacctaaagaactttgactaagaaataagtccaataactaataatataaaacaaatagagtagttgtcaacgttctttgcatctatatttgttctttagttcaggtgttgttccctctgttcccaaccacaaccgctagtctagtgagatgttagagcatctccaacagcatctctaaattcgattctccaaatacccatacagctaactctccatctgatttgggtaatcaatctaggtgttgactccaacaggctctctatttacatctccaaaatgacaaaaggacccacatgtcagcctctattgctttcttcttcctcttctttctcttcctctttctcttctcccttctcatcgacccatccccgtgcgaggtggacggcgacagcggcagcggatcctcc

SEQ ID NO: 13615 - DNA, 7261 bp, Oryza sativa
ttgcacgcaccggatttttcggaacgtttccaaaacaaaaacgaatccgaatttgcagcaaaacaaaactgcaaaaggaggctgcatctgcgcaagggtgaggagccaatttttcggaccattcgacgcgtacgtcgtgcacgcgcgccgcctgccctgccaggcgaggcgagcgagcgcgcgcgtgtgtttctcctcttctctccaccacacatgcttcaagtgactaggagggcatcctcccttttaaggaggtccccctctcctagaataagcaaggtggtactaaactccacatgcatgccatcccatgaggtgggcttttgtgattttccaaagaattaatcttcgagtgggctaaggcccattcattaattccaacaatcccccaccaaatctcaaaatcccactgagatttgccttttccaatgtactgtttatataccagcagttcgatggagaccaattaaggttgaacatccacctagaactccaagctacacttactcacaacttgaacaatggactacgccttgaattgcaagtcttgtgcaagcaagtttcactcaaagtcttatctggtactagaccgtctgtagactatccctcgggtggagcgtataagtcatactcctaggtctttagtaagcttcctagaagattcacccaaaatcttcatagactgcgaccaacagtcaagctcacaaaggtgagttctttcaagaatgctttgcaggacaacatcttcgctaattaaagccaacagaactcattaaggcatagccaacctgccttgcagctcacgagagtacatgcatcttcacttggagagggtatatatattgatactctcctctagtttactaatggtttgttcttcccaggatctaattcacgggatctccgatcacatagactgggttaccaccatagtataactcacatgggtctcaaacccatctccttcgatgcattgtctatcacatttcgtgatagtcccttcgtgaagggatctgccagatttctcgctgtttggatgtaatccaacgttataactccggagtttcttaatttcctgacagacttcaatcgtcttttcacatgtctagacgatttcatattatccttagaactatttactttgacaattaccgtttgattgtcacagttcataaggatagctggcaccggtttttcaacaacaggcagatccattaatagatcacgcagccattctgcctcaacagtagcagtatccagtgccgttagctctgcttccatggttgacctcgtcaaaatggtctgtttgcaagacctccatgaaacagcaccaccacccagtgtgaaaacatatccactagtggctttgatctcatccacatcagagatccagttagaatcactataaccctccagtaccgcaggatacccagtatagtgaaaccccaattccacagtacctttcagatagcgcattactcgctcaagcgcacgccagtgatcatctcccggattagaggtaaatcggctcaacttgctcacagcaaaggagatatcaggcctagttgcactagccaggtacatcaacgagccaatgatttgggagtattccagttgattcctagcaattctcttgttcttgcgaagcaacaagctaggatcataaggtgttggagaaggcttactatcaatgtagccaaagcgattcaagatcttctccacataatgggactgcaagagtgtaatcccattctcacctctaattaacttaatgtttaagataacatcagctactcccaaatccttcatatcaaaattttgagacaagaatgatttaacctcatttatcacctcaaggtttgtcccaaatatcagtatgtcgtcaacatacaagcacaaaataactccctcacccccaccatggcgatagtacacacatttatctgcttcattgactgcaaagcctgcagatatcaatgttttgtcaaatttctcatgccattgcttaggagcttgtttcagaccatacaaagacttcaacaatttgcacactttgccttcttgaccttcaactacaaacccatcaggttgatccatatagatctcctcatccagctctccattaagaaaagctgtcttaacgtccatttgatgaacgagaagaccatgtgaggctgctagggaaagtagcacacgaattgtggtcaatctagcaacaggtgagtaagtgtcaaagaaatcttcgccttctttctgagtatagcccttagcaacaagccgagccttgtacttttcaatagtaccgtcaggcctaagcttcttcttgaacacccacttgcaccccacaggtttacacccatagggtcgctctgtcacctcccaagtcccgttagcgataatggaatccatttcgctacagatagcctccttccagtagtctgcatcaggagatgcatatgcttctgaaattgacttaggagtgtcatccacgaggtacacagtgaaatcatcaccaaaagacttagccgtcctttgtctcttactccttcgaggagcttcactgacatcctcctcagagacaagttcatgtgtatgttcagtttgttctgatggtgtgattgaactgggaattatttcagagggttggttcgaaccactatgtgtatccttcattgggaaaaagctctcaaagaaggtagcatcacgagactccataattgtaccaacatgcatgtctggtacctcggatttaactattaaaaatctataggcaatgctatgatgagcatatcccagaaaaacacagtccacagtcttaggtccaagtttgcgcttcttcgttattggtacattgactttcgccaagcacccccatgtgcgcaaataagaaagtgatggttttctaccaatccatatctcatatggtgttttgtccttatttctgttaggaactctgtttaacacatgatttgaggtcaacaatgcctccccccaccatgccttaggcagtcccgcggtgtccaacatggcattcaccaagtcagtcagtgtgcggttcttcctttcagcaatcccattagactcgggagaatagggaggcgtcctctcatgtatgatgccatgttcctcacagaataagtcaaactcgttcgagaaaaactctccaccacgatcagacctaagcctttttatctttctgtcaagttgattttcaatttctgccttataaattttaaaatagtctagagcctcgtctttcgttttcaacaagtacacatagcaaaatctagtagcatcatcaatcaatgtcatgaaatatcgttttccacccttcgtcaacaccccattcatttcacaaagatctgaatgtagaagttctagtggtgccaagtttctctccttggcagccttgtgaggcttgcgaggttgcttcgattgcacacaactatggcacttagaacttttgacaatggaaaacttaggaattaaacacatgctggaaagccgagacatcaagccaaaattaatatgacataaacgtgaatgccaaacattagcctcatcatccacactgccacaaatatggttcacagacttattgcagaaatcagaaagggaaaagcggaacaggcctccgcactcataacctttaccaataaaatatccatgtttagacacgactactttattagactcaaaaaccaacttaaatccgtctctagtcagacgggagccactaacaagattccggtcgatagaagggacatgctgcacgttcttcagctgcacgatctttcccgaagtaaacttcagatctaccgtgccaacaccatgaacagaagcatgtgacccattccccattaggacggtggaaccccgtgcgacctgataagaagaaaacaatgagatgtcagcacaaacatgtacattggccccagtatcaacccaccaattagtagattgattaactgaaaaaacagtaggtaaattaccatacccgcttccatctccagtgttgccaatggtcacattagcagacttagaagtctgccctgcaggtgccttcatccccttgcgctgtggacacttcctagccagatgaccaacttggccacacacaaagcaagtcctctcatcctgattaggattgttgttgttcttcttctgcttcttgaagttggtggtctgctgagctttgtatttccccttgctcttgttctgggccttgtgcacaacattggcactggactgcccaccatcgcccttagacgcggcatctttttcccgagctttctcctcaacatcaagagacgctatcaacccctcaacggagtattcctgtctcttgtgtttgagtgcagtaccgaaacttctccaagatggaggtagttttgcaataatgcacccggccacaaatttgtcgggtaagacacacttaaggagttcgagttccttagccatggtttgtatctcatgagcctgttcgactacagaacggttgtcagccatcttgtagtcatgaaactgctccatgatatacagatcattgctagcatcagtagcaccgaatttagtattcagtgcatcccacaactccttagcgtcggtcatatgcatatacacctcgaccagacgatcgccaagaacgctaagaatgcatcccacaaagagagtagtggcttcctcgaattgcttctgctgttcagcagtaagaactccttcaggtttgccagtactcacccagaagcatttcatagctgtcagccacagagtgaccctgatctgccatctcttaaaatgcacaccggtgaatttatccggcctcagtgcatcggcaaaaccagccatagtaaaatcacagtgcctataataaggtttttggattgttgagattatagacatataatgatttaatctattccataaataaatcatgacattacagatgaaaactagcatgaacgcatcattagatctacacatgtaaactacacagtataacatgaacagatcaaatatgcgcaacatattgaacacgtaccgaggtgacggaaagaccgactgcttggtcgaaacttttcgcagatgtctacgaaggcacgaaacacgcgagcgaagaggaagacgagccgttgtgaacgaacagggagcagtcgcgcgaagcgcttcccaaaaaccttattgccgccttctcccggtgcaggacgtcgaaggcagaggttccggagacctgctctcccgatcgccggtgcacgccggcgagcgggatggagtagtctacgagcgacggcgcagtacagagtaggaggcaaaccctagattgatttcgcgtatgttgcacgaagacggcaggtcggtttatatagagaagggtcgcttgatcagggcgcccgcacgatctctactgcgcgtaaccgaaccggataagtcgcgcgtaacttatccggactccacgccgtttgcacgcaccggatttttcggaacgtttccaaaacaaaaacgaatccgaatttgcagcaaaacaaaactgcaaaaggaggctgcatctgcgcaagggtgaggagccaatttttcggaccattcgacgcgtacgtcgtgcacgcgcgccgcctgccctgccaggcgaggcgagcgagcgcgcgcgtgtgtttctcctcttctctccaccacacatgcttcaagtgactaggagggcatcctcccttttaaggaggtccccctctcctagaataagcaaggtggtactaaactccacatgcatgccatcccatgaggtgggcttttgtgattttccaaagaattaatcttcgagtgggctaaggcccattcattaattccaacagtttgcaggtgacttgaggtcagccttggtcaatggtgaggaccgagactatgttcagggaggaatagaggtctagtgcggtcgggataccatgtgagaaggtgactagagtcaggattcttggaggtcaacttcggtcaacggtgaggatcgggactaaactcggggaggagttgaggtccagacggtcaaggatgccgggtgacgaagttggatacgagatggcgcatggtggatggacaccgtgtgggagagatcttcgcaaatcgcaacgggcttcacgaggtgtgcgtgcaagcgtcggtgttcgcgaaggaaattgagtgataatatttggaggtatatggtgctacagtacacgaggtactgtagcatgcaggttatatgtatgcatgtatggtgctgtacatgtgcagtttgctgattggttggctttgaggtttgcatgtatgcgttggctgtttggaaggcagcaggcagcatgcagcggctcggctcagccaggaagggagcgagaccaagcaggaaacggcaggcgtgcgcgcgagttggagtctgactcggttggacctggttcggcaggtgcggctgagagtttggatattgtaattgatttagaaattgagcatagagtcctagtgggactagaagttattctcctactttgagtaggaggtttttggtataaatagagagggagcgtgagactttcctgtatcgcttttcagagcgtggagttgatagtttagttagggtttcgagtttagtcaagatttttgtaaggagtgctgttgttgcactatgtaaacatagagagaagcaataaagttgtcatgtactttgagagttcttcgatttgtgtttttttgtttcaggcggcagggaggcgatctaaccggcagcgtgcaagcggtccgactggcggcgacaggactacgtcgagatttccatcgatttgagggtaacttttatttccgctaaaagtttttgggtttttggttttccctaccattcaccccctctggtaggcttggttacttgtgttcgatcctacatcgtcaatttcagagctaaatatagcatttgtgataaaaaatccgagtaaaaaaaactcataaggatttatcaactgcggaataaatactgactgacaagtttaaccaacctaagtaataacttgagcctgtatcagataaattaaacatacaaatgtttttagaaggaacaatagtcttaaaaaaccaatcgtccttatcaaaccctagcagccttgtgaccatatagaaaaagccagcaaaacaacatgacgtttttaactgtcaggcacctttttatacgtatcgtagtagttacaaagaatttactaactgcagaaaaagaatttaaatggtattgggctttacattttgtaggcaattt

SEQ ID NO: 13616 - DNA, 3540 bp, Oryza sativa
tgcgccgcaccgccgccggacaccgcgccgccccaccgccggacgttgcgccgccccgcgcgcgtagccgccgtgctggagaggtgaggggaggggaggagaggtgaggacaggccagccgtgggtgaggggaggatttgagacttagaaaaaaatcactcctatccaagtctatttatattcgagtctattttcgcaggcggaccacttaacgccgcttaagtggtccacctgcgaaaatagattttcgcaggcagacggtagatttcacctcgatttatatttttataggcggtcatttggctctaagggttatgtccgcctgcgaaaatgagacccccatgttgggaaaaatgctttttctagtagtgaaatatctaacatttggatccaggggatttctagagatcaaatgaaaaggatcaattatatgagcagcataggagggaattttcttttggtatcaatttttggtaccaagaaaaggaaacatattgatagaattttggcatgacttacaactctgcactcacaaaatgaaagttgcacagatagattttcatcaaactagtttttaatgctgagagaaaaaggggtgttacaacgaaggtgagaagttacattagagttgtataatatgtacttataatctgacgtccaagaatttgtaatggagttgactgtcgatgttttaaatttttaaaatacaattttgcattctattttaggaaaaagtatattttacatcttcagctattattgaagtccaaaaaatcacccatgtgttagcgatagcgctattatcgcatgtgataatatatgcatgtcgtgtattagagataagagagactttggataagaaacttcttgtactacaatgcatgtatcttctatctctctgtaagccatgttggaggctatttcgaaccaatacaaatacatatatgcgacctctgtatgaggtgagaacgcttccatattttctacagagaatatatggtatcagagcctcctcaccaaaactagatcgcatctagccatcgtaagtaactccagcgccgccgtcaatccattgtccaggcattctgcccctgagaagttgacccggggcaatttcctttccatggaaggcgcagatccttccaaacctccgtggcgcgcgtatggaaggttacatcaccggcacgactcgcgctctagctgccaagatcgaggtcacagagaaaaatggcaacaagacgacagtcaaggcgctgaatccggcgtatgacgcttgggtggctgcagaccaacatgtcatcggtttcatcctcgcatccctctccaaggaaatcctgatgcaggtcgctaccgtggagaaggcggcccatgtttggagatcaatctcatagatgctctcctcccagtcacgtgcgcgagctcgcaacacctgtctcgcactttccacaaccatgacagaatacattaacaagatgtccactgccggctaaccctgtgacgatgaagacatcatgtcctacatcctcgccggcctcgacgacgactatgaacccgtggtttcatcactggtaggcaagaccaagccagttcacatctttgtagtttactctcaacttttatgttttgagtacagggcaaaattgcgtcaatcggcagcaaaccaggtctactcctccgccaacagcactaaatgtggtggtgggagaggtggctacaacaacaacgacaacaacaactccaactgcggtggatgcgatggcaactccggtggtggctgtggagatcgtggccatggccgcggcaacggaggcgatcgctacaactccaaacctcatatggtgtgccaattgtgtggcaacactggccatttggctggcgattgctggtatagatttgatgatacttttgttctagatttagaggtaacaatggcagcctcatacaacgttgatcccaattggtatgtggacactagagccacggcatcaccggcgagttggagatgctaacaactcgggaaagtacaactctaaagatcaaacatatacagcaagtggtgcgagtatggagattaaacatatatagaattcagacacacacgcgtaatctttatctttgaaatattctacatgttacttaagccaaaaggaatctcatatatgtacattgataatcatgcttttattgaagtatactctcgtttctttgccattaaggatcaggcaatgaaaagtcttcttcttaggaggcaacgccgcaatggattgtatcatctaccgaaaatattgcttccttcatccaagcaagttctcggagttgttaagcctagtattttgcagtggcatagttgtttgggtcatccctctttatccaatgttcaaaaatttattagcaataactagtcgccaacccgtgcatttcacgggctatgattgacgtgacataaatattaaattttaaccatatatatataatatcttataaattgtaaatacttggtaaaaagttactttgcatcgatggctacatgctgatattaaattgaaagtataaaataggaccatatttcttaattaggaaattagaaactattaaattctggaaaggaactaaagagttggtagtaagtgtacggtactactacggagaagttgtcagcttacactggtaatactttgggggtaaatgatgcaactcagtataggagtatatttggagctttacagtacttaacattgactagaccagatatctcttttgcagtgaataaggtttgtcagtttctacatagtccaacagtacaacaccggatggcagtcgaggatattgagatatattaagtcatcagttaatctattttgagaattgataaatcttattttactttgttagtgctttttcagatgcagattgggcagttctgtagatgatatgcgatcagttggaggttttgctgtgtttcttgggtcaaatctgatatgatggagtgctagaaaacaagctattgtttccaagtcaagtacagaagttgaatataaagcagttgctaataccacaacagaggtaatatggatacagactcttcttaaagagatagggatttctatgcctcaaactataagtttgtggtgtgtgataatttgggagctacatatttgtcagtggatcccctttttcatgctagaacttatcatatagaagtagattattattttgtgagagaaagattttctaggaagcaattggaaattaagtttatatcttcaggagatcggatagcagatggttttactaagtcacttgctgttcaaccatttaagaattttgtatacaatcttaacttagataagttattattaaacgagaaagtcagcgatggcgctattatcacatgtgataacatatgcatgtgataatatatgcatgtggtgtattagtgataatatatgcatgtattctatctctttgtaagccaagttggaggctatttcagtaacataccgagcatttcacctaggaaaatttttgaggaaaatgaaa

SEQ ID NO: 13617 - DNA, 2230 bp, Oryza sativa
tcaatgggctccttccgatgtcactgaggaaactctcaaggagatggtggagcacggagtattaccatccaaggagatcatcgaatagcgtccagcatttggtgaggcctttccaatccccgatactcatgaaatcgtagtcttcacccatttcttctatggtggctttgctcttccaacctctaaattctttaggggtattcttgaattttatggaattaatatctaccatctcaaccccaactccattattcatatcgcaaactttgttcatctttgtgaagccttgctgggcgttcgggctcattgcgccttatttcgccgaatctttttcttgaaaccccagccaaataaaagcaagccttgcattgttggggtatctagctttcaacttcgtggcaccctatgccaaaaatacttcacccttcctttcaaaacctccaacaagggctggcatgctagctagttctatatccaaaacccagatccttccctgcccaaatactcatgcatccctcctaagtatcaagatatctggaactcactccctatgggcgatgaagcttctcaagctcttgaactgctgaaccggctgttgaagttgaaagaacagggtcttcaaggagagcagatcacttggcatttcataaagtgtcgactggctccaattaaagaaagatctctcgcacggccttcgagtatgatggggagaatgaccccaacctagaagaccctgactccctcgaattcaagatcatgaaggagaggatgtataaagtcttttcatccagtattgcggtcagcttttcacatctactgtcagtcgtgccatacaacgccttcaatcctcctccagcggtaaatatctaaatgtttaaatttccatcatgcttgctgcctttggaaataatctttaaatcattatctccaggaaaatgccttgatgaaatctgagccaccaactactgttgacgaccaaatttggtagatcatgcatcaaattcaaagctaagatcgaagcggattttgtggaaggtcgtttctcagaaacatagtatgcatcggctacgggaggcatcgactggcgcctgcatcggctgacgttggatcagacaaataatagccgatgcagccgatcttggtaaggtggttctagaatcatctttgggattgattgatgtgatgcagaagtattgccacgattgggataagcccacagacgggcaattgtatatattaattaagatattttgaatagtttccttagagatatttatcggcaagagtctgcctaaacgacttgttcgtatcttacgtttgtaacatatttggagtcatgtccggcaaggacacattatgtattttgggtataaatatgacccaagaccatgtaaacaataacgatggttctataacactttcggcacatcaccacctttttctattttcattgtttcgacgagttcttgctttcaagttgggctgcatcgggttcgatctccgacaagaggtaaaacttgtcatggcggcttgcgttctcgggattaatgcttacatctctatgaaactctaatcttgtttatgtaaatcatcgagttatcatatgtgcaatataatctttatcaatattgctatctaaccctaaatcgaccaacatctatcattaggaaacaaccgatagggttaaatgtcaacgttgatctagattatatagtatatttaccatctcatagaggtcttcatcaattttcttagatcttatgtttctctttatgcttaatgctgcatcggttgagttcgatctattaagtaatatcctgaactataatatctagcttgttttatgatcatcgataaagatagtatcggggtttcagccgatcttacctgatttagtcatctggttctctatatgtttacttgatttactaaatttgccctttatattaagatcttcttgcattaaaatatattaggttcactgtttgatatattttgtctgttttaatatcttaatatagagtggtatcggagtaatagccgatacatattagatttacttcatcggctatgctataaatatatataatctttatcttaaagtatttttaaacataagtgatttatactgtctcggctcactgtccgatctatctcggtcacttggtttaaggatatttttagaaatagattatatatcattgggacgtgactacacagctagtggtag

SEQ ID NO: 13618 - DNA, 819 bp, Oryza sativa
  unsure (1)..(819): unsure at all n locations
cctcatttctgcctctgtaatccgcatcaccctgtggaaaatgctctgcatgcctgttcagttcatcgatgttcagtaggtcgtcgatgcgagcgacaatgttggacgccagactctccagcacccttgaataactctccagtattgatttacccacatcctagaaatggttcaagacataataatgacaggtgcatcagtaactagcatggcaatgtggataaaacaaacataggaagattcagagagatactgcacaaaccctgttatactgaattttgctcatgtccaagcttgtctgcgtcagtccaggaaacctttgcttcaaacatatcagtaggccctctgctcgttcggcaagcagctccctcttctccgtgtctattatcatgtctttcaccatgccccaggatgatctgccactggtggcacggcctaagacacttgctggttttgcagcaatccttcggcgccacacatacactgatgcctcgacacggttggcgatttccagtgcttggtactccgttgacaggtccaggcagtcgagaaggcactcaggagagaaatgatcagacgttatgtaaaggtattatgtacttaactaactgatttagtagtaatgataaatgaagcaatagtaggcttcagtaataccaacatgctgtcttttattatgtcattactggtgcaatttcagattgttgtggtaaaaaactcatctgcctagtgaaaaacaagatgaaantgtgatttgctaaggngagtatgtaaangattctttggtgataaattagaattaatctataccagagtctt

SEQ ID NO: 13619 - DNA, 5630 bp, Oryza sativa
tttttggtaacacttggttgactacagccgctgcatatataagaaacagtaggaaatgtgtttttccggcacaaacataagaagactttgggaaacagtgtgcagcgaatagatatagcaccaattataagagtataagttctggcgatatttgattagaacgtgcatatcgtacagacaccacatactatttatacgaattcatttatcgttctgctagccactagggctcgcaagcctgtaagacgtagaagtaatgtcatttggtctaatggcttgcacaaaagaacacatcccctatttatattcccactgcaaaatacattgggcaaaatatgtgagcattagtcttgcttgatcagggacaggagtatacgccttggcatgccaggtgcaaaagaccgctttggtggggtgatattatatggagccctcaagtcctaaagggcaaaatgtaatgtacagtcagtttttctataacaaatgagcacacaggtaatatatagttggctaacaacgtttacttacattttgggggctgcgggggcagtttgtctacgaacagcgcacgcacaactgatgctttctgacaatcatgttcacgaggagatgaactacagatgcaatttgtttgagccatgagaaaactcaaagaaaaaaaataaggaacgtaaatatgaaactgtgcattgtcacttacccttcctgagcaagatcctcatcaattacagaagatttatgttttttgtctggttgtgccatagccaggacctgataaagcattagtggtcagttaggtttgataagggacagacatacatatttgctctaagtacagaatatagtgctagcctctgaagtaggcggtgttgtcccatgctgatcatcacggttatcagttgtggcctatgcataagcaatatttatataagaatttccaattgtttatatgcaagagagtacacattgctggagaatgaagctattagattatacctttggttctgaaagcaccagtggtgtagaaggtgttcatagattgaagagaagagccaattatcgtgtgcggttcaaattgcatcaagttggtgatgagcccatgttgagaagattgccccagaagcatcatggctgggcagagtacttgtgtgggctgcatctagtgaggcaagcataagagaatccacttggtaagatatccaatttctttgcaatgagccacgtgacacactagttctaatgacatattgttttccaaaaactgctttgatttctgatggaactatatctcgtgctccttggacagatgcaaccaggttaagaaaagggatgccaatcaactggtagccaatttctccaaagaaggtaaactcagctgttttggcgtcatggttcgtctaatgggtcgacacctatgatagccactctgtacctattatagaaggtagcagaagtaggtcttatgttctatagctcaaattgtagcatactgaatggtttattatgtaaaataattgagaagagctgaacgtgtgtaggtggtaagagtaccttgtttcaattgcattagtgatgcacctcgagcatttatatgtgttcccttctctacctgctcctctcttactggtgttgcatgctatgtaccaccaggcttcagcagggactaaatccttgatggctatcttgacaatatagctgttgccctagttcacatgcgagaaacagaagaagtaaaggatggcactgataacacatggatggaaattatgcaatgtaatcattaaatgtggggaggtacactatattaccaaggcttcgtggggattaaggtcacaaatatcaaaaacttttacatgcacagcttctttctgaccaaagttcggctctattgcccttaccacctgtgggttaccatggaggcttcaaatatgaaacaaattaatgttttggtttgtaggctagggaaatatggttgatccatataacagataaactaaggaagatataagttgaacaaagaagaagcatgtttatgtgaatggaaagagtgcagaaacagatacctgcttatgagagaaattgtttcctagattggtgcattgggataccacctacaaacagtgctaccttgtagggctagctggtctggcaagcatgaaagagtacattatttaagcaagaacaggcaaatatgtaaatgggagaggtgataatagggtaagaatttatttcttaccgtctcggaatttaacagttaatccaacaaacaatataacaacaggtccatggtctggttgctgctgtaagttttcagcgtggaactgtgtagcatgggcaccccacaatgcaacgacagcagtttcgctgtaggcacatagaagaatgaagaggtggaaaataatgtgcatgaattaagctagtattcacatttgcaaataagagagttgtgaaacaatgttgatattataaacaaaaaagaaggattgtacatgtgtaaaaagaaactgacaatgcatgtgcggacaattaagtcattttgtatctaatacaaaagcagctggaacaattagcggattaacgcatacataccttccattggttatgtggacattaagcaccgctttcataacacctccacaagaaacagtttgcactggtccaatggctgtcattatacctatagcatctacaggagtagtataagggataaaatttgcacatgagtaagtgagagcagtaagcagggaatggacaaagctaataaggaatgagatagattgatctggaccaaacagagtcacctgaaagaatatctttcctgtaagcacgacctctgagttcatcaaaagaaagaaccttgtaagcatgagatgggaatgtggatggtgcctcagtgtcttctctaacggttgtgtgggcagtgaattttgccatgaccatccgatcaataggcctgtactgggggcgcgcctcagcaacttcgaagtacttgatgtaatacacagcatcctccttcagcaaaggcttgaattgagaaacatgacgtcctgggatctgcgcatccatcatgtacccttgttgatgtttggatgtgtaagagacaaatagcatggaggtaaaataaggcatgaccatgtgcttattgctatacctgctcatcaagcaggactaaatcaagtcgcagaatcttgtcaggttcatttgctgtagtgaactgcgagaagcgcgtgacccgcactcggacttgccaatggtgtgattcctgtgtcacattccttagcatagtgtaatccatctgcaacacataaagaaggcattacataggttagagggaaactataataataataatactttgcatgatatgaagatataaagtcctaattgttgaaggaactgtggtgcaggatatatctttttctttttcgaggtgggaaatgtttcccaactgacagtgtttcaagcaggcatgtttaaaagcaactgattgcatccaagagaagaatttgcaaaaataagaaagaacaattaataagcagatatggaagacactgcaacaatcaactggtcaaataggaagaacacaagtatgaacaacaactcattgaagggtaaaaagaaagcagtaacaaatagcgaaaaccaaaaatatggatagtcattgtggatagaacactgtatgaccatgagttcttgcttaagttacacaagcaaacagtaacacggagaaatgggatcatagaagaaacaggtgaacaaaaggagcaaagtttcctagccgcagtcacagtgacaaactgacaataagattaatctatagcaacgataatatttcagtgtagacgatgttcctggtagtggaacaaggcttgccatcatcatcctctatcaacaacttgaggccttgcttcgatgtagcgcgcgaaacagcgacatatagctgaccatgtgtgaagacagggtttctgaggtatacaccaacattccccaaagtttgcccttggcatttgtttattgtcattgcataacatagcctaattgggaactgccttcgctggagcgtgaaaggccactttggactgttcccacttaggacaatccatggaatacagaccagctggccaatatttgtgccagtcatgattttggactcgaaaacataatcactgagtcggatgaccatcaatcttgtctcattgcaaaggccgagtgattggttaatgttgcgaagcaggactacagctgaaccaattttgagggatatgcgatgttcctggaaattgtttatggatattgagtttagaaattctatggggtacaatagatcaaaatctacaggcttttcaagtgtatttgaaatagtgtcgctgctaagatagtcctttgcatccccaggcactttagcaagcatattatcattaatctcatcaacaactgtattgacaggacagacaattgcacgctgagaaaggtaaggaatgcagtcatagttcgattcaaaatctgggtacacagcatcaattatagctgtaatctgtcaccgcagggagtaagcagcaactccttaggtatctctatccatgtcctctcaacctcaccttgtcttttgttcatgggagcacgaccctcaccaatgtcaagaacccatttagcaaactctgccaattcacccctggcttgctgcgacagggatggattatgtagcctcatgttagtggtaaggtgtaagacttcaacatgcttccatagtgcagacctaaccagcgaagcatctaccacatcagctcttgtacctttctcaatcaccggtaagacttgcctaaaatcaccaccaagtaaaatgggtttacctccaaaaggcttatattcattagctggttcatcagcggattgaatatctcgtagagttctatccaatgcctcaaagcacagcttgtgtgtcataggcgcctcatcccatataatcaatgatgctttcctaataagatctcctaggattgtccctctacgaatagcacacatcgaccgatcatgtatatctataggtatccgaaaccatgaatgagcaatccttccaccaggcatgagtagagctgcaaccccagaagaggcaactgcaagaacaatttcacctcttgatctcaggtttgccataatagcattccacaagaatgtcttccccgttccaccatgtccagatataaaaaaaaatacacttttcgtgatggtctatcctgtcaaaaatcttgtcatatatcatcttctggtcattgttcaagctggcatacatggacaaagattcttgatggaggctatgttggttaaagctaagatcttctaagataagcctgtttgctgcactggatcctgaacaatcaactggtgttggcaaattgtatgatgagattgataagccattatttgagaacatggcatccaactctttgagcaaggtatcctgcaacataacttctggaatagctgtgcgctgtactccaagagctttggttaacttgtaagcaaaatcatctaccatgtatctccagtacttatcaaacaaaaccctaacatcacctacatcacagtgtgctagtacagtcatgaaaaggttcctgagctggtatgaagta

SEQ ID NO: 13620 - DNA, 1696 bp, Oryza sativa
aaacaaaaccagggctcgcatcattgctctggaccagcctgatcggctaacgcaccatcggcttgtcgcacatcaaaaccttcctgctagcatacgggccttctgcggtgtcacgcatgatggatcgccatcccatggcggttgttatctctttgacatcctgtacaacttgttttaggtcacgaatgtaagccctaccgcctggtctgagtattcgatccatctccagcaagatacttgagatgttacatctggtaacaacagagatactacagttagacgcactgtttatccagaactcagtggtatctttagcagcatagtcaagaacgtagaaaggaatgagcatgaatactatttttgtatcttgcaatgtatcgataaagcatgagatcacctgttcagctatttttatagtcacattgttggggcacataagtgtggatatttctttaggcacacaggtgtttgggagaaaaataaacaggaacataactcgaatttaattatcaaaagaactgctaccttttctgttccttcgagaataggctaaacgcatggagcagatcatatgtccttggatatgtatcaaatggttcacacctgtcgataaggaaggcacaaaaatggcagcatgagcaatatttaaaggtaaaattttgtagatttagtttaataacaccaaatatctaatcaccactgcttagaaacaaacattgatatctaaataaacaagaaacacgtcaatgagaagcattataatcaaactgttgaccactggagttcaagttcgacaagaacacggggcaaggagaaagaagatgcaagtgaccactattcactagtatgctctattaagaacattacgggttgcagtacaatataattcaggaggaacatttataaattataaatagaaccaaaaccctaataagagagccacagaatataaaaatgcataccagtcatgagccactccaagaagtccccggtcatagattacaggcagtgtgtttggctcactaacaggaacaacattcatcacccagcaatcaagtttacgattaatcaatgcagctgcaaacctgcataaaaaattagcaagcaaaatgagatattgcgcaaaacagaatatatcacgcaccaaacagaaaataagtccaatttattttgtctttgtgagaacctctgtaacctagtatagtagtgtcagagcagaaggttactacggttgaaataactaagtggcatagaatctatgtacaataagtgtccaaagaaaacagatgacatattactaatatcaacttatcaacgacataagcagatttgtgatccactagacctccaagtcattgtatatattttatcaacatctgtacttaaaggcatggaaatcggatactaatcaatgtctgaggtaatttgaaatggaaagagaatggacagagtgaagaaaaggccttaaagaaagataaaataccctccaaatccagccctcatgtccaatacattccggagtttgaactttctccacttaaaaacacgaatataaccttcaacaatgtcatcccaaaatttggtttctgctttgaaaagctccttctttgatgagtgtgcatccatttcaacaccttcaagcctttttgagtggctccattaaacgtgcaggccatggaaagggagtcagcccatc

SEQ ID NO: 13621 - DNA, 3945 bp, Oryza sativa
tcaacgcctacgtccaggcgcgctcctgggcgctagacgccgccgctccccacagcaccgccaccgccaccgccacgcccgcggccgtcgcccgctgcctcgtcgggctagccctcttcgcgtgggggatgcggaccaacatcgcggcggacaaggcgctcctgaggctgaaggaggccgggaaagggtaccagattccccgcggcgggctgttcgacgtggtcacctgccccaactacttcggcgaggccgtggagtggctcggctacgcgctggtggcgtggacgccggcggcctgggccttcttcctctacacctgctccaacctcgggccgagggccagggatcaccgccggtggtacgtcggcaagttcggcgacaagtacccggcgtcgcgcaaggcgttcgtcccgtacatctactgattcctctgttattgctgatggatacgtatcggccagggagtgatgcgcattgtgcttcacctcgaaacagcttttgattcatactgttggcatgcgcatgtggttctgttggattggaataaaaatgagccgtatcgtggctgtttgtcccgcatctatgtctggttctaccaattattttgtatgagcaaagctgcaacggtatattatgctattttaacgacgactcaaacatttcgtgattagtttgctttgtatattactcgctccgttctaaaatataaaaatttttaaacctcggcacaatcttcgagatgctgcttggatcaataatatttatataagtaagatgttttaaagaaaaagagttacatattattatgatagtttgtttaataataaatctagtaacatcaattttatatgattgattttttttattttttattaatagttaaagtttaaaatgtttaacttgatactacgttaaaaatatttatattttaggatggatggagtatgctatactgatatttaaatagtctccggggccagcgaaaaattgtcaaaacgactacgtgaagcatgaatagatcgttgcttcagaccttcagtgctgtcgacctgtcgtaatctaacacagctttggtctaccgcaggccgcagctttcgtctttcactagcgagtagtgatagtgatattgccgaggggtcgacgagagatcagaggagtttcctcactcccacgggcggtggacttatcaacataaacagtaaagaccaactgttagcagcataaacagttgccaaatggcaaagtgcatttaggctatatttggataacttctataagatacagcttctttcagattctccgactcctcaaaacagtacgtacctgttcagattaatgttaaaatcaaccttaccaaaatttagcgatactaaatttttgataagttgatataattactaaattttggtaggatggaataaaatttaaaattttctacgcgcgttaccaatattttataacaaactaaatgcagctatatatttatcaattttattaaacaatggtatgatttaaaatgacaccaatctaaataggccctacatattctaagtcagaggctaggtttctcagatcttacctagattcttatattttgtagttataaaatctaaaaaataaacaagaagtagaagctagatactaagtagaagctagatactaactagttgtttctcaaaattttaagccccgttgaaagggtatgtaacctggtggttaaagtgacctgagtaacacgccaaggtcctgagtttaaatcgcgaattttaaattgggttatttaagggctaagtttcctatttgataggctaagttcctaatttaaaaaaggaatttcagattgggttatttgagggctaagtttcctatttgataggctaacttcctaatttaaaaatggctgcatagaatttcagattgggttatttgagggctaagatttctatttgataggctaagttcctattaaaaaaggttgcatctatttgataggctaaattcctaatttaaaaagggttaattagatacatccattaaaaattcaccggttttgaaatatactattactatttgcgtatttggaacgatgccattgatatttgtttataatttcagtggtgccactaagacacgtattttgcatgtattggacgaaaatgccatcatcttctacctctctcccttctctcatcttcaagctctctctccccgctgcttcaactccggcgccgtcaccgccgctgctgctgccgctgcggcgccgttgctgctcgacgccgctgctgctcgccgccgctccgcaatgctgccgccgccgcaccgccgttgccgctcaccgctgccgtcgctccgccgccgctgccgctcgccgctgctgccgttgttactcgccgccgctccgcacgctgccgccaccgctccgccgccgccgctcgccgcccgccgctgccgctcgccgctcgctccgacgctgccgctgctgccgctcgctccgccgccgcctgttctctgagctgtggaagaaaggagaggggagaaaaagaagcaaagaagggtaatttggtctaaatttttttcgtaaatggtagatagtggcatatcttgaatatgtgtaaaattgtaatggcatggttccaaatacacgaatactgatggtatatttcaaaactgataaatttttaatggtatgtatctaattaacccatttaaaaaaggctgcatatatccaacaaaaatacccttctttaaaaaaaattaagctccatctaaatgaagcttaagctattttgcaacaagcatgttttggtaacaaagaaagataaccaaaaatttgaatcgttttattttgtgacggaagattccatccagtacatctcacaagtaccttgttccagaccaaatacatatatattagcataaagcaaaagagggttgcgttttccagcgcacttcaaagtgccagcttcactcgttgctgggttctccgcgctccagcttacaacggaagcaagtgttattcaccgtggatcgttatctaatccttattattgcataatatagcgtccatcttgatgagcttcgtcttggtgcatctcgtatttaggagacagggctagcagtaatgccccatatttcctttgcatactgagcgatagtacggtcgctgctgaatttgccacttccagctgtgttcagtatagacatcttgatccattttttcttatccctgtcagagaaacaggatttaatcaaagcattcagtgcaagaacagatagcaataagagcgcaatgttcttgtgtttggttgtctcacataggttgtgcagaattacatactggttgagttgtcatattaattgattgctatttgctaaccatattacgggtcgtggataaggctgagccagagcagtaggccctcaacagaagaatgcaaactgatcacattttgattactatagcaaattcagagcactaagagtacattaaaatttcccatagcattaagacctgttggagcatggttatgtttgttcaagaatttgcaatgtatggagtaagtaaatgcaaatagcatgtttgttatccttacttgtaggcttcatcaacctgggcctgtgcatcaatatagcttgggaaatcatagccaacgaggaaataatcaccacgaccaaatccagaatttccttcaagagaatccaagaggggagcatagtcataggtgccaaaagcaccactccttataagctgcttggcttcttcaaaacgtgggtctggtttgaactgttggtaacgtaagcaaggttaatgataattcatccacttgtgagaaatatataccagatcaataagctaacaataccaacaaattcaatttagctatttgcaagtcaagctcatctaataatggttgtatatcacttatctactagaaaatatcttac

SEQ ID NO: 13622 - DNA, 3822 bp, Oryza sativa
tcgcagaagaattaataattatatatgcatgcatgcatgcacgcacttacttgtatctttgcatggcaagtagtgaagtacgtaacatgaaaaactgcaacctgccaagagaactcttgtcgacgtttacaaaaagccctctcacccaactatttcccacatgttgttaatttaaatgaacgtgcaactatggagtaaacagatgtagtcacatagtatttctgtaacttctcaagaagaaactatacatcaatatgcaatctccttcatcatcaccacatagtacttacattgttgcaacaaaaacctatgaacatattcctaactagcaaagttgtgactacaaaaaggaatcatgcaaatgctgatgtctaggataaatataaacccttcatattacctaaccatatagaaaggtttcaattaaaattatatgattttatctgcatttgagaacaatagtgtgggcaagttcctgtctcagacaaataaacattccttaccatcctcaacatgataacatattgaccactatgctataaatcatttattatttggaattccggaagccatctgagaatcttaaactagaatgtaccatcaacaacatgatacgtcaagcaaaccccccaaaattcgaacctacaagcctacagacaaccaaactcatttcgacaacaatctcactaacttcgaggttataggcctacaggcaaccaagttcatttcgacaacaatcttgctaaattcgaagcttacaggcctacaggcaacctaagttcatctcggcaacaatctcactaaccaggacgacagaagacaagcgaaaagaaataaataaaccccccacgagcgtggatggcggagggccatagacggggcaagccaacctggatgctgaagtctcctccaagggagacgttgtgggagccctcaccctcggcgaggaagtcccccgcggcggtggtggcggcgccggccgcgccctcggacatgacctggcgctcccgctggtcgaggtcgacggcgagcgcggagaggtcgaactcggagaagaagggcccctgcagggtggtgttcacgcagtgcacggcgcagagcttcccctcctgcacctcgtggtacagcagccccccgttgctcgccgccgccgcctcctccatccctctagaatcttctcgaaccctccggcgattcccccctcttctcttctaccctccctctacccctaccactgtgtagcgaggtagattcgaccaaccaaccgatccgatgggggaaaggttagagagagagttgagtgctgtacgggtcagtgcgcgacgcagattctcctgcggggaaaaaaaaaaccatcaaaaaggcgtcgccacgtcgaccgcgatcctctcaaccgtctaccacgtggaatttgcccccaaaaatgaaattgatatctcgatgcaccaaggctggtttagataaaataatttgaacaaaaacatcaaatcaaatgtttgacacatacattaaacattaaacgtgggaaaaaacaattacacagtttacagtttgcatgtaaattgcgagacaaatttttttagcctaattacgccataatttaataatatgatgctataataaatatttactaatgatggattaattagactcaataaattcgtttcgcagtttacaggcaaaatctataatttattttattattagtctacgtttaatacttcaaatctgtatctgtatactttaaaaactttacctctagacaaaaacacaccccaaacaaacaaagcctctatagtctatgctccatatgtatttgattcatgagtgaaatatgccaaggttagtatttcgatctatttagagtgcgacgtcaccgtgaaagaaaaggaaaaggcatcgggtgcgtggctccaccagatgtttacagctctctccacattggtagtccgtatactgtatgtaggacagtaggagtgtagtctatttcttcgctttcttttctttttctccctgagaagttgaaaaataatgtcgtgggcctagcccatagatgtccttcctctcaatataagtcgtgggccgtttcagtttggtgcgtgttgattgagctgtcattttgtttgtattaggcacatttccttgcaacagtagattgctatactataaatagatttaatttaagaaacagtagctatatgttttcgtgtacgaaattgctatttttctttcgacggattttttggggaaaatatttaagttttagactgttagatttactctgaaagatggaaaaaaaatcactaccactggtgaagaaaacgagcacaagctcatccctctaattgaggtacagtaacacaagcggatccaaggaccaccggaaaaaaaatcctaacctaatacatatatacacatatatttaaaaaattagaaaaagtaaaaaaaatactaactcccttattaatatattgttatgcatatttgatcaatttatacttatagctttgttatatttagggtatttctaaaaaagtataggttcgatcacccatataaaaatcccagatatgccactgtgcactaacacctatttctaatctcgagtccaagttgcacaatattgacataggagttacgatgcaagtaactccaatataattacactataattatatatttatatttgaaagtttttctcttaattttatgtggaaaattatatagctacaccaatgatgtgtttggataatgggaaatgagaggtaggattgagattgggaaatgaataaagggttaggattaaatggatgagggagaatgaatggttaagatttaaagaggggtggaaaatcatttccattagacatttgccaaacactgccttgtggtttattggttccagaagtctagcctggcaagcgtggcccatcgtactatatgggccagtttggcccaaacattagagagaacaaataaagatccaacaaatttctctgtgtctttgtcctggatgcctggtgcaacactctttctccaattggtggattgattcctctaatgaaaaataaactgaagtgggttgatgaatgatgataacctaaactatggacttgtgatgcagtgtgcgactgcgcactatccgtgtggtccgcggccgtcgccatcgagcatcggagcatggcgcattggcgcatctcatgcccccgcaccgaactcgaaagctcgaaaagtaggctacgctacataagatataaaatataagaatattttatcttttttacgactaaaatataataaatttgaagataaaatttcgcatgtagctacaatactattggaatatatgggtctaatttttttataattttatgacatttgctagcttgcgtgcacggattgtgtacgggaagcttatgtatataaaatatgttccttgtacacatataaatatataatataaataatagtgttataaaacttatatatactccctctattgttaaatatatgatgatgttgttgttttctgggtatgatgtttggctattcattctattcaataaattaatgtaagcatacaaaatatgattaaagtacttattaaataataagataaatcacaatggaataaaacatacataactataactgtttaaaaaagatgaataggtaaacgtcgtattcaaaagacaattgtggtttatatataaaattgaaggtacgtagctactgttgtttatttttcataaattcgatatgcttatatccccggccttcgtacgaccaataaacaataaaaagactaccacacatacattt

SEQ ID NO: 13623 - DNA, 5901 bp, Oryza sativa
tactccgatggcgtattctgaaagtagcacgaattgggtggcatatcctgaaagtagtgcgaattcgatcgcatattctgaaaattctcccgagcaggaggcccaaacacatacatccagcagataaaagacgaatggatgtttggcaaatttacttcccgaagttcgaattgctcgcgataacaagcaaagtcgtatatgagacaacccggtttccctcgcgtccttctcccgtcttggggtcttggcgttcgtgcgacagtgagtgaatgagtgtctgtatgcgcacgctgcgcctgcgcgcttggtcatcgagatttaaggcaatctatcgaacacctgacgtgccgtgatcgcgcaatcccagtatcccactacggcatcatcatagatactacaggtcgttcatgctcaaggtccccgccttctcccagcgctaggcttctgcgtcaccgtgctcgagaatcatggcgattcctcctcctccggcgaaacgaataacgagtgaccggtgacgctgatctgtagttgcgctctgcttcctactttcctagtcaggattgaatccagtcaaggaatgatcttcggcttaaggaaaatacggtcaagctctttcgttttcagtaaccaacctctttgtctagttactttgtacccggctatggtcaatgagaattcagtgccaaactgccaatcagaaaccaagctgttgggctgaaggattatgtttctcttttaaacatagcacaagaacgtatagataactgaaaacacaaccgaagcgcagaacattgcagtgctaagactgaagtatatagacagtcagacagagcagtaagacggatgtcaacatgtttaactctaggaagacaagtatacaaggcaaaattttgttgacaactgtacaatgagatcaaaacagtttattgttttccaagatcagttcttaatcttagatttatatgctttccatgcttgtccacatgcctgaatatttgctgacgcttgatttaagaacttggcaatgttttcttcatatttatccaccaatgcagggatggtgagagcaagaacaaggcctgggagatagaaagttcagcaaagtcagcattgatcagtaagatgatactaaagatcaatacatcacatttgttattgtgcctcctttaaaaatatatgatattctatactgattggaatggctccaccacaaatttcagaagagttccttgacttctcccaaatttttgtactaaattggctgcacataatgctactgttaactaggcagataacagagatcccctttgccaagtcaatgtccctatctttgagaccaacttttggaaatgaataattttcacctattaagtaatagctcacaaataatttcggactgttattaaatgtaattactcagggtggttttaactagacatgaatatgacacagaccaataaatttcaacataacatttatttctatatgttctgcatgatatttctacaggagtctttttgctgtaagtttcaagttttgacacaattctcagaaaactaatgaaagtgcatatcatcactgcattgcacattacatcctactataaagttcttaacaacaataggtgagtagtgataattagttagaattgagaaacagtaaaagaacttacatgcatataccaaagtaatgagatcagtcacacggccaactatggagatcagcagtaatactgaaaccatcttgtaaaagagactggagtcctttccgtgtgcaatgttttcaaaaccctgtagtgccttatgtaggatgttacccactgctgctgctgctttgctcattgagtcttcagatattttgatcagtggaacaggtggaggtggcctgcatcgaatttttgtatgcctttagagtcagcattcagcaactagaagtcatggattagatcctcctgcacttaaacgtggaattttcatatcgcttgtttccattgttcagttttgagcatcaatcaaagcatcagtcggagcagctgtagtttataattggatgggccgctttcgttctgatgcaatggcattagctatgatgaacatatcagggcattgatcgagcaagataatttgctgcattgctgctcactctcttccaatttatatcatccacattagtttttacaccatgatcatttatccaccgactaccagtacattcacactcacaagtattaaatgtcaaagcttaatcaatccaagggccaaggccaaacaaatgatatccactccttgtatcaatagcaagtgtaacaactaacaacaaaagcaagtcatctaagggctaagtcgaattcagcaatttgtacaataataatctgaactaaatcacactagtgcatcaacaatttggaggcaaataaatcacattactgcaaataaactgcaaacaaaaaaaatccacctgttgagcagccgcgcggccttggcccagacgaagaggacgacgagcacgatcatgagcacgctggacacgaaggagagcagcgtgtagccaggcaagcaatagaagaggacccaggacgccgccaccgccgccagcgaccagccggccacctccttcctcctccacagcaccacatccgccactgcggcgcccacaaaacccaccacatcacaaaacgcaaaatgcaaacgaagccgcgcaaccacagcccgcaggggaggcgatctacggcgggcgaactgaagaagataactgagcttagctcactggcgccgccgccgaggaggccgtgcagcgatctctgggcgccgagcagccggcaaccttggtcagaggcatccattgccttgctgggtggatgaatggatctctctgatcgggggagaccgatcgggagttcagctggtggaaaggggagaaaagcgcacggcaagaacagcggcgtgatgcagaagtggtatctgctgaatcccccgcatactccaactcctcgagctttagtttggaaattgctgggtgacgaagaaaaagaaaaagaaaagtatgaaaaaggccaaggagaaaaaggcgcaagcgtggggcaccgccacgccacgtcatcagcaccgtgtcctattgaactttggggggtctttccgttccctacttcccttggctgtggcgctacagcagcctagactgttggtgtagctgcagcaacaacacaccatcttataccataatctctgcgtttcaaaataaaccagttttaagatttaaaatttatctcaaaataaatcaacttctacctaactaccattggtccgcaaattaaaaatttttatctcttcaaaaccccttacttaactattcagtaatataactttcctatttattaggggcattttgatcctttatctctttccttgtatctaccttgtgaagctagagttggacattttgtgggacagagggagtagttgctataagtacgattgttcacatacaatactatgactaacgttttccagcgaaagcccatagcctttttcaactgatttgtagcgatacaatatatgacgttcaccatcagtgatcagttaagaattgtactagtatttacatagaagtagcatgcatagtattttcgtatatcaatctcaagttctcaccgaacaccgctaggatgacggaaattcctgcacagcagtattgttccttaaaagaaatgctgtttttatcgttatataattttttatcagcgtcagactgaagtaaccattagatagttaaattgataaatttagaaaagatcctaatcgtattacctagaaataacaattgctaaccttcatgaaactgaaatttggagcggatttctgttaaaagtgggaccttgaatttgtgcgaagatttatgtcggcctccttgtcttctatcttcagcgagccgcaactcagacgggacacagcggccttgatcagttagggtatagggtgtgaggtcgataggagagggggaaaagagggtttctcttccccgaggtatagagggatgaccatggatgatttaggactgacgatatatggtggacacgggtggaggggcgacgctaccggcaaagtcatggggatggaaaagggtggtgggcggctaaaaccgttcatgcctttaggtgcccacaggcgaggggggcccgctagcgagctcacccctttgctatgccggagagaagaggaacaggagagaggataaggtcactgtttatgcacgaatcttgatgcaatccttggctgaaatctattcggtcacatatcaaatagactattcctagaaattatgtggtatccgaccgtttgatgagacttcgattagaagaggcacaatcgaagtgtgctaaatacagtgaaaacttcctagtagatgaaaacattggaaagcaatctataaaatgtgcataggttttcaagaaattttctaagaaaaaatacacgtttgaaaattgaaataatgccacatcatttcccaagcggaacaccaacaccaggttaaacaaaacaaacctgattttgcttgtgaaggatgacattggccgataatgtctgtcttctccgttgatccttgtcatatctcacaaacgaggccatgttttgatccacaactacatatttctcaaacaaaaatgcattcatacttgcatgaaacatactaaacatgcctgagttttgagctgctactataccatactgcagacgataacagaaaagatacaacagattcaagatcatagttgctgcagctgtaaaaggaaaaggtgtatatgcgaaagttgagatggaaaagaacgagacaaagcctccattctagtctctatgcagtttaaacataatgctacaaaagtcaagtttttaagcagggcagttcagacgatttgtatacggcattcacagatcagaaagaagttcacaatagcatcactcccccagtcaaatggagagcagttgaaatgcatcccctctttttcttttttctttttgttgtctgtatattctaatacagttccatcccgaatcatgccgtcctaatcttcttttatagattcttttccctctaaagaggtagtgttctgcttcgggttactgcctgaagcagactcaatattatcgctgttaggctcgcttgtttcagacttgttagccccttgctcctccagattgccgtctttgctcatttcacctgatgttgattcaattgcaaaagcatcctgagacctgctttcttcgtgagctgcataattagcaaatggacccccagtgtccatcaggctagcagctatagcagcatttaagtcagcttcttcctgctgtgcagcaatcatatccatttcactcatttcctctgattgatcagcaactagagagacgcctgcctgctgagtaggtgtttggacctggttacaagaggaggttatcctccgggcatcatcaggagtcagccactgcccgaaaccattagagccttccgttgccatgggacactccttaggaaaattgcccctcactgcaaagatactccagcctgaccccttcagggtgtcgatgaaagctgataggtaaaactttgatagatgctcaggagcagggtacagactattgaagttgtaccactctccatttaccttcctaatgcagaaccagtggtcctgcagatggcaaatgaaagcagtttccagctcagggtcaaataggcatgaccccacatctggggagtcaagggggataacttgcagatcccaaacttcaagtgccttctgcagaacctatagagtaagatgaaaagcatagttgagtgtatgaacttgcagcgtagtcactggaaatgagttgtaacaatatattagcttgagtaactatgcgtaaaaga

SEQ ID NO: 13624 - DNA, 621 bp, Oryza sativa
gcccgtgctccgtagcacccgttcgtcgccggcctcgctcggcgtagctccgccatatccgacgctagcaacagactcccggagtcgcgtagatgctctagctcgcccgaatcggtctcccgtcgcgccgtcgccgtttcccccttctctcgccgccggttgccgttaccacaatccgccgccgtcgagcatcccccggcaaatccgagccgttggctcgtctcccctcatcccgtgcaaccttccggtgtgctcgctttcgcctgtatcgccgtggttcgccccgccgttcgcagccaccgtccgccgtccgttcaagccagcgtcttcttcaacctcccgccggtccgcgtggcaaccacataggcaagccaccctttgaacatcttgagcctatatttgaacttaagtatgttgcttgaaaaatattatgcattgataggattgcacttaatctacatgtcccgtctgcaaggcagattggcggacctacctaacttgttgcagttgacccctccatggtaattattataccatgttcccttgtaaccacctagttacgcctcggtaatcgtgcactctgcacgaatatcgacggtcgccttcaaacttaaaatctga

SEQ ID NO: 13625 - DNA, 1077 bp, Oryza sativa
  unsure (1)..(1077): unsure at all n locations
tgtgaaagctggtttttttggggccttaaaagccagttttaaccatataattttggacatgagattggatagttttaagccagccttttaaaggcttaaggctttgatgtgattggatgaaatttcatgtaagttgttgatagtttcccagttttccggctcctaggtgtgcatattggacttttcttcttactaggaccttagcaagtacaagccaagcttcttcancggattttataccatggcactttaaagcaagcatcactgacaatgagcggtgtggtgttactcggtagaatgctcgcaaggtcggctagaaattggtcatgagctttctttgaacattgctctgaaagcgggaacgctttctcataaagagtaacagaacgaccgtgtagtgcgactgaagctggcaataccataagtcgtttttgctcacgaatatcagaccagtcaacaagtacaatgggcatcgtattgcccgaacagataaagctagcatgccaacggtatacagcgagtcgctctttgtggaggtgacgattacctaacaatcggtcgattcgtttgatgttatgttttgttctcgctttggttggcaggttacggccaagttcggtaagagtgagagttttacagtcaagtaatgcgtggcaagccaacgttaagctgttgagtcgttttaagtgtaattcggggcagaattggtaaagagagtcgtgtaaaatatcgagttcgcacatcttgttgtctgattattgatttttcgcgaaaccatttgatcatatgacaagatgtgtatccaccttaacttaatgatttttaccaaaatcattaggggattcatcagnnnnnnnnnnnnnnnnnnnnnnnnnnnnnnnnnnnnnnnnnnnnnnnnnnnnnnnnnnagatgacttcatcacttccataccatttatgtgcagttattataaggctggaaatgaaaaatttgttttttttttctcagtccttacattccttgagcannnnnnnnnnnnnnnnnnnnnnnnnnnnnnnnnnnnnnnnnnnnnngcntagtcattcacaaanncaagc

SEQ ID NO: 13626 - DNA, 847 bp, Oryza sativa
  unsure (1)..(847): unsure at all n locations
ttgcgctgncgganggaattcgacagtcgcttgcancgnccgnntaanggttgagattactccaagatctgtgctaccctttataattctaatccttactttttttcacttcttccgaccaaccacatgggtgtcgttgccttctacatctttcgccccctaacttattccttctttttccctagctagatacatagtagctcgtctacttccactaccccctccatccaaaaaaaaccatcctaagtactgagagatcccctcataatttccccaaagcgtaaccatgtgtgaataaattttgagctagtagggttgcagccacgagtaagtcttcccttgttattgtgtagccagaatgccgcaaaacttccatgcctaagcgaactgttgagagtacgtttcgatttctgactgtgttagcctggaagtgcttgtcccaaccttgtttctgagcatgaacgcccgcaagccaacatgttagttgaagcatcagggcgattagcagcatgatatcaaaacgctctgagctgctcgttcggctatggcgtaggcctagtccgtaggcaggacttttcaagtctcggaaggtttcttcaatctgcattcgcttcgaatagatattaacaagttgtttgggtgttcgaatttcaacaggtaagttagttgctagaatccatggctcctttgccgacgctgagtagattttaggtgacgggtggtgacaatgagtccgtgtcgagcgctgattttttcggcctttagagcgagatttatacaatagaatttggcatgagattggattgcttttagtcagcctcttatagcctaaagtctttgagtgact

SEQ ID NO: 13627 - DNA, 786 bp, Oryza sativa
tacatttggcggtaattaagtaaatgaagcggtatactgtatgtagcttctactccctccgtcccaaaatataagggattttggacggttgggacactttctagtacaatgaatctggacatgagtgtccagattcattgtactagaaagtggattttgggatgaggccacccttatgtggggatcctctccccctatttcttctataacattcttctttttttaaagagtctcagaagaacgggctaacaacattgctgatatttgcagacctgtcattcgtggccgaccaagctcaaaaagatcaattcatatttgcggccggcctcgatgggtttttgttgtattatttcctgccgggtaagataaagcgctggcctccatacatactattctagaccatagttttttttttataaaaaaaacaactaaataaataatgaactcaacatataatttattttatttttgcagtaagctgcttcctctggatgacctcatgtattcaccttacggctctgcgggcactaatggttggtctgcttggtgaggccaaacttgaggtttaaaattttcaaattgtgcatgtgtgcctaatatataagtttgtgccttgcaacaacctttgtttacgccagttttaaaacacctaatctgaaaacaccccctgacacatttagggagggaatttgaacatcatcgctgaattattgcgaggtttaaaacccccttttttgcctaccccatgtgagttgcctgcaaactttatcggaatttttggatata

SEQ ID NO: 13628 - DNA, 659 bp, Oryza sativa
ctgcaaattacaagtacaaggaaaattactttttctcatctggagttgacaaaaatttaaataaatgtaattcagtgctggagaaaaaaaaaatcatatgatcatctaaacagatgcagaaaaagcatttgacacaagtcaacattcttataaaaactttcaacaaattaggtatagcaggaatacttctcaatataataaaggttatatatgacaagaccacagcttacatcatacccaatgatgaaaagctgaaggctctttcctctaagaccagaaacaagacagggatgctcactctcaccactgctattcatcttagtgctggaggtcccagccggagcaattagacaagaaaaagaaaatgcattcaaattggaaaggaagttatgaaactgtctctgttttcacatgacatatatcttatatacagaaaattctaaagactctaaaaagactgttaaaactaacaaatgaattccgtaaagttgcaggatacaaaatcaacatgcaaaaatcagttgtttttctacacactaacaaggaactatccaaaaaagaaatttagaaaaccatactatttacaatagcatcaaaaataataaaatacttcggaatagatttaacaaaagaagtgaaacatttgtacactgagaact

SEQ ID NO: 13629 - DNA, 584 bp, Oryza sativa
cataatttcttgaatgtttcagaaatacaggctcagtaagaatctccaaggtcaagctaatgttgggacaacaaagaatggtaaaaacaagtttaatttccattgttaccactacaatagccacatagcaactcatggatgatgacaatttgcagcccttggatgtacaggtgttgctgataggattcctggaacaagtgcattagcgatggccagtgcaagcgccattccacaggcagagaagtaagaaatttcccatgtactttataattgtaatccatctgaatagtgaagtaatagtcccttttattgggtgcaagaactattcaaatcggtgaagcactacagatgcaaattgaggtgcagaggcagctaaatgaacaacttgaggtgaggtactgaccctgtttgcataataagatcttaacccacgataggcccataaaacataaaaagtgacagataaaaagaataagaataattctccattatctcattaaataacgtgcttgtagtgatggtaagtccatgaggctatcaaccagggcttaagccttggatgaaaaaacaataataataatttg

SEQ ID NO: 13630 - DNA, 10838 bp, Oryza sativa
gtttggctccaccaccaccagatccggccgccatggcatcggtgccgccgttgccgtcgccgtcccacaacagacaatgacatccttcccgccggcgccgagcgtcgccggatgcctccccgccagatccggcgcagatctggtggcctcgtcctccgcagcgcctctaaacttcgtcaccaccctcgccaaacgccactgctcgaacacactaccacgccgccggctacctccccgccagatccggccagtcggcgcggatctgggcggtttccgcctcccgatgctaggcagtcccccctgcccttgtgcagtgagacggagcgaagctccgccgccaccatccttgtggccgcgtggctttgcccgtggccgctcgggcagcgtcgagatggaggaggagggagggagctgtgggcgataacgagctgggcgcctcccgtgtcacccgcagtttatatctcaaatagtaatgtttaagcaacaataaaacatcttacaaatgaaacaaataatcacacttaattgtaccaacaattggtctcattatcttttacacacatttgattttggacacatcgaattcattagagggcaaaatagtaacaaaaggcagttaaataactaatctaaacaacacgaacattaacaccatcaacgaataataccggagagtccccgcaaaaaaaaaataccggagagaaaaaaattctctggtctctggtcaaaaatggcgagagatgcttgtatcagcacgagaaaattattgcacgagatcaaagataaaaggagaggtaggtgtcctgtttttaattgttttgctaatgataatgacgatacagaagatggattaagaccttaattaccatgtacagggcataattgtgtgttcatactgattgaggccgacatgaacggctacgggcaccaaccaacgtgccgtctcaatcgcatcattttccactgccgatttgggatttgttttttgcgtgataacaaatctagcaaggagatgcctaaccttgcaaaaaagacagaaaataatcagctctgaaagtgttatctgatttactacataataacaatataaaattaacggtctcgttgcaaggaccacttgttgatttctttgtcaatattaggaatactagcatattgcccgttacaaagggattttaattaaataaatttattattaacatgttattatcatctcgtaatcattgtacatgtgaaccttattaaatctatatttttttccttcccaccaaagtaagagttggtgagagtagttgatatatgagcactctaaccctacatgtctttttttttttgttaaaagatgggagttggcattggggtggtggcaccactactcccttttacaaggactcaaggatagatagtaatgggatgataaaaatactggtatgagataaatacatgtgaaaaacatagaaacaatggagaaacttgtttaaaacgtataagaaaaacatagtattagaaatatgtttttttttcactaagatacttaaccatatcataatgtaatcttgtgatacctacttgaaaaataaaaaactatccgcttgtgaaattacttattttattatacataggtactatatatatatatatatatatatatatatatatatatagatagatagatgtgttgtcggtaggcaccaccatacaccgatggattggataggatatcaacgtttttctttttcaagttagataggagtccttaaccggttcacgttctctatcgtaatggtattatcattacatctattataatgatttttcgttatatagatattatattagtagatcctcacctgtacttaaccatatcagaatgtgaatcttgtggtggtctacttgattttgttttatttttaaaaaaatctaacccaagtggtgcattacactgtagtcctcaggattgaaatggacatgacggcataagacggtacgacctgcttgcgacaggatcgtcttaactttcacctgcaatcttcagttaaaaccgtgacaaaacacatgtctcacctacactctcatgccttctcaaaaatcacaacctacttgtactactaactacttctacttaaccatcaaactgcaaaacctgttgcagaattgaggaaatttcagagcagagagcccacagttttttcgttttcgccctgcaaatgctcatcagaatctgccaagaaacggccacctgacgcagacttttctctgaacctctagtgtgccgacaactgatcactgttcctgctgctgattagtaggaccaaacctagctaatgcatcacagctagtatgtgtgtgttaagcagtagcagtaatctacagttaggctaatctaatcttaatgatcaagacacgcatgagtgagtaacaaaaaatgcattgccttggcgtcactcaccttacaaatttgggaagctttgtgggggcgtgtcaatgtcggcacagttttgtgagctgcgtgaaacaggcagtactgttatattcagaattctgaggaagagattcggatttcagatttcatgtgggtactttcttcatcccagaatgtaaactttcttcatcccagaatgtaaaattaaattaaaaggtattataaatagtcgagataagttgataagtatagaagttgttatattatgtgataaattttaaatggtacaagttgctatattctttcgaaaaaagtactccctccgtcccaaaaaaagacaaaccctgatttccgtgcccaacgtttgaccgtccgtcttatttaaaaaaattatgaaaaaaattaaaaagacaagtcacgcacaaagtattaattatgttttatcatctaacaacaataaaaatacgaattataaaaaatttcatataagaagtacagtcaaaattggatacggaaatctaggatttgctttttttttttttttgaacggagagagtatattctacttactgttggtacttcacacctcttgtttgtgtcaccatgtgacttgtgtcactgagctgagctcatcttgtgcatgtttccaggtttggtgcctgcaaatatgcagtgcaattatgcaggtttcaattcttgccatgcagagagatgagtagcaaagatggggctttctgggtcctggatggatgactgaagatttcactgttgctgtgaaagtctggtgatcagacatgagggatcatattgatatttttacatggggatggctaccataccacagtagggcctgtgtcaggagtggtacatgatgtgtgcaggctttgttctggggtgtgggccctgtggttggggtagatatttgtgagcatttgtggctgacagtgagggcccaccatggggatggttgttgtgtgcatttgctgtgtcattgatgtaagtcatttgcctgatattgcaagttaaaaagaacagctgtcttttaccatgagctttgaatgtgaaatatcgtaccccctatgtaaaaaagaaaaaaaaacaatcctacttaccaacctagacatatttatgttcagattcgtagctagggtttatttttttagagtagtacaacttatatactcgcatggattgtttaagttattgggttttagaggtaaaacgaggagatgatttctggatatttggtggagttgtgagtatatgtctcatccactatgttcgaatttgagtgcccatactgaatatttggtttcctagccttaataaagaattgtttgcatgtcttaaatgtgaaagataagatgaaggaacgtattacacatgaaagttacagaacatataaaaatttattaatcaaatgggatgtttgggactcgatgttttggataatttaatagagtctctaatatatatgcctctttattttcttttataacaatatatttgtaaaaactatagctaaatgaaagtgttcttcatgataaatcttctaatattatttttcacgtatttgatcataatattatttttctattaatgacaagattttaagatttaactgcatggcattacctactctttttatctaaaaaaatcaagtatgaatctaaatatagtggacgaagagcaagggcggagctacataggagaaggggtgcccagaaatccggtcaagaatttttttttaagctatagttcatatatttttgtcatatatgtacctctcaatccaaactcaaacattcgtatcagcctaaatctatctaaagtatagtaaagtaagtgagtggtacctttctttattttgttttagctccgtccctgacgcagaaagtatttgagattgttggtaaagtaggcattatatacaaggacaccatgattcacatgacacaccgattagtcattagagagagacatgagcagactgctgccacgtgctatcatcatcctctctgctctacccagtgggtatgtttcttggaccaaggtggcagcatgtgtgttttttgcttaagattctcgttagcaatgtccttaagcaatttgtacattttggccagagacatctcagagatgtgatggtttatgtgttttgtgtcagttcctgaatactgacattgagccttgactgacccagtcttatctaattcctggcacagcgatccctacttaactggcaattatacagataatttgatgccttttggtttcccaaaaaactttgaaaaaacagtagaatatgacggttttcatggttctattcttaaaatataaaatgtattctctttcacttgcaataaagaaaattgaactagtagatcaagggatacataaatcctctccaatccctggagagctcacatattcaaacgaccttttactaattataaaggcgagattatgaggaccatcaacattcatatgaattcataaaatgtataactaatcacgcatacatgatggatccaatcatccattcgtgttcagtttcgttcgtttcttcgtaggtatggacaagccttgacgtcgaccctgtcctaacacaagcacacatctggacatcctgatgactgatcactcacatggcatgtggttgatggaaggaaaaaaaaacaaaactttgttcttatcggatactagtacgtagagaattaggtgcaaattggccacaattttcttcaatgagataataataggaaaaaaaaacttggttctattctatggaagaactatcctgaagacattgcatttgaggtcgagaagatagtaaagcattctcttacctacaggggaacacaccgttatcataggctatgtcttaacctgtattttaggcaaaacacacaacaaattattattattgttttttcatccaaggcttaagccctggttgatagcctcatggacttaccatcactacaagcacgttctctaatgagataatggagaattattcttattctttttatctgtcactttttatgttttccatattctctgatatgcaaattcggcatttccatcttatgattacatcaagatatttcagtaaaactaaaatgtaatgaaagtttcagcgacaaatctaatgaaataattttcatacaaccaaccatgtagcttttaagcatattaatattcaaagtttgccggcataaattgttgaacaaccacataactcttatcatcctaattaaaaggatttttatctcaaaaaaagattaaagggattttgacaacatatttgtggaaatccaatatttcttccctttttgagaggagaagccaatgtcagtagcaggtaccctcatgtgtccaattaaagtgtatacttaagctctaataaattggttgatgcgtataactcaatgatttcgactgaacatcacataccttatgggctcttgtgaagtcagatttgtggtagcgattggaccaggagatgatcaatctcaaacagtgatcagcgtattatcatagcaattatttttctccattttgtttcatgatcattcagtcagttaggtcacttttgtaccaagttgcttgtagagaaatcaaggatgtctttgggaagatgtggcatcaacgacctgataagacgtgagaagacacacattttatggacggcgagcttctgatcaaagaaagttcagaagaatctgatcattcagaagaattcttttggacttagcacatttcacaagctacaaaatgcaaccatatctgcaactctgcaagcatgattgtgggggactttgttctgtttctccttgaattgtgtgacccaaagaggggaagatttgatgccattgaagcaagtgtagtgtagtgtacagagtacagtatactgtagcagctcacatggaaggctagtgtctttgttgataccatgctatgcttccagctgaggagaagaatcttggcacaggacaattgattctcaagtcccaactttctcttattgtagctggtcacagttccaggactgacttcagagttctagattgcgacagagttggaagaacgatatactccctccgttcctaaatataagcgtttctggctatgcacctgaaacaatacggcagatatgtgcaggtgtatagtcaggaatacttatatttgggaatggagagagtacaaacaaggagaaatcaagtgctggaattcacatttgtcacaactgttcaatattctaacctcttggatggaaatggaatatgcctttcatacttacttacactgaagatttatgttcaaaagaatgatatgtgcagtaatagtgtaatatatcatccagttacatacacaacaacaatgcatagcaaaaccttgtgttctgaactatgcaaattgatctgaagaatgcaaatctttcatcacatgaaaacaagaataaagaaaacgtttacatcacaagcaaaaggctatacaagctcggatgaggctcctctgttctttcatgacaaactcttcgctgtcccaaactgacaaaggcttcagtacgtctgctatgcacactttagtgcagttcatcttcgctaaaacatcaacattcttggcaatggcatcagagagattttcgaatgcttcggggaggtatcacggattcgtcaaaatgggcatagaggtacatgattctgttgtggccccattagtgatagcattcagagttccattgttcaagaaatttatcccatctgatcatgtgcctccaacacatataatatcacttcccattgtaggtattgtaggtagctctggtgattcatactctctactagagtcattttttatgttgttacttatgtcctcttgatcagcaactgaagaaatgatatcagattcagtaactgtactcaatgtagacgcacttttgtcactgaattgtctctggaaatcacttgcacttggctcatcaatgtccattgcttcgatgataaaaggtggcttaaatcttgagggacgtctcccctggctgccaatgctgaagctttcatgccttgtgaagaacatgtcctggtggggtattgcgacatgttcatgtagatcactttcatctgattgctcaaaaggatgatcaaacggattcctccatgtatgcagaacggatggagctgagccaggaaattctgtctcatcagaacaagaaagaatatcagatgggtttctcttgcaaaccttatcattatcgatgtctaagttactgtcaggatcaaatactatgttcttccttgatcttctcttaaccatcaagatctctaacctacgatgcctttccacctcagagtacccaagatccatgacattcttatcatcatctacggttccaagaaatgcaggatcagtgctgacattcttgtcatcgtttttgttggccttgctcttgtcagattcataattattatctctcacagttctagaatcctgaagggacatgtggttgtccgagtcatcattttggatgggatcaggatggggggaatcagcactggaaagagggtcaatctcgtccaggacagaagcaatgcgtgttctaggagtaccaggagtggtaccctctgtctgatcatgatcaaaacctggtgaaccatcatggcagccaactctaccaaatggtgaatccaaagatgagtctaatggactgtccacagcagcattgataggctctaccttaatatcagaaagcttcttcctgcgacgaacagaaaaggcacggccccatttacaggtaccagccggtttatcttctgaatctactttcatctcatcactctgtgaatctgttgatcctctatcatgacttatcttgcccaccatctcaacaacttcgatagcatcttctctggaagaattcaagccatctttgatttcaccgtcatttaagctcgccgtgttctcttttgccgaaaatcccttgtttgcttccaaatggatattcctggacaaatctgcatacttgggatccgaaacctcggcgacagatttccgttcttccttgatctcagcaacgtttgtgctgccatggcttatcagcacaccaaggataagagcggcacatatgattacaggagagtgggacagaaggaaagcgaagaaacccggcgaagatctgaatagcaggtagagcagcaggaccgggaagaggagaacccagttttcagaagcatatctgtagctcatcctgattgaacacctcaagatcgtccttatacatggcgtaccatgatctgcctcgacacccatggccttgtcctctatcaacttgacagcacaaatctagcaaagaaacaaacgaaaaaggcaatagttcagccaaaataaggatctactagcaatgaatgaagcaaagagagaaaatgttccgtccataattctgaaactctcatgctaaataattccatgctatatatactacagaattacaagagatcaattcaggtagtgcagtagtggtaagcaatagctgaaatcgaaaactttaagaacaaagatgcaatccgtataatcttaaatctcctagaaccaaaaagcgagttcagcagcagcatcctgatcatcaccatctctgctacgacattacaactgcgactgatcgatggcgcacgaaagaaagattgtttaccttcaggcggcagccggcgatccgacggtgagatcttggtccctgaggcttctttccttcagcgcgccgggaagcaatcgacaatggcggccgtcgtcgtagaaagaacaaaaacaaaggtcgcagcaaggagagagagagagcacgaggagaccagctcaagaaagcgagacaagaaagaggcaggcaagcagcacggtggtgggggcaggtggtgggtgggcccggctggtcagcgtcggctggcactgtaccaacaccgtgacgtcgtcttcgccctcgtcgtcgtcggtccggctggacgccgtggcggtggcacgtgtgcgcacgccggcggtgggcccgccgccggttcacgcgaggccaggtttggcgcggcgcgggagcgttttcccgcgtgttttggtctctcttcgtgtgggtggggtggggtgggtgagatctggattccgtttgctttctttctgaattctgatctctagctctctctctctctctctctttctttctgtggccttttttttttgggggtgaggatggatcatggacggtgccgaaaaggctctctttttagcggctattaattctgtggttctccgtcaatgcagtgctgctcatgatgatgttaacagacgaaagggatctgtgtttagtaacaccgaaaattgtgccttttcttttcttaggagggaggacaatgagatcatgtttattttgattgttcacatttcacatgataatctctactattatttttttaccggtattttggtgcgtcatccgtgtttaggtcggttttttaaatctgttcgcttttagaaatacatatccgtatttaagtcagattttaagttcgtttacttttgaaaatacaaaatgagtcgtataagaaatctctttaaaaaaacttgcatgctaacttgagataaaagtcagactcctaactacatcttatgattttctaaactaaaatatccaagcgaatttccacggtgaatttcaccctagctaaaccggataagaattacaagattaaaataatcttcacccattgcaacacgctttttttggtttctttggaataatgggcatgtggtgaaccagtcatgagtaaatgtgcttgggacaaagtctcaaaggggataattcaatccatttgtcccagacagcacatttggttggggaaagacgaatctttatataatatggagtactccagatctgattagctaagggtgctaccatgaagaaacttaaaaagtgtgtgcttctagaggctcataccacatatgtaaatatcatttcattcattttcatctagcaaaaaaacacccaatgcacctctttcctgtgcatacaaaaactcggcacaccgaaagaaggcaagaatcacaataaaagaacacaaagaaaccctatttttacatgtgtatgaacaccatctctacatcgcaaagactccaagaatacagttaccgcagaatagatcaactgtatacatactcatccgattgtatgatcctaataagctcttgcagattatcaaatacgcgccttccagagctctcagctccaatgtagttcaaaagctgctctgtatcctaaccacccagcaaggaaatgatcataataacgatcttagtttatggggaaaatagattaaacaaacattacaacaaataagcagccagaataaaacattaagggggaaaacataccttg

SEQ ID NO: 13631 - DNA, 691 bp, Oryza sativa
tcatgtaagtggctgataggtttccagttttccgctctagggctgcatattgtacttttcctcttactcgacttaaccagtaccaacccagcttctcaacggatttataccatggcactttaaagccagcatcactgacaatgagcggtgtggtgttactcggtagaatgctcgcaaggtcggctagaaattggtcatgagctttctttgaacattgctctgaaagcgggaacgctttctcataaagagtaacagaacgaccgtgtagtgcgactgaagctcgcaataccataagccgtttttgctcacggatatcagaccagtcaacaagtacaatgggcatcgtattgcccgaacagataaagctagcatgccaacggtatacagcgagtcgctctttgtggaggtgacgattacctaacaatcggtcgattcgtttgatgttatgttttgttctcgctttggttggcaggttacggccaagttcggtaagagtgagagttttacagtcaagtaaggcgtggcaagccaacgttaagctgttgagtcgttttaagtgtaattcggggcagaattggtaaagagagtcgtgtaaaatatcgagttcgcacattttgttgtctgattatcgatttttggcgaaaccatttgatcatatgacaagatgtgtatctaccttaacttaatgatt

SEQ ID NO: 13632 - DNA, 503 bp, Oryza sativa
ttgttttcccatctgttaagaagttgagacaagcaattactgagtacagtgtaaggaatagggttgagatcaagatgcctagaaatgataggaggaggataagagctcattgtgaagaaggttgcccatggaatctttatacttcagaagacagtagagctaaagcttttgtggtgaagacttatgatgagagacatacctgtcaaaaagagtggattctcaaaaggtgcacatccaaatggttggctggaaagtatatagaagcatttagggctgatgagaaaatgagcctaactagttttgcaaagacagtgcagctgcagtggaacttgacaccatctaggagcaaattagctagagctagaaggattgcaatgaagaccatacatggagatgaggttgagcagtacaagcttttgtgggattatggcaaagaattgaggagaagcaatcctgggacttctttcttcctgaagcttgatggtagccttttcagccaatgt

SEQ ID NO: 13633 - DNA, 544 bp, Oryza sativa
atattcctcgtctttatacctcggagacgcgtgcactcgtgttttactcaggaacgatggagaggatccaaagggaagaggattcgcgcggggtggattcggactgcagggcagcgccaacttctgacggccgccacgacttcatgcgaactccgatttgggcgtgcaagtacttcatggaaagcttatcaagtctattttcaaatggatccagccacatgtccatatcttagccaagattctccaggtgttcagccatggctttgttcatgggaggaggtccgcatctcaatatctgaaaggagcaaccatacattgtcacacagatgtcctgcttggtagatggaatacacttcaactattctcttagcaattgtcggttccaagttccagaaggcacgctaccacagaagacatcacaatgtgacacctacctgaatgtcagcagcaggtgccgggcaatgggtttggatcatttccattgacacaaacccaacaccaccattccagatttctggaggctgctcatgaaaacaaagctgat

SEQ ID NO: 13634 - DNA, 528 bp, Oryza sativa
  unsure (1)..(528): unsure at all n locations
acgtcttgtttgcgaactcatnactatgggcgaattcgagctcggtacccggcccgtccaagaccacacgaatcggtggtcttctggacgacaaataggaagacgcgctcgtctccttcctgcgggcaaacgccgacgtcttcgcctggagaccggcggacatgcccggggtccccagggaggtgattgagcaccgtctcgccgtgcggccgggcgcaaggccggtccggcagaaagtgcggcggcaggccccggaacgtcaagccttcatccgcgaggaggtggcgcgacttctggaggccggattcatccgtgagaggtcatccatccggagtggctggcgaacccggtcgtcgttcccaaggcgaacggcaagcttcggatgtgcatcgactacaccgaccttaacaaggcatgtcctaaggacccttaccccctgccacgcatagatcagattgtcgactccaccgcggggtgcgaccttttgtgttttctagatgcatactctggttatcatcagagtcgcat

SEQ ID NO: 13635 - DNA, 525 bp, Oryza sativa
  unsure (1)..(525): unsure at all n locations
gcggctttgatttgcctgctatanaaacncaagccgcacgccggcaggtcgactctagaggatcccccaattttctgttttttaggatatccatgctgaagctgtcaagaagaggcgccgcaccaccaagaagccatactctaggtcaattgttggtgcttcgttggaagtcatccaaaagaagagagctgaaaagcctgaagttcgtgatgctgctagagaagctgctcttcggtatgctctttccctgaatgattgccatttagactggttactggttccaacaaagtatccacccatggaatagaacattgccactctatatgggttacattttgccttcattttcactgcattagcccttacctcatgcggtgcctcttaacttctcaagcagtgttttcgtttgctgcctttgttctgcacagctcactgtatcattgcaacatgatgtttgctacccattcttattggatgtctgctcctagtgaactctctgttcatattcatgcataatcccctatt

SEQ ID NO: 13636 - DNA, 6897 bp, Oryza sativa
aagtgatctgggtggggatccctgattgggggctgtcatttgcgatgtttgcgggatttttttctatcagattttctggtttggaaatccattttggatactgtgctgattttagactgtcgaatttgagcttggacatgcagtgagccaattagtctgttaggagcgaaagggggcatgatagaacagagcaattaagttgtcaaaatttcgctgcaatgctattgacgctttatgttatgtagtaacagaataagttgttgctttgggctttttggtctctgcttttgggataggaaatttgattgagtagattggaggatatctccactggaagaactgtcactattggctggttgcttatcactgccaaagcatgagttagttatagccaattcactgtgctggattgaattgtttctggaaaggtgaaaccatggtccatgtgaattgagctgatgatttgctattttgttcatatgtgcagacttatcccaatccactacaagatcatccagcctattcaactgtcaagtaaggctttgatcttccactttttttcttcttctaatatctgagcttgtaatttgtgccatgtgtaatcctgaaacttttgttcttatcgttatcaggcaatattttgttaatgaagatgacactgtaccccaaaaggtaaagcagtgttaattatggtttacactgtgatgttgtagtcgatggtgaatttacaggtagctatttctgtgcttacaggtggtcgttcagaagaacagccggcggggggttcacttccgtcgtgctggacctcgtcagaaggtatgatatgctgccccctcttttaactattgaaactcatcacttgcgcgtgggctaacagaaacatttggacttgaacctttaggtttattttgagtcagatgaagtgaaagcatgcattgtaacttgtggaggcctttgccctggtcttaacactgtcatcagagagctcgtctgtggtttggcgcacatgtataatgtcagcaaaatctatggtatacaggtgtgggcccttctctaaatggttacataatacttcaatagatagttaagggcttgttcactttgctaccattttcaaccttaccaagttttggcattgttaaattttggtagccaaaattttggcaacatttcatatgcacttactaaaatttggcaacaaactaaacgtagccaaaattttggtaactttgccaaaaaatagtatggttaaaaatagcatcaaagtgatcaggcccttacagtatcatattttttcactgagaaagacagcttgcgcatgttaaggacctgttcactttgatgctattttcaaccttaccaaattttggtaaagttgccaaaaaagtggctacatttagtttactgccaaattttggtaactatataagaaatcccgccagttgctaaaatttggtaaggttgaaaatggcatcaaagtgaataggccctaaatactctagttaaatactactcttgcattttccagacatgcttgatccatctttctaatttttctttggtccagaaaggatatgccagcttaccataagatcttcagattcttatcactgcttatcaatcattttgtattgcataatgtccatttccataaatattcaaaccttatagtattattctactaaaatagtggcaaattgaataagctgctttggattgttttagtaaaatgcaattataaatttgtatacttgtattataagtttagaacaatggatatgtgttctgacaagggcttgccatggcaactataaacatgaatcattactgcgttcagttctcattatatttccagatcttctacctcttaataccttatattacctatcatagaatggatacaagggcttctattctagcaattaccttactctgacgccaaagagtgtcgatgacatccacaagaggggtgggacagttcttggcacatcacgaggtggccatgatacaaaaaagattgttgacaacattcaggatcgtggaattaatcaggtaaatgcggttgtttgcacctatgtgatatagctcttctgattggtcattgtctcatgtgcttatgtacattacccaggtctatatcattggaggagatggaacacagaagggtgcatatgagatcttcaaggtaatttaccactgtggtacaaccgtacaagtgctatgtatgctgtttgctgaaagaatgtgataatagatcctattcatcaatgcattgcagtagcatacggtatatctatttaaatattattttatcgttacctcattgttttcatattggtggcaggaaatccgaaaacgtgggctaaaggtttctgttgctgggattcccaagacaatagataatgacatagcggtattttttttgtgcgatgtgtctatttttgtgtagaaatttgttgtacgcatgctgttcagttgacggttcatacgagattatgacttattgcttatgttacctttttcttgattcttagatcattgacaagtcatttggttttgatacggccgtagaagaggcccagcgtgccattgattcagctcatgtggaagcttgcagtgctgagaatggaataggcttagtaaaactgatgggccgttatagtggtacgtattttagtattccttgccatctctctgagtgtaatgctgttatgtttcttccattgttgaccttgctgaaagcacctatcagtttaaaaattacaagaaaaaacaagccagcattttggccttttgcctgtgattgtactcatgcagaagatctcttgatttttctgtatttcaagcttgaatgcttgattactctgctatctgttctctagtatgtatttcagtctattgcccttaaactgttatattcatcttgcagggttcattgcaatgtatgctactcttgcaagtcgagatgtggtaagcagatgcaaccattctgtctaattcctgtatattttatcccccctcttcatacagtagtgagattcctacttttctggtttaccccacaaatctacttctacctaagagtagttttttttttccgaggtctacctaagagttgtacttatttattttttggatctcaaatctccacaggactgctgcttaattccagagtccccattttatatggatggtgaaggtgggttgcttcaatatgtagagagaaggctgaaagagaacaagcacatggttattgttgttgctgagggagcagggcaggatcttatagccaaaagtttatctacttctgagcagcaagatgcatcaggaaataagctactgcttgatattggtctttggctgactcacaagataaaggtacacaaaacacttaattttgcttctgaattcaggtctgctgctcttgttaatataggtaactaaaacactaagcaattcccactgaaaactgtgatgacttttgccatacagttcactttgactttcaagtatcactccttttactcacttcttgcatgcatctttttcttctactcactattcataacttctattgtaggaccacttcaagagcaaaaagatggagatgactattaaatatataggtaactatgtttgcttcacacaggataaggttgttacacatcttattactggtctctattgtactaagttgtgaagttccctattattatttgcagatcctacctacatgatccgagctattccaagcaatgcatcagacaatgtctactgcacgctgctggcccacagtgctattcatggtgcaatggccggctatagcttcactgttggaaatgtcaacggcagacatgcctacatacctttctatgtgagtaacttcaagtgatcttatttgttcacatggaaaatgcagaaatgtagtgctcgttacacccgggcatcccatttttttcctgattatccaagagctgttcttactgcattctcatactaagcatcagttccaacttaacgtgaaatcttcccttgatggcagagggtgacatccacacggaacaaggtcaagatcactgataggatgtgggcgaggctgctatcatcaaccaaccagccaagcttcctaagccagaaggacatcgacgaagccaaagagaacgataggacggccaacaagccaccacttcccaccggcctcagccatcatgtggcaaactctttcgaccagtctgcatcatcttcgtcgaacagccagatatgaactccatcatgtggcaaaccctttcgaccagtctgcgtcatcgtcctcgaacagcgagatgaatccaatctgtagttctatatagaagctgttgctattcccgttgagaaacctgggccacgctacgcagttttgatttaatatgcataatatcacctgtatgaatccacggatactctcctggattgctggtaactacaagcgtaataagaaaagcgctattgatgaagctatttttcataagcaacactcgtgttgtgtcttgtatatgctgctgatctgaagatatgtttcgtcagctgatcgtatattgaccttttctgtctctgtcactgcagtgcaatgcgtttatgttgtggtacccaaattaggcctgcttggttactggaatactataccacttactactaagtattctgcgcacaaacagcagatcaggagtttgtcagagaatatcatcatatgctgcgtgtctcccgtcagtcccgtgccgaactgccagatgtcccggataagattcagacgaattctgggacgagccacaagatcaacaaccaacccggcaaaatcgttgatgataataagaaaccaattaccagtacgcagtacgcaaaatgcagaacgagctctcatgaaatcatggccaatgatttgatctgcacgaactgcccacacagaatgctggtcgcagtttccggcgcggcgaaaaagtcaagagtccactggccaatcatgcgcccagctgcactgaagtcaactccaacccatgtgaatatgtgatttgctcgtcaattccccagttagttgcagggtcattttatttgggtaaaaaaaattccagggccatagagggtcgaggcattgacaaagaggtggcctactgccctactggccttggtaaattcagaataggcccacccgtcagaggaaacagtccatacatatgcgacgcgtcgactacggcgctcgacaattggcaagcgacgactggacagatgtgctgagtgctgacgtggttaaactaacctcgatggtgtgataaaaggctagttgtagtaagtgatattaagaatgttaaatttgatacttatttactgggcagattaacgctggatataaaaagagcacgtacgtccctattattatgcttcagtagttcagttagctcgctgctgcctgcatgtgcaatggagcgttcaacgccgggaacaatggcggcacggtcgtggttgcttctcctctgcttcgtcgccgtcgccaccgccggagtgctccaagctcgtgcccaacctgacagcaacggtacattccaccatgtcctgtctttcaagttttgatccgcaactaggtagtgctgcttcacaatgaaatcaatgtgctagcgtgtgtaatatgcttggctgcaggtttcatcagcgtagactgtggcctcccggggaagacgggcttcgtggacgacaagaccaagatatcctacgcggcggacgacggcttcaccgacggcggcgcgtgccacaacatctcggcggagtacatcacgccggggctcgccaagcgctaccacaccctgcgcagcttcccggacggcaagcgcaactgctacacgctccggtcactcgtcgccgggctcaagtaccttttccgcaccaccttcttttacggcaactacgacggcctcaacaagctacccgtgtttgatctctacgtcggcgtcaactactggacgatggtgaacatcacgggccccggcgacgcggtgatcgtggaggccatcgtcgtcgtgccggatgacttcgtgcaggtctgcctggtgaacaccggcgccgggacgccgttcatctccgggttggacctgaggcctctcaagaacacgctctacccgcagtcgaacgccacgcagggccttgtcctcctcggccggctcaacttcggcccgaccgattacaccgacgtcataaggtaaatccaagcctcaatttaaattcatatcttacgttaaccatttccattatctaaaaaaaaattaagatcttagctgatcgattgatcgagctgcattgctgcaggtacccggatgatccgcacgacaggatatggttcccgtgggtggactcgaccaaatggagccagatatcatcgacgaagaaagtgcaggatctagacaacgacatgtacgagacgccgacggcggtgatgcagacggcgatcacgccgcggaacgcctccaggaacatcgagttctcctgggaccccgtgccgctgcccaacgacccgacgcccgggtacatcgccatcttccacttctccgagctgcagctcctccccggcaacgccgtgcgcgagttctacatcaacctcaacggcaagccgtggtccctgaccgccttcaagccggagtacctctacaacgacgccaccttcaaccggaacccattcctacggtacccgcagtacaacatctccatcaacgccaccgccaactcgacgctgccgccgctcatcaacgccgtcgaggtgttctccgtcatccccactgccaccattggcactgacccagaggacggtacgtgcgtgcgtgcacattggttgcagacacatgtaagattaattatcaagcatgtcatgcgtgtttg

SEQ ID NO: 13637 - DNA, 3509 bp, Oryza sativa
aatgcttctcttttaaccattatgcatatcagagcatcaataagcatataccttggtaaagtgtcttaacatcagctgtgattctgtaccgacagatctccgtgtcttgaacaattatggacagatcgaatcattctctgctttcagcagtatttacaacaattctggcctttttggaatacatgcaaccactgtaagtctcttttggagcataaccaatgatatgttttcccttctatattcaagcaatgaacagaatcaaatctgcttgtgaattctttcccttttttttttgaatatcattctcaaactactgtaaatataataccctttctattctaagtaatgtctgtccctcttaccacaccattacatttgtcctacctgaattctggattaatgccttatacaaacaactgtaattttatcttactgtttaaaataaggagttggtggcttatgctagtaagtagtagtaactaaaaccgaagttatattgtacctcagtaagaaatgcagaaagcactcactgaaactgagtatttagtttcttcctatgtacatcaatgctcatttcatctcgtgtacaattttgtggtttcaaatgtttcaagagggtagtaactaataaatgcacatttcaggccagtaattatgccctggtctttaattataaccatccgaacagtcagattgaaatacaagtcaaaggctcaatgatttactcaagcttctatagaagtttctgcatttatcatggattttcatacattccactttgcttttgactgtcatgttaatttaacagaacccagattttgtatcaagtgctgtggatttggcagcaagggaactccatgaagttgcaactcctggaaaaggtttctttaattttttacctcaaagttacaatctattttcagattagactggtcattatgtgttgtcctttccctgtcttttactttgttcagttacacaagaacaacttgatcgtgctaaagaggctaccaagtcttcagttctgatggacttggaatcaagagtatgttgttcttactcctgatcaagttccaatcgcatgaatttcatgcttcttccctgaaatgtttttttaattgtacttcctccttatcgcagatcgtggcctctgaagatattggaagacaggtactgacttatggtgaaaggtatgcttataagtaatcgctagtacattaatggagtcaatttcctattaatccctatgttcctaattaaatagcatatttccatgtcatgtttatatgcatggaatgcaaatctttttactaatgtgcgtaaaataatgagtcatcaccatgaactatcacaatctatgtacgcttgcgtaaattattatgtttccaagctggttgggcaatatatgttgaccatattacataggcaactaaagttgtcttgtggttttttcctgcaatcatgtcccaaagtttgacaagtcacctataatactgtgttctggacacacttactgtggttgtggtgttccttttccaaagtgatgctgtggttatggtgtggtacatgcttttttatggtatcacccaaagtattttgggtgtcagactgccagcacgtccaagcatatattcaggatttatttctatagtttcttctgcgtgcccattggtgctataaacttattgtcatcaccatgccgttgcatctagaaaaggtgcacatacatggtagaagtgagccataagttttagtaccatgagcagaggttcatacatttgacgcatgcagcagtgctaaatctgttaagctagcattttttctaagtaatccaccaattgcatagggtattaatttagatagtcacttccatttgccagagaaccttgtttatcttggagtgctttgtgttgtgcaggaaacctattgagtacttcctgaaaactgttgaggagatcactttaaatgacatttcttcaactgcaaagaagattatttcttcgccgcttacattggcatcatggggtgatggtatgtcgaaacttggaagttaaagcatggccctatgcaagctctgagagtctgagcactgactaattgaaacgctcgtgttgcagttattcatgtgcctagctacgaatctgtcaggcgcaagttccattccaagtgagcattcagcacctggacctgcgtgggttgttctggaatttcaagccgcagctttgcagtggccaaatggccatcgactggaataaatagagcccatacacaatttttgctggacagatgaggggtgcatgatcaactaccctccctattcatgttctcaactaagcatgtgatcatgctgccacaattccgcggcccctaaatcattcggcggcatgctgcgttttgttcagtggcatgctgcgtttttgttcagacgcacgccaatatcgtccttcctgttttacattttaatatagaatcagatgttatggcctcatggttaagccatttgcctattcatcggtgtcaggtgttttttttattagcgtgtttgcccatttgtaccaacaagctgtaaacatatacgagtaaaaagagtatttctatttgtcagtctgtgtgttgcgtacttgcgtatggagcttagtcagccaacttcccggattaatagcggaacacaaatttgatttcccctcggaaatgaaaaactgtatgtatatttggtagtaacgttttggaatttgagaatgcaaacaagatgaaaacaaactctgagtttataatcccctcatccgccgcctattgtgctgtttcgtaagcaaaggtcaataaatgatctgtctacatgggatctgcagctttcgtttcctgcggcgcaagccagttacgcgacgccgggaattgactcggctttgcttctggacgtggacgacatggcgggcggcgatgcggtatggggccggccgaccgtgccctcttcctaaaaccagcatacgtatgcctgtcagcctgtgggcgacggcactgggatttgattttactgaatttatcctgcctgattccaggtggttgatccgtagagctaatttttcttttcctaagatatgcatacaccgggtgcaaattcgaagcacaccagaacgtgattcacaatcacagctaaaatatcattttcacgtatgacataccgataccgtattttttttcttttcctaagatactctctttaaatttaactcaattctcttgtagagggattaaatgaaggcctaaagaaacaggtaaatagatagacctaaaggccatctcgcacgggatggcactggcagcgcatgatgtgcatccatgcgaatcggatgctgctcgacggctactcgccgtgcccaccgccgtttgccaaaccgcagcgtaaaccaaaccaatgcccgtaatcccatcaggggggacaggtttccacggcgtcaaacttagcccaaactcggaaaaaccgccacgcgcggctcacaaaaccagcgccg

SEQ ID NO: 13638 - DNA, 618 bp, Oryza sativa
tcccgccgcggcggggccggggtcgtccgccgcggcggcggccagggggtccactccgcgcgccacgccgtgtcctccgcgtccagctccgggcacatctccatcaccgtcccgcgggtcatcttcgtcgcggacgactccgactccccgggctcctcgtcccgcggcggcgccgggggcggcgcggcgtcgtcgcccgtcgggctcgaccccgcggtgatcgcctcgtaccccaaggtgcccttctctagggcggcgacgggggcggacgccgaggccgcgtgctcgatctgcctctgcgagtacaaggaaggggagatgcagcgcatgatgcccgagtgcaggcacaggttccacctcatgtgcctggacgcgtggctgcggcggagcgcgtcgtgcccggtctgccggtcctcgcccatccccactccagtctccactccgctcgccaccccgctgtcggagctcgtcccgctatcacagtacgccgccgaccgccggcgccacaggtgacggaattgggtgcatcatgtcttctcttctatattcgttttctggcaccattttctactggttatcaacgatgggatggtgtatccattgttttattgttcagat

SEQ ID NO: 13639 - DNA, 27438 bp, Oryza sativa
gttatacagtagaggtatatttatgcaaatatttttcatgcaggtatataaatgcaaaatattaatgaaaatatatattttctttttttttcttgttaagtactcgacaggatcaaacggacgcaattgaccacgcatgacacatataaaaccaacactacgtgaacaaaaactatactacaacgattacgacggtttgatatctctccctcgttcggcgaacaaacctgcctgaaccctacacgttaattacaaattacaccacgatttagtttaaccagtgcgtgcgtgcgtgtgcatgtggacacgtaatgcaaaacgtagtagttttcgtaaacaatcttttaattgcggtctcgtgccgttgacgacgccttaatctgcacacgcttatggggagagagagagagagagagagagagagagagagagagatcagtagatcggcagtagttgaggtggttgatcggtctatggctgctcactcttctctcagcttggtgtacacagtttgagacgcgggagaggtgaaggcagcttgcacgcttgcccacccccaccttccccgctcacaccgcccttcaccttccacttccagtcgcagctaaccctcgcagctgcacctgcacacgtacgcctatatatactcaccgcgcgccgccgccgtgcacctgtccgtccgtccgtccactgatcgacgacgacgttaacctcgccggccggcgctaacaatggacggactagaggcggcggcgggcgatcagcagcacgggcgcctgctgattcctcagctgccggccgcctacctcgcgtcgtcgtcgatggcggcgcttagccctgcgggggacgactgggcggcgtcgctgatcctcccagatggggggtcggcggcggcgggcgtgggcgaggatgatcttggcggaggagtgatggcggcggcggcggcggaaagcagctgcggagggagcagcaccgtcacgagcagtggcgttacggaggcggcggcggcggcggcgacgaccacgcggcgtgggaggggcaacgggaagaaggcgggcggcggcgggaggacgccgaggttcgcgttccacacgaggagcgagaacgacatcctcgacgacggctaccggtggaggaagtacgggcagaaggccgtcaagaacagcgacttccccaggtatattatatatacattgcgttcttaatttctagctagcggctaacgtgtacagggcctacaggctactcatgcatgatatatattgcatgaatccattcatggcttgtgcatctacacgtacgtatggacaatattgacgttgaaaatgcattaattaatggggctactatacctagaaggctagaacaaaggaattgctatgaattttagttaccttaacctggcactggatttaggagcgcaaaagagggaggaggggcaaccttccggtgaagattacgacgacgggccatcttctcttcaattatagcgacgacgagctccttctcttctctgacgtcgacaacacccaaactgcaacagagaacctgcgttttatacccctcggcagggtttacattaccggttgaccactaaatttcgaaccccatcgatatcacggttttcgataaatttcgatcggttttcgataaatttcgaccaaatctattgtttaaccttcgaaattccaatcgaaacttaattccgagccgtatcgaaacgtcgaaattttgtagaattcaactagttttcgtcgaattgtgaaccctgccgctcggtacttgtaccacgcggtaccaaaacccatccggccgttgatttcgcgtgggtaggattggaaaagggaaagaagcgttgtttgtcctcctcatctatcccgtagcgtgattttctctcccgcaagagcgccgccctcttcttttcggactcgagagctagcgccgccgaagaaacctcgaccccaaatccgaaaccctagccgccaaaaaatcgcgccccaaatcattcgttctgccgtcttggccgacttgagtgaagcgaagctttccatcccagagggggaaggctgtcgcgccgtggtctgaatcgccggagcaaccaccatacatcgccggaagcaaactgccgccgtttcagtcttgcctagcctcgacagcatctgccggcgtatgcgccggtgttgccgcaaccgagggatttgttagggttaccttcagatcgatacagaatgatgtgaaaagacctcgctacccttccaccgcacctggcgaagcggtaccgtgccagggataaaaatggtaccgcaagctactgtgcaatcatatccgttagatctcaccgaacgaacggcctagatttggtacctcgggggggggggggtgctggacgataaaaatttcctacagattatggtttgcagtggggtcgaaattggaggggaggtggaggggtgtttccctttatagtgatgattgttacttgtgagtggtgaagaaagacagttggcgagacgttccagagccacggagttggagaagggtagtggcctagtgggtacggttggcagcgagggtggggaagatggtggcgctagtgcacctcgccactgcctcgtttggggagtaccagaggaggagatgggaggggagggaacggagaggaggcccgtttgcttgtcctagcttacaggtgttgttggcacatttcggtgtcatcaacgttaggggcggtactttaacgtaggggagacaatggcgctcaataaggaggcgtgatcttcgatgtacaccatttgcccgtacatgactcacattagtgagtgagttgtggaatagtaggaaatgggaatatgataaggttagtgtagcgcacaaatcttttggctcaatttaggccgtcaaaaactggtcgaaatttgttcatatttttcaagtgcctaaaaataaatagttccataaaactaatgcagtttataaaatgaaaacaaatctatactccttttaaaagagggcaatgctggtggcagtgaatctgccatcaccaccaccacctcatttattttttttattccacgcctacttcatcatgttttctaccaactattcatgtattttaatgttatagaataatccatctatcatatttttcatctgtacaatataagatctacagggatgaaattgtcccaaaaacctttaatattattttgttttaatccgtagtgtatgagtatttggctagtaaaataaaataatatatttgagaaaatctgtcacctatatatattacggatccaatgaaaatacagacatgtgtcatggactctagcctatgtatgaaagatatggagagatatagagaagaattacagatgatcaatatttaatgacttcgaaaatttaccagctggattagcttattgagattggggtggctagttttgggatagggcaagcggattcacaatgaaagccttgatggcgaaggcaacaatgggcacatccttggctgtgcaagagaatgaggctaatggataatgtcaatatatagtacgtttgagggagttgattggtgagtttagaggattcaatagtgtgtgagccatcgaagggcgaggcaaaacatggtgaggatgcatggcttgatcgcacgggaggcagcgagcagcagctataggagagagggataggagagagggaagccctgccgatcgatgtaggcaagctggcaaggtaaccatgcaatattggggaaggccggaagggtggagggggttatgtgatgagaggcttaattagggccaaaaacagttactacacaaattcttgaggaactataatattgcctgtgtgctgcaacgatattttaattgatgaaatgatcattaacctagccactattatcattatttttttatacatcatttcttaaattttacatatatttatgactaatatatgggtcatacagcttcacaatatcatatttctttcctaaaaaaatagatagggtggtggggcggttgacatgtgggacttttggcaccacatgttctttactccaaaagggtaaggagttggtggtggggtagtgaaagattcaccactcaccaccaccagtactattttttaaagaagtatagatgtaaattatcctaaagttttgaatatttggaaagaaatggagatgataaataacgtttgaatgaactttttttttggggggtgtaaatataatgcctttttaatcttcagatatatatcccgcttgaaaattcatgcatcagttcatcatgctctccaattcatacaagctcttgtcttctctacagcatgttagttaagtaagggtaaaaggtaggatggtgtttaggagaaagggaaggagaggggaactcctagtaggatatagaggaagctacgctaggacggcgaggcaatggtgccatgagtgcacaacagatcgagagagcatatattgggagtactgggcctgttctgcagctgcagcgcagccgacaccaacagtgtcgcacgcacacggtgcagttgcagttgtcgcagccagcttgctgaacaggcccactgacattattgattggaagggtacatcgctagcctatattatattggaaaaagtacgaattacctccctcccctgaactatcacagtcgaccgaattaccccttgaacccgaaaaccagacattgctcaccctaaacttttaatatcggacgaattacccccctcgatactgttttgtacggttttgacttgagcttgcacacatggcgccaatgtagcaatccaatcagaaaaaacccttcctaggcccacctgtcatacctctctctctccccggtcgctctctctctctctcccccccggatgccgcgcagccacagcgtgagcgccaccatcgtccgggggagcctcgccaccgtgacgaccctcgccacccccatgggcctctcccccgccgccaccatcgccaccgcgtctttgccatttgcgcccatgctaccgaggggaagccgggacgaacgaacagtcggcggcaggcgggcggtgggcagcggcgcgagacgaggagggggaaggaggaaggaggatcccaccgccgtctcgctccatgtcccgccgccgtcgccgttgcctttcgcagctgcctctgccccctccggccgtcgtcctcggctccctgcccatcgtcctaccccccctccggccaccgtcctcggctcttcgcctgccgccgcctcctctgttcacagagagagagagagagaaagagaggggggaggcagagaaggagagaaaaaaagtgttgacaggtgggccccaccgttttttatttgtttttgctgactgtatcgccacgtgtgtgccacgtaggctgaaaaccgcttcgaatctagttagggtggtaatttattcgattttgagagtttggggtgtcaaatgtctggtattgtagtttaggaggtaaatcgtactactgcaatagttcggaggggcgagggtaattcgtattttttcctattataatagtgtcatatttggcctatcattgtaacttattaacatatactaacatacttcctctatagttcatgttaaataaaaaaacagagtataaagatcttaaattaaagggataggggtgcaccattagtcaacaatagataggcatatacgtgttccatggcacttcgtgcatccattgcaaatcgttcaacaataatcagctagctacactcatgtacgtacaagtgtacaacatgattaattaactctgttcactcatatacgtggatgtcattatgccaagtactgacgagacatatcacaggagctactaccggtgcacgcaccacacttgcaacgtgaagaagcaggtgcaacgccttgccaaggacaggggcatcgtggtgaccacgtacgagggcgtccacaaccacccgtgcgagaagctcatggaagcgctcagtcccattctcaggcagctccagctcctctcgcagctgtaataaattaattaattaatcaaccgtgtaatccacttctaatcaagctctaatcgtgcacaaaactgcatatataacttgacaagctaagtcgatctatacagccaaattaattatacgtactcggatgggaaagagaaggaaaaaagggttgtcctacctcccatcatatagtgcttacactgctactactgcttactcatacatacatgtacacacggtcaagtgatagtgttaatatataaatcacttagatatttacacgttcatgtctcctgatgttcacaaagcttacagaaaatgtactttatatgtgcttcagctagcaccttgtaatttgttcgagcaaatatatatgtatacgaatctttcatgtttttatttatatgtatttaataatcattgttttctataaatcccaatgaatttacaatgtcctaaagaaatttacattgatacatgaggtccatcataatttttctattagagtgttacataagcaccacgtcaactaaaaaccgggttgaatacaaccttgagatggcatttccactggtattaggagatgagggatgcgttatattcggctttgcggttgaggaattactgtgattgaaattcgaccataagatgagggacatgaagaaaacttaagccttattcagtttgtttccactttcaaccttactaaattttgacatcaccaaatttaaataagacaacaaactaattaaacacatttaaccattatacctacaaaattttagcagttctatagaagctttctctcttaaaactttaccaaaatttggcaaagacatcgaagcaaacaaaatcaaccctacggaaattagtactaccaaaatagatcaaaatttaacattaccaaaatgtgatttgggaaacaaagtgaacaacctaacctaaaccacccacgaggcaaacttaaaacacctcaatccgtctccacagaaaaaattctcgacaggggaggcccaaacccaaacatctagccgccttatggcccatgcaataataaaaggcactagatttggcccatgaattactcagctgaggggctacggaagaaggacggaccagctaaggcccacttaagctccgcataaccatctcgccgccggccgagccgcctccctccgcgccgccctctcaccaacccgtcccagcgagcgctcgcgcggcggagatcggctgccaccgcgggcgggatatcgccggccaggaagcaggtaagcctcttccgcttccctcgctctactgcgtactggctggaagagctttcggtgcttctcctctctgtgcggaagccgcagaggtagggttttaggcttttaggcacggacgacgacctttgggtggtgggggattaactggcagttggggaatttatggtcgaattggaccagttttcagcgattggagctcgtcagagtcttaggtgtgggtttggatcgaaggagctttctgatgttgctgcagaaaatgtttactggagtaatgcagaaattgtcactggagtagtgccttggttctgtgagattatgccggttgaactggccaaagattttacctcgtcgtttgatggttagcagtgcattggatttattttggggtaaaaccctgttcgtgtgagatctgtgataactgataaccaagtgcgcctgtacatgttttaatcagatctgttcgtgatggcacattgtttgtcatggttcctaaatcatacggagtatatattagaggcgtgaactaccacatgctgatgtgggtgggatgattttttactttgtgctgtaattgggttttgtgtaaaaccaatagagcagaaccaagggaactaatcttctgaataataagcagcgttttagaattttagattaagtaattttgcaaggtgttgtataacaagctatttaggaaaatagtctcctgggcttctggcatggttcatttctatgcatacctagttggggataaatgtcagccagatgtatgtgtagtccgaatgcctatatgattaattcatactaaattctaatgtttgttcatttttcaattttgatgtttcagttccctgaaaagaagattgtgcaacagtccaggaactcgaagatgaacaagggtaaaatttttaagttagcaaaaggattcaggggaagggcaaaaaactgcataaggattgctagggagagggtggagaaagcattgcaatactcatacagggatcggcgcaacaagaagagggacatgcggtctctttggattgagcgcatcaatgctggtacacgaatccatggggtatgtaactgcgtatccagtaatgcttgaagtctcagtgtctcacgtctcaaggacatcattttttttatccatcgctcttttatccttgagtataggccgaataatctatcaaaagtataacttttggatttcaaggtcacgcactgcaggccctatgtctaatatactgttttaactgactaccccaggtgaactatggcaatttcatgcatggattgatgaaggagaatatccaactcaacaggaaggtactttcagagctgtcgatgcatgagccatacagcttcaaagctcttgtcgacgtctctcgcactgcattccctggaaataggcctgttaagaaggaggggctagcgagtattctttaaaacaaacctccccaagtcttgttacaatcacgtctgaatgaaactggtattgttgccttcagcctgcagccgtacaggaaactcaatggcagatattgcatttgtaatactatgtaattctgtttggaaagctgtggaagagaaacacctagttacatgtgttcttcttacctgttattgttggttttttttggataatgtgctctgtttaccttgataaatataacagaatggatgattatcattgtttttgtactttctgcataataagcttgggaggcagccaggtggccacttattttctaatcacatgggaaactgatatgttctctttaggctgtgttcgcatgcaccttttcccatccccttcccctcgttttccgcgtgcacgcttttcaaactgctaaacggtgcatttttttgtaaaaagtttctatacaaaagttacttaaaaaaatcaaattaatccctttttttaaaaaaatagctaatacttaattaatcacgcgttaatggactgctccgttttccgtacgcagaagttgggttcccatctcccccatccgaactcagcctactctttcttcgtactttcctccagctgaagtcatgtaaccttaacatctcaaatttggtgagtggattgcatcatctaatcatatttctttagaaaaacaggtgcttcatcgacaaccactgcatgcatgttgctatatgatgtgcctgcgtaatcgtggcatttcctagtactgctgccaggtaccaacctaccatgttctgtaaaattgttttcttcaatcaactgttctgttaaatctgttatgtcattctcaaactgacaagttacccatcttctaatgcctcttctttttcgaacatttctaatgtctcttgtagtcttgtccctgctttcggaagacccagacaacttaacccaacacacaaaactataggttgatctttgcttttagatggaatggtttctgaatatttttccaaacatgttagcaaattatcccagttctgtgtattaaaacttttaccagtttgtacgaggggtcacaatccaccacgttgtattaccgttactttctgcatcatctgaggaactcatgagattaacctgctgttaggtaagacgatgacaatctaaaaaaggattgaaagagatctcttccgggcaataggcaacccgtcgttttctccccgccgtgtttgatcctttcttggatcattactgtacgcgtaggcctttgggctagaggcgagaaattcagtcacccacagcctgtccagagcttagctcaacaaatcgcattgaattggcagtcgatttcagcatatgggaaaaaaagggacatataggtcggcataatacctgatagctagtagtaacaagtagcagaagccaatgctcagtaacagcctgagataaaactcttagagcagactattagtgagctataagcatatttaataagataaaagatgagagataagagtagtgggctacagatctgtagccagctgcagcgcggactcctagacatatgacaggtgggaccatatattaatagtatattaagcaactattgtatgaattggctatagatgaattgaaactagtagtaggctatactattaaacttgctctgttgcaggttgctggtaatatgttcatatatgttgcatttacatcttgagttcagacgaatccgctatacctgcatccgtatccaaactgaccgacagttacttaagaaatagtacgtgttgaatttgctaatagcaccaataatctcgttgcagcatctaggtaatctaaaataccactttttctccgatcccatgaaacaaaattaaaatacagagaccaaaaaatttcgagcctattttctcctttgttttggtatctatagttagcaatctgtcgtacttttaaatgttactctaggttaaatcctgcaacgaagtaatgaagaaattgttaagcaactctgataggtaataccatatgactatatccaaggcctccctgatggaaagtcagaggtagaacatggatgcgatagcattgtcagctaggaccctttatttattctgttctccattcattcttgtgcatgctggatggcctatttctatatcatcatatcagctggaatctattgattaagagcaaagcatatgcaaagagacgtgagtaagctatcgactatccttccactaagctcccttggttagttataaacctacaatgatggtgcttactagcttgctaagacaaagtcattgacgtaggggatccattgaccaaccttgctaagttcaccactgtttttccagtttttctttaagtatcctgtagaattgttcatctctttgcgtaccaacatgatatttatttttttgagaacatgatatttattcgatgcacgtatatatttgttttgtgtccatgagctggctcatcatagaatgttagttgaatatctgatcagcacataggcaaatcattagatgctaacaactcatatccgtaatcaatatacaaatttcctcgtttcatccttgttttcgtcgcctcagtaaatctagagaagcactacgtatcaccaattttattctcgtttaatccgatcaccaatttttttccgcacaaaagaacaataaccctttggtagttggtagaacttgtcagctagcagattagaaatttcccggtagagctgtagaattacgtgaaaatcgtggacgaaatttattactaccactcattttttaacgaaggaagctgcggttttctgttcagtgctcgctcactcaccgggcaccagcagcggcagcttcaggccaagcgctccactggagctaactgaaatgatgctgttcaccacgaggagctggagaggaaactactcgtaggcaggaatgaatgtttcgacgaggcaatcaatgggtgtcgccctgcctgccccgacgacccggtgatccgatgtgatatcgcactgggtgggcagccaccggacggcgctccccgccacgcacatgctcgcggctcatcatggctgtgtactggtgtgtagtagctcttgccttgccaggtgcggcactggccggccgagccgcgcgcaccgatctcagtcgtctcgctcgcctagccacgttacgcgcagcccacgttaggtcacgcccaccccgacggccgacacgcccgcgcccgttacgcgcagccacgcacgcacgcgcgatgcgcggcacggcacgccacggcgcgccgtgctaccggacgatcgagaggccgacgcgaacgcgcggcatgcggtgcacacggatgctggcgcgcggtggagtgcatgggttggcgcacgcatgcccacgagcccacgcgaggggacggacactccgggcgcgcaaggtcgtgccagataatatacgatcacctgttggatttgctcccgtggccacaacccacaagccacaagccggcgatcgcgcgcggtggttgcgggtcaatttcgctctcgcgccgtggttcgggctcgagcctctcatcgtcacaccaccaccaaacgcgacggctcaccatgtgaaacgtgaatccacctcgtgtactagcttcaagtgagtgagctcacggctttaacgtggaggcgcggagttatgttttctcgggggcggctggcttgctcccgatatattgctgtgcttgtctccgcttttctccgcggcgcggccccggcttggactcgctttccgcgacacgaggctgtgcttttctccgcaggagagagagagaacgggagagtggtggtggtggctgcaagctactactactcctactgcaaccgcgttgcattaggtcgcgttcgcttggactgttctgtgagctaggagtatatctaatcttcctcccgaatcgtcaaactagtttggtggtgggctagctgcagccagccagccagccagccaagggagcggcgcattgcgtgcgtgcgaggaggggaggagggggagtgatgagggcgggaatcggcagcggcagcggcggcggcactacgccggtgcggccgcgatgggggtctggtgtgacgacgccgcggtcgctgagcacggggtcgtcgccgcgcgggtcggaccggagctccgacgacggggaggagctggtcgaggtgacgctcgacctgcaggaggacgacaccattgtgctgaggagcgtcgagccggcggcggggggagcggccgtggcgtcgtcgtcgggtgcgtcgccgtcagcggtggcgccgccgaggcgggcggagccgcctggcggggtggcgtcgcggtcgaggtcgccggcgatgcggcggacgtcgtcgcaccggctgctgcagttctcgcaggagctcaaggccgaggccatggcccgcgcgcgccagttctcgcaggacctcaccaagcgcttcacgcgcacccagagcaccaccaccgccccgccgggcatcgagtccgccctcgcggcccgcgcggagcgccggcagcgcgcgcagctcgaccgcaccaagtccggcgcgcagcgggcgatccgcggcctccgcttcatcagcggccccaacaaggccagcaacgcgtggatcgaagtccaggccaacttcgaccgcctcgcccgcgacggctacctctcccgcgacgatttcccgcaatgcataggtcaatctcttccccaatcgcccccatccccttcccaaacattccagtctccttactttccccagctgcatttgagatgcagggatgacggagtcgaaggagttcgccatggagctgttcgacaccttgagccggcggcggcagatgcaggtggacaagatcaacaaggaagaactgcgcgagatctggcagcagatcaccgacaacagcttcgactcgcgcctccagatcttcttcgatatgtaactaccgtgccgtaccaatttgtggactgattattgatttgttccgttaatgtgactccgttttggtatgcgatttattcagggtggataagaacgcagatggccatattacggaggctgaggtgaaagaggtaataatagtccaatgctgaggttgctttttttttttttacttcctgtattactccatattttcctgtcttttggggatatattttttcgaactgttttcctgggatattttggtttatggagtatttggatgattgtgctgtccatttccccagctctgtaggtgtgtgtacttgttttttgttgtctgcaagtttatgttcctgaatttacgcataagaattatggaacgcgtagcttggaaaaaagaattcctgactaatggaggcccccttggccgaactggccggaaagcacccgcactggctgtctgcacacactagttttttctatacattgaggtaccttgttctagaacatgggaggggtgtgttgtaaatttactcctactatggatggagatggaagtttgaagattaatacagtatagttggtgggggcatttctgtcatgctgcgtaattattataatctgttcaaatgatgcgtggaaagaggcaacttttggattagagcttaatttattcatttcgctgaggtcattgtgtaaagggccgagacaggttgtttttttttatcttttcttgctcgatatgtgaggatggtttgtgatcaataaattaatagtggggtttggcttttttcttttccagattattatgttaagtgcttctgctaataaactgtcaagactcaaggagcaagcagaggaatatgcggccttgatcatggaggaacttgatcccgaacagcttggctacattgaggtaaactagcatgtttcttctgccatctgtgtctgagcactgatagaaagaattacacaatggttggttccatgatttcctctgacaatctacaactatccactgatgtttccttttctcttttcttttttaaacatactgctacagtgctactgatgttaataggttggtttaggagaaacattcaaacagataaatccgttacttactgttttgtaaaaatgcgagagattgcatgtatggtgcttttcactctatatattccagcatgtgcactcatacactttaccctgcagcgctacattaacttgtttctctaaagccctgaaatgttgtcttctcaacctagaaaaactactggcatgaaaagaaataaggccatccaatttaggaactgtttatacgctaagaattaatggttagaatcttaaggaaggttaactagccaaatccttccaccgatttatttttctttctcccttttgtccctccaaaatctatttaagatccaaaatgctgtggcaactggtgataaccatatgaaataaatacataatgcaatattatcttttgaacaagtaattgctgctatgattttgtgcaatattctcacatgcaaaagattacatgtccaacagaccaacactgtcttgatatattggggtggcaattcactctttcaataagatgtcaattgctgcttatgtattttagtatagaaatacaatgtctttaacaccaaatactacagcatgcactaattctttgatattcagtagtagtagttgcatttcacaagttccattttattttgttttattatgcacttgcgtgtctttgttagacttctacgtttttttggagatcataagagacaagtgctgcatgtaaaagattcaggaggatattcaaagattcaaatctgtgtccctctttttaaggatgaaataattgcaagcatgttctacaagattttagcatgtatggtgcactcatgtgggaaccatgtgtgccaccagatgcaattaaaatcttgtggggaccttctgcattttagtgagtcatttgactttggggccttggattgatgtgtaccgtttgcctgccttgtattttctgagtgcaagaagtgtaattaatgttcttgtatgttggttgtgtctatgacctgcagtttctgagatgataccatgacatattttaattaattcaacgagaattagcttattgtctgatgatattatggtagttatgaaaaaaaatatattaatgtgttcttctgtatcattgaaaacaagacaatcacaagcattgaagcgatatgcaagtaaaacgcctaacatattcataaactaagaagaattctaaactttaaatttcagtagtaagttaataattttggtaacattctaaatgttcagaaattctttttggttcatggattgtagaagaacccacttgtcagcaacagaaaatatctttgaaaagtctctgtgttattttaggcatattgttttttcagtttgacctgcttactggttactgagacagtaaactacatttatgtgacaccccttttctcgccgagaattatgtgatccttaaaaacactacttgttgacatgacagctctggcaattggagacattgctattgcaaaaagatacctatgtgaactatagccaagcattgagctacacaagccaggcactaagccagaaccttgctggtctaaggaaaaggagtccaatccggaaaataagcaccaaattaagctactatctggaggacaactggaagcgcctgtgggtacttgcactgtggattgggataatggctgggttgttcatttggaaattcatacaataccgccaccgatatgtctttaacgtgatgggctactgtgtaacaactgcaaaaggggctgctgagactcttaagctgaatatggctattatcctcctgccagtatgccgcaacaccatcacttggttgaggaatacaagggctgcacgggcattgccgttcgatgacaacatcaacttccacaaggttagcgactagactatctttgttcctttgttgtcctttaaaacatggagaaaacacagagtagattcaagatttatcaattgatttggttggaaaaaaatatgacagcacacagcatatactttggttaaggacatgataccatgcatgatgcatgtttgtacctgtggggtttatttgtcatttatgtccatcactatgaaggggacaatacaacttttattgataggctgctcatccatactctttgcattaatgctcctaccatcaggacaaatagtttgggccatggtctactggactctcatttacatcatggtcgatgcatgttaaaagatgggttatgatttatgaatagccacaaaacatggtcagataaggtgtttctattttgatatatataattttactggcttggcttatcctagatgaattaagcctattataaatagtcattttcattagttctccacagccaggagcctaaacaagctcgtgattgttcatctttgaagtttgccatttgcattagagagcattattttcttgattgaatcatagtcatgcaagttcattcctgtcagctaacagcatgcctgtatgtgatatgcttctgaatcaccagtttacattccaaaatatgtatattattgcatggactaactaacttaaaggaggcacaagagaatataaagtcatttggttggtatcatgcagagggcacataagccatgattggaccatatcaatcagcagatggtatagttgatgtcacttaagacagttcatgccaaatatctcttcctatgggatatagcagtctgtgaagtagaagaagcatgaggttcagtttagtcttattttcactagaatgcacgagatgcatttaattttactaagcaaaaaaataaaccatgattataatatgctttttaatggcactgataatgcctttgtgtcatccttaaacaaacagacgcattaaaatacatatggtagcatggccaattcggacatttgtgtgacatgttgacaatgacccagagcaagaatacagctaagggtgaatgttttgcttcttgtaatggcagactattgcagcagcaattgtggttggtgttatccttcatggagggctccatcttgtatgtgattttccacggctcataggttcatcggaggagaagtatgctccactagggaagtattttggtgaaactaagccaacatatttgaccctggtcaaaggagtggagggcataactggggtaatcatgcttgtgtgcatgattatcgcttttactcttgcaaccaggtggttccgccgtagcctggtgaagcttccaaagccatttgacaaattaactggcttcaacgctttctggtattctcaccatctattcatcattgtgtacatatcacttgtaattcatggagagtggctataccttatccgcatatggtacaaaaggacggtgagataattatttttcatttctccttttctctgtacctgtgtaccagaacagtttcataagcttctaatataattctttcctacagacatggatgtatcttgcagtgcccgtttgtttgtatgtaggggagaggacactgaggttcttcaggtctggcagttattctgtccgtctgttgaaggtggcacacatgcatcacaaaattgtattacactatttacatactgattttgtgtacggtcttctgacacactatttatttgcaggtggccatctatcctggtaatgttttaacactgcagatgtctaagcctcccacattccgttataagagtgggcagtatatgtttgttcaatgtccagctgtttcaccctttgaatggtatatgctcttatttcctaatatgcttcgcctggagtttctatttataagattgcaaatgtcatgtttatgaacaccttatttgtagagtaggtagatcagtatagctgcttagatgtttaatgattctttcccctttcaggcatcccttctcaataacttcggcacctggggatgactatctcagcattcatgttcggcaacttggtgactggacaagagagctcaagagggtgttctcagcggcttgtgagccaccagtgggtgggaaaagtggtctccttagagcagatgagactaccaagaaagcgtacgcttatgctctatgtttagcaataattatatgcttgtgcagttggggattttcatgacattgttttggaatgcagcttacccaaattgttgattgatggtccatatggctctcctgcgcaagactacagcaagtatgatgttttactgctggttggattaggaattggcgcaacgccttttatcagcatattgaaagaccttatcaacagcatcatcaaaatggaggaagaggaagtaagtgatctttatcgtattttcagttgcatcttcctgatgcctaactacagtaatagatataattggttgtaattctcatttctctgtgatctatgtatgcatttatataatatcgtctgtgaagaccatgagagacaggacaggacaaactgattaagttcttcacctttctttgcaggaagcttcaggtgatctttacccgccaatcggacgcaataaagcacatgttgatcttgacacccttatgaggattacctcaaaaccaaagagggttttgaagacaacaaatgcttatttttattgggtgacacgtgaacaaggctcttttgattggtttaaaggagtcatgaatgagattgctgaactagatcaaagggtaagtgggtaacttatgtgagctaagccatatattttaagtaatgtaatgttctattttgcatctttttcttacaacctttcttcttgatttataccagaatattattgagatgcacaactacctcacaagtgtttacgaggaaggggatgctcggtcagcactcattactatgctgcaagctctaaaccatgccaagaatggtgttgatatagtatctggaactaaagtaagtcacgtctcaccacttgacctcatgctgtactcctataatttgcatcattgttatttgaacttaactattctattactttttttgcaggtccgtacacattttgcaaggccaaattttaagaaggttctttctaagatagcctccaaacatccttatgctaaaataggtaagttatcatattgcgatataattaaagaagctatcctttttttaatctatttagctgtgatatactcatcaggatgtgaactttctggatcaacaaaactgggactagcatgtgcatatgactgcaacatttgtaattctcttgacatgtaacaatgcatataccagaaaataggaggggaggtggtgtacgaaattgagtagccgtgatctgttgaagtacttgaaacttaagtctgtcattttggtatttaagtaatagcaagacgtaaagcaaaatgaggggctctcaagttcaagtacttgtgttcttctgattaatttttgtatcaattctatcatcttttatcactgtaatgaaggtaattgtgtttgtttgtgtataggagtattctactgtggggctccagttctggctagggatttaagcgatctttgccatgattttaatggcagatgcacgtcaaaatttgagtttcacaaggagcatttctaaaatcaggtaaatgccaaatagggaaataatagaagattgtgctacttgtatgacaccttttcttttacacgatgccttgttcacaatggaattaatagcaagggcgagaagcatagaggtgctatcacaacgcaccctcctggctacggccagtttgcactgtacacttcttgcttgagatactcagaagatacaataagagtgccaagataagagttttggggatcatctggtacaaaatatataggacatcaatcatggggaaacataggttccaacttccaagtgcatcggcgaggtgattgctcgtaacatgttgatctcctggatttggatttggttttcgactataatctggtgtaggacatagaaggctaccatgagcacaaggctaattaattgtatattgcgtgcagctgagtggtcaggctacaagatttgctctaactttgtaattatatacagagatgggaaacaaacaaatatagtgtgatttttgtaagtagtgtaggttggtagtgattgggtccagattggtggctcagattacattcaagcttgtttttttgttgtgccgggagtgtacaacgtgcattgttttagggatggttttacacacatacagatgatgtaatcatgtaatccttgtagcaaaggccttgttcttacgttaaccttctgtctgtacatgtttggcttgtggattgtgtattggaaagaaaagatgcagtaaacagtgatcttttgttgtgtgataaatttgcaagatgaatgctgccaacctgttgaaaggaagtcgagaagactcgctgacgctgagcaacgagagttttcaatgataagttgtatatgtgtacccaaaacattacgctgcattatttgttcctgctaaattgcaaccaataggccgtatacgtgcctcggcctcagtcttagctgaactggagctctgcgtgccgcacgagtcacctaactctagtataattatcaatttatcaggcatactagctggcaattaaaaaaatactttttagattctataaaaaagtattttttaaccctaaaaatcgtagtccaagattcaatgcgctctatacaaatatagcctggcaagtcataaatcccagtaacaagaacttgatatgatgacagaaacggtggttgtgaacgcggggcttggcgtcggccatctggccccaatggtggagcttgccaatctcttcccgcggcacggcctcgccgtcaccgtcgtcctcattgagccgccggcaaagccgcccagcttcgccgccgcggtctcccggtccatggcttccaaccctcgcatcaccttccacgtgatgccctcgccttcctgccacagcaacgtgcccgagctcatccgcgccatgaatgcgccactgcgcgagtacctacgctcgtcggtgccctctgctcgcgcggtcgtcttcgacatgttctgcgcctgcgcgctcgacgtcgccgccgagctcgggctaccggcctacttcttccagtgcggcggcgccagccacctcgccgtcggcttgcacctcccgcacgtgcaggccgagataaacgccagcttcggggagatcggcgacgagcccctcctgttccccagcgtcccgccgttcaaacccagtgacctccccaaggcagcactcgaccgcaacgacgagatgtacagatggattctgggcgtgttcgagcggctcccggaatcccgcggcatcctcgtcaacacgttccagtggctggagacgaaggcgctgcgcgcgctcggggacggcgcgtgcgtcgtcggccgccccacgccgccggtgtgctgcgtcgggccactggtctcgcgaagcggggaggacaagaagcacgggtgcctctcatggctggacgcgcagccggagaagagcgtcgtgttcctctgcttcgggagcatgggctcgttccccaaggagcagctcgcggagatcgccattgggctggagaggtccggacagaggttcctgtgggtggtgcggcgtccgcacgccggcgaggcttcgctctcaggtttgctcgccgggtgtcacggcacgcacggcgagctggacatcgacgagctcatgccggaggggttcttggagaggaccaagggcagggggctcgccgccgggtcgtgggcgccgcaggcggacgtgctgcggcacagggcgaccggcgcgttcgtgacgcactgcgggtggaactcggtgctggaggggatcgccgccggcgtgccactgctgtgctggccgctctacgcggagcagaggctgaacaaggtgttcatcatggaggaggtcggggtcggcgctgtgatggcggggtacgacggcgaggtggtcagagccgaggaggtggaggcgaaggttaggtggatgctggagtcgaatgaagcgtcgccgatccgtgagcgagtggcgctggcgaaggagcgggccgaagaggcgacgaggaaatctggctcgtcgcatcaatcatttgtcaagtttctgatagactttggcgtgaccaagtgaccggtcatgaatcttgtttattggtgacaatgtaaaacgggataagtcaattaagaattatagttattataaaatttaaaaataagtttatttgatttttttaaaatttaaatctatatggaaagtatttgaaaaaaaacatattgtttagcaattcagagaacgtggtaacggtatatgagggattagctaagatgattaggcagtttcgaagggcgtggctaatgcgcgcgcgcgccagcaacagccttcccacgctgtttttttctccgcttttctctctttttttgtgatttttttcctttccttttgacttttttttctgattttttaatctttagcacacatgttttcaaaatatttgagttgaatatttttaaatcttgactttaaagttttcaaattttaacttaaaagttttcaaatcttaacttaaaaattttcaaatctgtacttgaaagttttcaatcttgagttgaaagtttttaaatctcgagttgaaagttttcatattttttcaaatcttaacttaaaaatttttaaatctgtacttgaaagtttttaaatcaaagatgaaagtttttaaatctgagttgaaagttttcaaaatttatcttgcacatttaaattttgagctgaaaattttcaatttttaaaatttgacttcaaaagttttcaaatctaacttgaaagttttcaatcggttagtagaaaaagtctttcggaaaaaaataatatcttaattactgtcattatctactaataacttaattagttaggctaaactatccggaaacgcaaccttaatatatatcttataccacaacaagagctagtataaaaaagaccatgtcaaaaaaattatacaatcaaaattgacaaagccatcttctcttatgcattgtatctgttacaaccatagccactatttgttccacatttccgctgatcatgtcgctgatggaagagaggataaatagagaacaaagcaaaatctgaaaaaaaaaaaaccaattgcacgttggcttttgaaaatcgcaatagtcatatgtcccgaataacagatccatataactgctaaaaaaaacatcggtgaggctacgcctcgaataagatctgttcttacactgccatccatggacacaatcacacctcctcacaaccggatagaccaccaacgagagagagagaggaccgtcattccaaagagcttcatcatcaactccacccagacaacgacgccatggatacgaaaacatattcaaacgtgcctctatggatgaaacaccgaagcaagatgaccacggaaccaaagattagaagatccgtcatcaccatcaccattgatgaagatgatgaaagataactaaatttatttggatgaaaacctaaaccatcacctttgaattgtaggatttagaaaacgttggaataggaaaaagataagatattgatagaatgtaagtgtaaaacagagtattgcaaaacgcaggaaaaacataggaatgaccatttgaataaaccgtaggaaaaacacaagaattagatgagagagatagactcaaataaaatttaccaagaggttaaatctcttgctaaacttcctccataatctctataggattgtacattccataggaaattcaaaggattagatatgattcaatccgttgttttaaagggcttcataggaaattttcctataggattgaaatcctctaaaattcttatgtttttcttccaattcaaaagggccctgatactctttttgtttcaaaatacgagcgttcgttctggtgagattgggtgagaaagcaaatcatattccgcgcgcacgcttcccaaactattaaacggtgtgttttttgcaaaaaaaaattatataggaaagttgctttagaaaataaaattaatccatttttgaaatttaaaatagttaatactcaattaatcatgcactaatggctcacctcgttttgcgtatcttcctaatcttctcaatccccttctcctcaaactcaccgactttatcctaagtcaagctcctctaaatttgatcaaattttaataaaataatattttctacagcaaacaaatatattataaaaaatatttaataatgaatttaataaaataagataagcaattgtccctttttcgctattaatttggtaaatttttttaaaaaattaacctaggttaaaatcaaaacaactcatgttctaaattggaagaacttgtcagacttaattggtactcctacaattttgaagcatcttctgacctaaatttcctagtcaaagattcaatgcgctccagataaatatagccaagacaatcacaggcaatcacagatccatcaacaaaaacttgatagcatgaaagatatggtggtggtgtagctagagtcggtcacatctggtccctacagtggagctggccaatctcttcctgcggcacggctcgccgtcaccgtcgtcctcattgagccgccggccaagccacagcttctccgccacggtaccctggtccatggcttccaactcgttctcacggtatcaccttccacggcatgaacccgtcctcattgagcatgcaggcctagtcctcccgccactacaatttgtctgagctcatctgcggcatgaacgcgccgctgcgcgagtacctaccttcgcttgtcggtgccctctgctcgtgcgctcgtgctcgacatgttctgcgcctgcgcccccaacataatatcgtcgctgccgagctcggagtacgggcctacttcgtccctccactcgtgtgccgccaccgccagccacctcgccgtcgccttttgcacctcccgcacatgcagaattgcagaccaagataacacaccagcttcggggagatcggccacgagtccctccggttcccctggcgagtcaaccgaagcgtggccactccgtgagcgggtggcgctggcggtggccggtgaggagcgggccgaagtggcagtcaagaattctggctcgttgcatcaagcttttgtcgagtttctgtgaggctttgggggcttacacgaagtcaggtgcaggcctgcatgtgggctgtgcggtaaccggctggcgaacacagccttaagtactggccggcaattcgatatgttctcttgatgggcttttagtctaaaggcctcggactatggctcagccgctcaggtgaccaacatctgccctggcacgaaaagtgtgcagtcgtgcaggttaacgaaaagttagtggttaacttccgcagcaagaatatagttggttctttttcagggttaaggtcgtgcgtgaatcgagccaaaataagactaccgtgtgttagcaatatattgtagcatgaagtatacggaaccatttggtgtagctccttagggcatctttggtaggtttttactgcagtgttctaattaagctgtgctgtacagcgtaatcgttcggctgcacaaacacatagctgcgggaagctactgcttgctattggatggctgtggctactgtagctacagctaggccgtccgaacaaagccttaatcggcacaagttttctatattatttttatatttaaaagctctcttaacgtttatactggtacctttcacattacgatgggttcatatggggatggactgcacatgcccttagacttggacaagatccaatgtattattctcttaactaatcgtttggtttttctggttttctttttaatagccaaccatttgattattttttcccccgaagatggggtggttacgcaggcaatgtagggacagggccggctctacaattttgagggccctaggacaaacttgacaacatgatccttaacgctctctcccctatagagagacgtgttatatgtatattcacattttttgggttgttcagattaatgtcattttaaaccatatcaatttttgataaagttgttaaagatgtgcatccatttagtttttttaccaaactttagtaaatacataagaaatcctgctaaaactaggcaatatcactaaattgtaaaaattttggtattgccaaaatttggtaagatttattttggctacaatatgaatggccccttcattttcaaagtgtgttttcaaatctaatcatagagagaaatgaacattgataatatttcatatatatgtttttagaaatagaaaaatatcaacacttaaactgatcttgtttatttttcccatttacttagcaccataaaaatgcttcttgagtaaaattacaacttatcagcacctaaaattataaaggaaatatatattatcaacaagaatctatctatacatacaattttgattgttgaatatagaatctttattaattcactaatcagtattatgtagataatagtagataaccaggagtggtagatagtatgtaattattcactaatcttaaaataatacttcggctcatacagtactcatacaattttaggcatgggcccctagctaggtcgggccctaggccgtcgccctcattgccatgcggcccatgccccagagccgggcctgtgtagggaggatgggagtacgattgcatagagatgacgacgttggctatat

SEQ ID NO: 13640 - DNA, 21991 bp, Oryza sativa
attagtcctagctgatagttggtcagaggtctgggaagcttggcatttgaatgatcaatgatgtagagcaaattcattttatgtttgaacttgatcgcatatgagtggaatgtgggatgcttgttgcctattacttttttttttcaccctatttattctacaaatgaatcctcaggtcttggctttatcacttctgttaccttcatatttgtggttggagtcttcatgtcatcttgggttggagcatctgtccttagccttggtgagtggattattaagcgcatgccacttgtccgtcatatctacaatgcatccaagcaaataagtgctgcaatatcaccaggtaaacctactgtcgcactaatagcatgtctgcaaattagcttgggttcaaattaactctgctgatttctaattaactctggtttctacagatcagaacaaacaggcattcaaggaagtggtcatcataaggcatcctcgtattggagaatatgcatttggtttcattacatcatcagtctctctccaggtaagacgactattaactattatttcgcttgagattacattacattaagatgtttatgtcatttgtacaaaaataataaaattgttgatatccgttcagcttttatattagcatgtagtaaatgtctggtttcagtacctaatttcatctcatcatcacgtggtaacagagttatactggtcaagaggaactgtactgcgtgtatgtcccacccaaccatctttatattggtgatatcttcatggtaaattcgaaggatgttataaggccaaatctttctgtccgtgaaggcatcggttagtcataagcatgtcctttccgtgtcccatttccacttgatattcatgaaggtagttcaactttgttctgttataaaattccttgatttattcttaacacgtcatgcagaaattgttgtatctggtggcatgtcgatgccccaaattctatcaactctggacccacagacaattcttggagacagaacaggagcaagcagaagctgagatctctccttggttgcaacttgactaaaattatcagaccaagtacagtgaactagatcctgagcaacacgatgtattagtggtctgtcgagctctaggatcacaaggatctgtaaattagtagaagtaggtgactcatatattccttgttcatccgttggcagtttgtaccatggtttgcactttctaccacgttctatacaagaatgcttcgtagttgtaacgccttctttacttcttactgttttgagcgttgacagcacttgcctttaaccatgttgaaggtcatcctggtgaactcttgaaatataaagccttctcgcactgtcttgcgtgcaattttaacatcgttaaaatctctaataattcgtcgtgaactcgtagcgtctaggatgacattaagattaaacaagtggatgtttgcaacaatagctatgcttgcataggcaacgatatactaaattaacaaaatacgacgttgtagacaatacacaggccatgctgtctggctgctaaaaactgttgcaacatatctattccagaaagattattcagtattcacgaatgaaaatggctagtaccgatcatcctctcaaggaaaggccaagaatgtctataagcaggttcgaaaaaccacaccgcagaatgcagtccaccattttcaaaatgggactgaattttgcagcaaaccttatctgaagtctcttgctctgaattctgcaacgttttcgtatcattcacctccttggagggggaacaaagttaccccatggattgtacttattttcttctgatcttaaccgttagagtccattgtagcttgccttctgggcgtggtatatcccttggcaaacggaggggcagctcaaactccccaagggatgccaatggtgacggcaggtgaagattgtctgggtggatattgatattgagttgccttgcaacctgttgattaaattgagatattactacaaatctgaaactttggaacaaggagtgtgactgagctggaggcgcacctcggaaacaatttcgtcctttgtcacaggagaccgcagttcattcccaactgagatgaatctcctcaacacctatcaaaataccaatgatcatcaatagttcaatgggcaatatcacaattgccggctaatgtgaacgagtataaagaaatagttggttgattgtaatatgaaaccaaacaggctgcagcaggattcacgattttggagtaataatcatactaaccaagagagcattatcaagacactttgctgccgtttgatactccttcagtttctcttcctgttgctgttcaaaagttttcagaagtaaatgagtaacaattgaaagcagaaggaagtacgtgactgataaaccagaatatgacactttcagatctaaggccctgtttggcacagctccaactccaagttatttcagagttgggttttcttagctccataaattcttggagttggagcagctgctgattcaactcgaaatctgatgatattatcagtgaaaaaaaatgtggtttcaagaatgaaccaaaggtggtttcaagaatgaacaaaagtgtgcacattacagagccaggaaagctactgtactcaaatttagtcactgaagatagtatcataacagtgttgagtaaataaagcgaaacacttaagcagtactaagtataatgactaccaaacaagaagtaaaagaactattaaaggcactatgttcaatttttttcatacactgaatagttcagatgtgcatgtaagaaaattaagacagtattgtaaccattgtgctcagaaatgtatccaaagtataacttctacaaaacagaaattaacagtgtgttcctatgttggcatagagctgaaatgaaaatatgaaatacaacttcagaactttatacaaaaacatagtacacggcctaagataatctgtagctccaaagagtacatatcaaatcaattcagcacttgaaacaatataaaaaagcaacagaccatgaagaaattgataaaatggtatctgttcaatgatgtacatcattaccttagcatcatcatcttcttgtcggacttctttcaccacctcctcctcttgacgttggtaaagctgatcaaacaaataagaatgatattttcaggcacaaacttatagtttacactgcatccaaacaagtgacaagtcgacaacaagtaaacttgagtagtgataaactagtgggaccacagtaatttaaaccttatttgcgcataaacaaaactaccaacaatccaagaaatactatgacaaattgtgcatgaagaagtagaattcaccatccatagcaaaaatcacagaacctataacctatagtgcaattcatatacccatatagattcaggttatagaaacaatgcaaacattcaaataaccaagctgtagtaaagatgcttgtaagtagctaaaatatagctattacatgttcaattgttcgattgtttattgtatattgaagaactaaagggaacaaaccttgcgctgctcatggatgagtagagcgaatttgtcaatgtttgggacagcgagcatcttgggcataaggtggttgcggaagtgtcctggggccaccttcactacctcccccgctttccccagcttatcaatcgtctacagcattccaggaagaaaccattgagtgggaaaacaacacagttttaactcctaacatttccaatcaccatatgacaaaggcaccgccatgagatcattttgcaccatgaagtgtccaccagatggatgatcgtttctcaattgaagaagaactactagctcaatacgagcggtataatctgaaatttctactccaattatccctaagacgcgcggaataatctgaaattgctactcacttgactaacaacatttcgctcaaatccaaacgtcgaatcaaataatcgacccacaaacccgcactcagatcgtcgcaatgctatacgcattccccaccttccagtaacctcgcacgcatcaaagagacagcccaaagcgaagtggccgcggatcgaaagggacgagctggagaacaggctgttaccgtggtgaggatgacctccagcttgcggtagcggaggccatggccggagaagagcacggggttggcgccgccggctgcggcgaggcagtggcggcggaggagcgcggcgcgggcggacgccatggcgacggcgaacctgctgggtggagtctccgtcgtcctaggtcactagggcttattacttgggcccatatgtttgggccttgtgggccgaacatgacggtttgggcccactccaaccgatcacgattggacggtcgcgattcactaatcgaacggctcccgagaactgcacgagtcgagctcccccgccgtcaaggagtcaaaccctaattccccagatgcctctatataagcacgagcaagagaagtcgtctccatcatcttcatcctccacgccgctatctatcttctttcgcatggttgcatctgcttcctcttcttgttcgctcgtctcgggttgatctgcgatttcagatcttgttctttccgtttggtttttcctttgccaggtattttgcaatggttaatttactttttcgttgttcgagtgggggatttgatttgtgtttttggtgtcgaggacggtgaagatcgtatctattggtctcgttcgtcgtaactggcaaattgtttttgccttgccgaccatcctgatatatcaccacccatattccgagtcctctgtaaccaaatcaattttcgattcctcatgagatcagatcttctttggtgattttctttcgtttggctcttcttttggattcattgtgcagttatattggccgatgattagattaaaatatagacaagcatatgtctgaattttcatgtggaaaagcctaatcttctctatgaggtcagatttattgatgcatgtcattgtgttgtatttttcgtcatctttatccttttcgtttacttttgaggcctatgatgatcaatgtggaaacctttctctctgaaatcttgtgaggacataccctactactgccttccttctgaggtctcttatcattgtttggatctgactaaaaatcttattttgatttttgatatggttttaaaaactatgattttttaagaggtttgatgccgatgtggatgtaaattggttgcaaggtcgagtgatgagcaaaaatgcatagttcagatgatcaaaccctagtggttatgattactttgaataaatagtctttcgctcctaactgacggcctttacgcacccatctcaaaaacggttactaaagatttatttattttgccatatttgatataatttatgttctctgattttgtctatcttaacagcccgtctttctatttgtgttaaacttgagcgtgaactgatcttgctgtagtgctgcatctgtggatacaacaacctaccatgaacctaccatgatgtgatggagatgcgatggaaagttgggagattgggggaagttgtgtgtgaactaaacgtggattggggccctgtttagttcacatcaatcttcctccaaattcccaacttttcatcacatcacaatcacataaactctaattttttttcaaactaccaactgtcaaactttttctcaatttcaggatctaaatgcagactggattgtggattgaaaattgcggctgaagaacgtgaacattgaatgcagactgctacattcgcactgttttgtatcagtccgttaattctacaatatttagctgtttagtaattaaacaatggtcctgtcatcttttgtaacctgttaagattgatattgaataaatcatatttgcgtattttaacctagtctttttaatgtttattttagcagtggatgctgctgtgaaaagcccatgtcagtactactctattttgatgatcaggcccatcacaatgtaaacccaatagcttccttatctagctggcccaaagtatttatagaactattctattctttcggcttacgcacggctcgcttcgtcggactccgctgtttcggccgcaacatctgccgctccttctccccttccctatccgtaaccctaaaatctcctgctgatcctccctctgttgaggctgcgggaggctgaaaattttgggttcccccgtcctggaggaaatgctcgtacttttgtcgatgtgcctgcaagattttgtccttttgtcgaggtgtgaatctgagctacgtttgtgattcctcctctttcccgttcgtttgtgggcaatttggagatgttaacgcgatggcgtgtttggcgaatttgcgaggctctttcccgttcgtttgcgccaatccgcttctactttggctccgcctagtaagcctgaaatttaattgcattttactagtttactacggagatagtctttcgctttaattgtacttctcccgtttcgtttcacaataagtcattttagcatttcccatattcatattgatattaatgaatctaaatagatatatatatctaaattcattgacatcaatataaacgtgggaaatattagaatgacttgcattgtgaggggaagtagatgtttttttttttcattgagatgatttcccagcaaatttactcttgtggtagtgggatatctaagataaacctgatagaacaaatatccgtttttgtgccgaaagacacttcggtgggtggatgtttcccctcacgaccactatgctcttaaaaaattacactcgtaatctgattaatttctgattcctgcttttcatccgtactttatttcgaagaaaagggaaatgtgatatagacttatgtctgctgtagacctgtagtactacaggacagtgaaatgtgatagtataatgccactttctttttgccatgtgatactaatttactttgtgcgttattccaagtcttgagatatccttcttgacaaaggtcattagaatattcttttgcaagttgccaggtggcctttttgtggtgactggattttggtgatgatttgcagcctcaggcctttttgatcctaacagttttggatcctatttgtcttcgtatgattgttctcatgcttggcgagaagagtgatgaaaatgttgccatcgttttcaaagtagcaaatatgaagggtatgattcctgtcctagctatgaacctagtgtataaattagcaaatggaccaattatcactgtttggtttcttttatgacttttggaatttttatgttagcgtgcttgctgtacatagttcacagacaactgtacatacaaaagtaaacgtgcacaccagccaccagatattacttgatatcattggggtagctcaagttctgttaggatatgaatatggaagaatggaactccttgtgacaggttatatatctgtcctgcactatgctgttgtttagggaaaaaattagcaacatttactaatccaatgttagtattgattcttaaagcatcttcaggttttgctagaattagctaaaaaaaatataacgaacctagcttgtacaccacatttctttgtaagagactgtcaaattgagaagatgcttgtcttatactccctccgtttcaaaatgtttaacaccgttgactttttagcacatgtttgaccgttcgtcttattaaaaaaagtttgtgaaatatgtaaaactaatatgtacatgaaagtatatttaacaatgaatcaaatgatacgaaaagaataaataattatttaaattttttgaataagacgaatggttaagcacgtactgaaaagtcaacggtgtcaaacattttgaaacggagggagtagttctggaaacaattcatccctgaagaacggtagtttataataatgttacgtaaagagcagtagagtaatgtagagtgcgacttggaacagtagcacggaaaacggagcgatccattagcgcgtgattaattaagtattagctattttttttcaaaaatggattaatttaatttttttaagcaacttttgtatagaaactttttacaaaaaacacaccgtttaacagtttaaaaagcgtgcgcgcggaaaacgagggagataagttgggaaaatggacgtccgaacacagccttagcagaactttgatccaaaaacctcttgattcttgctgtccaaaccatggcctctcattggagtgataaaccttcacaagagcacaaaccatgtcctgtagtactaattgctggcgcgcatgttttgatatgggatccatgccatgtgagaggactgttcactcttaacaaactgacacaaaatacactggagctgtttcatcaataacctaaagacattagcattttgagagtggctatggctgcaaaagtccaagtggacacccaagagatcatggtgcacagactgaattactgaagagggactgggagaaagttatgactgcatagcagacaagctgcatctagtgaacctcactgtttactacatcactagaggacaggttgcttaggatatattctccaaactaaaactgtaaggaaatttagtaacagacaatatagtctggatgtattaataagtggagaattcagtaggtaaacagactcttgctactgtcctggccctgtttctgaaaacaatgttgtctctatagctctgttcaaccttttttttttttcaaatggtcaggctgttgcctacgttttatattaagaaggtgtcccatttaaaaaaaaacgagaccaaaccttacaatgcacagttaattaggggaaactgagcgaaaaccacactactctaactaacctaagctaccaaaagcgtgaaaaaagaacaatggtggagcccaaaacaaccatcgataaagagcttgttgtaagcgacacaaagacttcgactttcacgaggcaagtgctatcattgccgagcttgtcgcctagtgacacggcagctccgactccacggctatcacatcatcgttgccaaaagcatcgcaaaaacgagcaagtcaccgattgtccactttgaacatcagcccaagccgccagagcaccacttcttgaacacagctagcaccaacacccctcgaagactacaacgtgttatcgttgccaaacttcattgcaccacaacaaaacagctccgacttcacctagaagaaaacgaagaaagttggacgctcaccacatccaagaatggaacccaggaggtgaaggcctcgccgggggcccacgaacgaccatcgttgcacgggaaggttttggtagtgagagaaggcgccataacaacgcctccaaggagggaaacgacgcctaatggcgccgctgttgtcaagccaatcaaaggccagccaaggctttcgccagcgtcatccaaaaccacacaacccacccgcacttcgtacattgccggaccaccacatcgtccctctagccaccaagcctagcccgctgccatgccgttgccatcctctgctgcacgggttgaccaagcgtgacccgtcgccacaagcgcccgcaacgccgccgacccgactagatccggccaaggcgaccatggatccggctgtcaaagctcggccagccgctgccatcatcaccacgagcgcccacactccgctgcgccgccgccaagattctctcccgcaaccgccggtgagcgcagcaggcggccgccactgtctccgcgccgacgagggcacgcaccccccctccgttgcacgcgcccagccccctcctctgtcactggcctcccgcagccatccccgcactggcaagggcgcaccggcccccacctcgccttgacagctcggtgtcgtccttccggccggtagggcaacggatctggccaaggggcgccagatccggccgcccccatcacagggccgccaccacctcacgcctcctggcccctccaagatcgacgacgccgccggtggtgagagcactatatccggccggatccgagctcggcggccccggagctggacgtcgtcgccagcgccatgccaccggcctctggcccagatccggcggcgccttccccgcctccacctcttccgtgcacccgcctcaatgccggcattgatgtggccggctccatcttttggtcctccgcgccggaaccgggggtgaccgccgccgcgagccccgccagctttgccggccactcgctcaggcggcggcgaggcagagatgagagttggaggggggcggtggcggctagatttccgccgctcgagtcgcccacgcaggaggcgaagcgggggctgtttccttggcaatcaccgtcaagctagaaaaacaatcgggacacagttctgttcaaccttaaaaaccagttttccctccaacgtatcagttgtttttggcctgcaacacaatttacttctatccacggtccattgctggacagtggtaaaatacaaaaatacttgtgagatccgaggtgcaaaattagtagactggagattataagaaggctgtgctgttttcatcagctgtgaattttttaataatcgtccttcataccatgtcacaaatttaagttactataaaaaatgctcgtgcgttgcaacggggaaatctactttaatcttattattgttatatggtttagttaagatgaaattcactgtgcgagtttgcttggatatatatatttttagaaaatcatgagctgcagttagaagtccgatcgtctcaagttagcatgcaagtttttttaaaacagatttcttatatgatttcttctgtattaccaaaagtgaacgatcttaaaaaccgactcaattacggatatatattttcaaaagcaaacgaacttaaaaaccgactcatacacggatgacataccaaaatatcggcaaaacatcttcaatttttataatagtagagatagagaagagatatagattaaaaccaaaacataaaatcaaaaccgactcaaatacggatgacgaaccgcggaaacatctttaatttttataaccgactcaaacacggatgacagaccgcggaaacatcttcaatttttataatagtagaatagaaatagatagattccaaaagcaaacgaacttaaaaaccgactcatacacggatgacgtaccaaaatactggcaaaaacatcttcaatttttataatatattagagataagttagactggagattgttcttgccgctgtctataaatttaagctatatttcatcagaactttgatcaagccacaaagccatttcttggcatccttgtttcgaggggacctttgaacaactaggtacaacagttgtgtaacgctccgcttttcgtgagtcgttaaaaactaattcggcaaaatcctaattgcgaaaattttcgttctttgtgtgagagtctaagttgtgccaaggatctcaatttaatcccgttgttccctctcatcgaaatcgaaatcctccacctcgaaaaattccttttccgattcaagtctctgaaatcaaattctgaaattcaaatccttcctttgaatcctcgccaaatacttctacgaatccagaattattcaaatctcgcctcgaatccttcccttgacttcaccttatgttcctaaagtcaaagtatcaaggttaaattccaaaaatccttctcaaattctctccaattgaaacccccccaccaaatcagttctcttggaaaaagtctaaattgcgtccttcttggttgtgggccgtttctcccttgctcggcccatttctactcagctccctccacctccatgtgcgctgcacgcgccgagagagagaggcatcgcctctcttcttcctctctctttcctcgctctctctctctgcttcctttctctctctcccacgccagcgctgccgccatcgccgcttcccgccgtcgccgcccaaaacccgccaccgccttcgctctttcccgcgctcgcgcgtggccgaccggccggtcgttgccgccgtcagccctgccgcgccctcgcgtccgcgcgcacgcgctcgcgcgtgggtcgccgccgcaccagcctcgctgccctgccgcgctgcaccgcgcagccgcacggccccgcgcgcgtgctcgagccgctccacgcttttcttgccaaaacccggaggccgagctctccctctccctcctactcccttcccgaatcggcttggagcgagcctctctttttccccttctttttccctttcccaaccaccatcggcgtcaccgcctgccaccgcctggaccacgggcgcgaccgccagcccgcgctcacgacccgaaattcggccgtctgatccaccgccttcgccgcccaaagcatccacgccgtcgccactttcgcatcgcccatgaaaccgccgctgccgccagccgagcgcttgaccgccaaggtcggttctcccctcccaaaccgacatcgcctcaccccgcgcctataaaacccgcactcccctccctcgttcggctcctagcctctccaccatcgcaccgtttctcaggccaagaacgctcgcccaacgccgcggcctcctccgtcgctggtgttcccttcctcgccgccttgcgtcgccgctcggccaacgcggtgctgcccgccgtgaacaccatcctccagacctggcgccgccctccccgaagcccggccgttttccttcgccggcttcccgtttgctcgccatcgacgccgttcatcgccatcggtgagctcttcacctaatcctcctcgttgccaccctcctggatcaccgtagaacactcccgaaccgccgctttgatcgctggacccctctccctccccggcggcgttccgcccttccccgcaccgcgcctcgctgtcgccggcctctctcagagtctctccgccccatccgaccccgagaacaagttcccagagtcctagagatgctcccgccaccacgaattgaccccattctctcccggcgtgttttcccccttttgctcgccgccggtggcagccgtcgaaatccgccgcctccgtccagttccggccacatccgagccgaggaatggagtctgcgtctccttttccctccctccggtggtctcccttcctcccgcctcgcctcgcggccgctccgccgacgcgcgccgccgcctgccgtccatctcccggtcggtctcgtcttcctcctctcgccggcctgcgtggctgccacgtaggcgccacgtcggtgccaactcggctagaccgagtcaaaccggccagcctggctagccccctccgtgcgcacggaccacggtgcgccatgcggctgcacgtgggcccgtcgcgcctcggtccacccggcgcaccaatcgtgagccgcatccacccgaaaccctaaacgccgcccgcgtgctcccatccctccgtgaaccgtgtcgccgacatgcgggccccacccgggacctcgcatggtgggttcggtccacccggactgccccctttcccttccgcgcgcccctaatgggccgcctccttgcgcccgcgccggcccaatggctcggccgagcctccttctacccattgggccgcgcctcacgctcggcctaaaagtccatattcctccctccgtccaagtcagtgtccatctctcatgagctaaaagtccaaatttgctccctctcaattttattctctctcaccttcttgttgaccccacttgtcaatgagtcaaagatattcttgagaatgtcttttccaatattccacaaatatttctcttttctataaattcaataaatcatttttccctctttcagaaatcaattccttattccaaaattccatgaatcattttccttggtcagtgactgtcaataatattcttgagaatattatttccataaattccgacaaaacatttccttgtccagaaaatccatttagacctccaaaattcatatccctcgatccgtagctccgatcgcctccgttccacttccagtaattccgtaaaattgagatctatttaatggcactactaattagtctaaataggatctttcttttggtcctttgtttaggttttcgattgtttgcgtatagttgcggttatcggattttcgtcgatcgcgggttttctcgaagattcgtgaagcttcgtgaagaccttgagcaaggcaagtcaccctttgatcaattgctcctataattgaaaagtcattattattttgtttgcaacttgcattattagaatcacacacttaacttgcttggcctcggtttgcgtgccaaaccgacggacctacccagtagtcgcactaatttctgtaggtcgtactaccctgattccttgtcgctccacccttgtggtacctcggtattcgtgctctctgagcgcgtataccaaatatcccacatacaccgttgtttgtcgaaaacttgggaaatgggtttgtgaagccttcaaaacccgacatgtggtgtcggtgtgtttgaaaataaaatgaattgtgaaaactcgcgatgcgggggttgtgcctatgtggcactgtcccgtattcgcatataaggaccgattcctgtgggaaactcatcgaacataatcaaagtgcaaccacaaggtggaatgagacaccctggctaagtaactagtcggttcagggaaacctcgcatgccaatagttgggaacgccggggcggggtcggacaaaccgggttcctggtaaggcaaggacgagaagcttgctcacttaccgatcaaggtggttggacttgatttgtgaatgcctaaaatggcctatacttacatgaggatttgatccttctatgtggcatgaggtaaccctgggtcggcttgggaaaggctttgtcgcgaacctctgacaccggccagtgtctggagtaagttcgtgtcttgtgggtaaagtgtacccctctgcagaggtgggtaaagttcgaacagccgtgcccacagtcatgggcggatgtgaggtggttcccgttgcgtagatttgtttgcctgtgctttgtgaaaagttgttgtggtgtgggaatcgtaaccagaatcagcctatgtggcagatggacgacctgagtggtcagaaacgaatctgtgtgattcgggatgtctgcgggcatcatagactaggcttcccgagtggaagcgggttgttgtgctgctgggcagctggactctgggagtccgagaaaatgaaaaaggctctgggagccgattaatcaagtggaatggctctgggagccgagaagtaatgatctgaaccaggaggtcggtacattaccaaatgagctgttgaaaaacatctcttaaagtcgaatcgagacgcaagtctcttttcggcccaaacttagaaagaaataaatcacttagtgatttcaaaatgtcttcaaataaaagatttgcaaaacaaccttgcctctcttccaagcttgcattaaacacctaagttcccgtgacttgctgagtacgaaagtactcaccattgctctatataaatatatatatatatatagttcctccgccctgaagagaagataaagtgaagtgaagattagggtttcgtcctggttcccagccgtcgcctgtggtgttgggtattagaccgttggttctgctgctgctgttgttggtgttcgcctcgtccgtgtcgtcggttgtattctcgggctgtctgagctgcagcctaagttaaggtaaataagtcctctatttattttaaagattgctatgattcatatttgtcaccgtgggtaccagcactatgtcctgggactggtaccgagatcgcggtttcgtaggaagcggttcgcaccgttttccctacgacacactcctgtcaggtgccgttgtacggcggtatcagattggggtgtgacaagttgctctacaaggtcattcataagatatgggccacaaatctatagatgatgtctgtcagctatgggtgataatggtgggttcgacgtgcagttccaatagccttccaaaagaagcaaaatattttggtttaatatttttttttaatatacatattgtcttgttaggatttgctccattattattcatgcatgaatattttctgcagtcttaactactccaaaatgttgatatgcaattactttgcctatcagctctgaatgagtgaattcttcattactgatgtttcgttgtccctgtttcacttggggtcaaatgctaatttcttcatgcttggttaatgaaaatcctttttctcttagacagtgtgcttctcttagacacttgggtctggaggactctactgttattaatgtattaataaatttacttcagttgtgaacttccctactgttctcgaaatgatagctttattactataggctagtgttgatgcctcatagaacacaaactctccaacataattactttagcaaggtgaaaacacattccagattgtagactactacgagatagtagtatcatgtattgtatcatgagtaatacttaataagcgtgctttacattaggtggaaaaatatattgagataacaaattacgcctgctttagctgttatatgcatgcatgttcctactgacttgcttggtttacccattaaatgacttctgttattaaagcaaggaaaaccaggagttacatgccaaaactccaggagtacccttcttgagatcgactggctacaaaggaaaaggtacatcttcccatggagttttgtatacaatcttgtgtaacttttccctattaacagtacaaatattatgtacaatgtcaacatatgtcccctgaatgtctaaattcttgaagattgtccatcaaatacgcttcagacatatgttccctgaacatctctgcatctgcaagtcagtttcttgcacatgcacacacaatataaatgtatccgacctatcttgttaaggatttatttgtgattaccatgaacagtgcctttgagcaaacacttgaatgcatgaggtaataacacacatcctatttactttggtatttgcatataagatagagacattaattagccaccccaaaaggggaataatcgactacaccactgtacatacagtacatgccctcccaacatggtatcttcaactggacaacgtttgtgccaattcttcttgagagtatttatctcccctgctacccttcgaaatcagatgtagctttgctagttcattattccaccatgtgtgcttgacccaagtacccaacacaatcatgtattcttagttagatcaagagaacaccatcatcaagcatatcaaagctaagccattctcatgaatttctggggaggaaaatgagtgcaagtgaacttgtgatcctatttccttgacagttgacaccttctacaaccaaaagcaccattgatccatcaaaaaccgccacaagaggagagttgcatgcatacctcctgctgctatgtgttgttcccaccagcttgtttgggttcaagggccaatagttgttggcgcagggccatctggactcgctgctgctgcatgcctgaaggagaagggaatcgacagccttgttcttgagcgctcgagctgcttagctcctctatggcagctcaagatgtatgaccgcctcagccttcatctacctcgtcagttctgtgaacttcctctctttcctttccctgccagctaccctgattaccccacaaagcagcagtttgtggcttacctggagagctatgctgcaaagtttggtatcaatcctatgtacaaccatacagtggtgtgcgcagaatttgacgagcgactgatgctatggcgggtgaggactacacaggccactggcatgatggaagatgatgttgagtatgtgtcgcagtggctggttgttgcaaccggagagaattcagaggccgtgctgccagtgatcgatggcttggaagagtttcgaggaagtgtcatccacactagcgcatacaagagcggttctaagttcgctgggaagactgtccttgttgtagggtgtggcaactctggcatggaggtgtgcctagacctgtgcaaccacaatggttaccctcgtattgtagtaagagatgcagtatgtgatttttcctctatgcctgttagttttatacttgttttatagtttatgccattctgtgtaatatatagttgtttatactttatattcattctttgcccaataaaactcacatgtagattatagtatgtgggatgtttacttgttggtttcctttagttagttctttgacctaatgcctgtgtttgttagaaagtgcaccaggagcaacacttgccctatacttccatggtgtttgtgcatctttaatatttgagcaattcatggcattcatccaaattattttggtctattgattacttctctcttaaaatgttttctgcccaaagtcgaacctcctatgttgtttatgtgtcaagcttagtaacgatgccctatgtcgggctccgtcagtggtttcaattgttagtgaggttgttctaagttatggcgagtgttgtgtggttgttcagccagccggtggttctgtattcttttcttgcaacccacctagggtttttatttccacttgttgaaatataattagcagttttactgtctgttttagttttttttaaaaaaacttggttgtaaagtctaattttttatttagagtttttttttcaaaaaaaatgaaagcactaagtggtgcatggcaccttgtcactgcaatgagaacacatcgttacgaaacactagtacaatagattgagaacctagttttcttgacaaaggcagtcctttctgatggctctaaaattttgaaatggcatgggtttggttacaaattgctaaatcagcttatattgttagatatagtatactgtgttgggtacgaggaaataaggatgaaacccatactttcacaggcatattactcactgtaaaattagttctgattaacatttgttccaatcaccaagccaaaaaaaaacaaaagctttaacctcgttagcgtgccttaagaaattttggatcatgggtttgcaggtgcacatcttgcccagggagatgctaggtcagccgaccttccggcttgcaatgtggctgctcaaatggttgccgatccatatcgtagaccggattttactgcttgttgcacgagcgattcttggtgatacatcacaatttgggttgaaaaggcctagtcttgggccacttgagctgaaatcactgtcaggaaagacacccatccttgacattggcactcttgcaaagatcaagtctggagatataaaggtttattttcactatttttccaaaaatattcatgaacattcatagcctcttacaatcatgggttgatttattttctggatgattttttcttgtgaaggtccgacctgccataagaagaattgcagggcagcaagtaaaatttgtggatggtcgttcagagcagtttgacgccattgtacttgccaccggctacaaaagcaacgttccctgctggttaaaggtatatggcaatacagctgatgttccttttgctgtagaagaatttcagtatttcttttcctgaaaaacgtgttcaccaatattgagtcacctagaaaggttgagcggtcttcaggctaggcggctagcaccataaggtggtgggcttgccaacctaggttcgagcctcacttttcttaataaattccgatatgagggctcctcctctcgtatccagtgttttgtttaatattcagtcactcaagacaacctacagccaatttgaaacaagttcatacaaatgaaatttgtgtacctcctgactctttggcctcttttttggcgccatttggctcactttgagcaggaccaagggctgttttcagaaaaagatgggttgccaaggaaagcgtttccaaacgggtggaagggcgagaggggtctatactccgtgggattctcccgtcgtggcctgatgggaacggctgccgatgcgagaaggattgctcatgacattcatatgcaatggaagtcgtccaaagggaggagtcgtccagccaaaccttctccttagctctgttgtagatgctccatggatggcgagtgtgtgtaccgtcctgccgtttttggagctgttttgtttttgattggccaaccgatttggcagaaacagccaaggccgggtgtaaacatcatgcaattcgcggaagcgacgattttcaggttccacatgttagagaactttgctctgtttggcctggccttggtaatgaatctactcttgttttggcttgcgtgatgatggcttgcgacccctctccttggaaaagcaggaaagggaaagggcatcatgaacaggagagggagacatcgctgatggggagctgagaggcaaaaactgtaacagagatccaaatatccaatgcagttgctattgtgcttgtttattttctgatctaattaacagttcaaatcagctgctacaatagtattacagttggtcttgccattttgctttgattcatgaggtggtgccacttgcagttacagtagcaactgcactgcactgcacagtaaccaaatctccaaaactgacagcacggagaaagacctagggtcttaccggctagcctcaccacctcttaacaaacatcgatgtgagatttaaaaattgacagcatgtggctattggatatgcggagttgacattttggttaagactggcaccaactatacgcttatgtttgattgctgagatacatacgtttcacttgctggttgttttactaatcaaattaaaatattcggcaatatgtttatacatagattatgagaaaaacaactatactagccagaaactaaaacatctgaaatcagttagcatcaaacgaaattcaatctaatcaataccaggcggagccacgcatatgtcgcgaatactgacaacaactaaacatatgcgtgtctgcaccctcttaatttctgaaagagatctgcgacttgacacccattaattgggatgttcctctgctaattcgatgtcatgtagtactagtacctgtcatctacaggctcttttgtgggaggaatgggtgttctaggaaccccagaaactgcaagttgtcatttcgttaatgaaatgggagaggtcattatatctttctaaaataagagtgacgtgttctctctccgttttaaaaaaaaaatctaatcatgaggatgtatatctttgacatgtacgttgtccaaatacatctctagaaatttttttttaaaacacaggagtagtacttcaggacatgcacaattgtttatgtactgcctccgttttaggttttaatactttttagcattgcctatatttacatagatattaataaatctagacacacatatatatctagattcattaacatatagataaatatgggtaatgctagaaagttttataatatgaaacggaggacgtacatgagcatgcagccatgcacacgtcgtccaatatttccagccaaagagagcaaaatttagcaaacgtaacggatatttccgtttgtggtgcagtaaaattaagacgctaatctttgacgtttcaactgttactatcccttcaagcaatccatgaattttcttctcctttctgacttattttcttttccaattcctagtttgttttaaaaacggtgtgctgtggtgatgtgtgcgcgcgttcgccagtgcttctctttactccaaaagagtattgggccaggcccaaacaaaaggcccagcctgagcgatagttgaaagcccattagccgtacaaaaatatacgacaaaacacattttgtaaaggaaaaaaatgaaagtatactctttttaatagtattctgtgtttatatacctgcatagaaaaaaattgctcaaatatacctctaccacataacggagacacgggaccgcctcagtgtcgctcttccatgccgcaggaccggtgggtgcgca

SEQ ID NO: 13641 - DNA, 32378 bp, Oryza sativa
  unsure (1)..(32378): unsure at all n locations
taaacacctaaattcccgtgacttgctgagtacgaaagtactcacccttgctctatataaatatatatagttcctctgccttgaagtgaagatgaagtgaagtgaagattagggtttcgtcctggttcccagccgtcgcctgtggtgttgggtgttagttcgttggttccgctgccgctgttgctgttggtgtttcctcgtccgcgtcgtcggttgcattctcgggccgttctaagctgcaacctaagttaaggtaaataagtcctctatttattttaaggattgcaatgattcatatttgtcaccatgggtaccagcactatgtcctgggactggtactgagatcacggtttcgtaggaagcggttcacgtcgtttttcctacgacacgctcctgtcaggtgccgttgtacggcggtgccggattggggtgtgacaagaacactttcggttcaattggatcgataaatttctaagaaagataataatgcccctaaaaccacatgcttcaaactgcatgatgctatagtaaaaatttagaaattatacaactctaaatttaccatcacattatattccatcttagctctagtttcagctcaaaatattttgaccatagaggcatccttgtttttttgaaaaatttctctctccaattgagtcgaaagtgtcatccaacaaattatcaatttttaagtatcttttagccgtgacatgtttttataatgtctactagtaaattgtacattttttaagtgtctgtagcaaattttgccataaaattatgtattgtatcgggacgaaagacatagagagagtagtgtgttagcaagctctgttgctgtctgatttactatgtttttcattttgctttttctgtcacccttagtgattatgtataatttctctggtacttaaaataaaaccagcaacgtttggcttaggtttaaaaatacttgtaaatcaattctaaaaccttaatttagctatgtcttatatgtcaacgagaagctagccaagccaggcaaagcatgtctctctcttttattttttggaatttccatggtagaatttattaagaatccctaatattgaaatatgaatagccgcaagtcccagcgtgtaaaaacagcttagttaggcagcctgaaccagaagaattagtggtgccccgacttaaaacgacgtagaccgccaagaaacgaaccaaccggcaaccgccgccgccgccgccttcgattcgattccgatcgagttggagaaggccgccgctgcccaatggctccgctaccctcgccaccgctgctggccgaatcgctcgcgacgctgcgcacagcctcgccgtcgccgcccatcccctgctctcctcgccgcacccggccgttggtttcagctaggttcgcaagaacggccggccgccggagccggagcacggggggaaggagagaccttaggagctgtgcctatgcggcggaagctgagtacggcagcgcggaggatgaggtcgccgacgacttctactccgttcttggcgtcgtgagtgttctggaacattctgttgaacaattcctttgcaataatttcggtttacagtttattaggttagtagggaagaactgtgcattttagactggaatcattagagatcaatttcttctctgtaaaaaaaaaaatcctacttttggtgagggaggaaagatgcttctttttttcagagtggactcagacaattgttctgaacttctgatgagtgatgagtgatactctgatagtggttttcctttgagacgacggatttgctgctaataatgacccctgatttttgcatctccagatgccagatgcaacccctgaggaaatcaagaaagcatactacagttgcatgaaagcgtgccatcccgacctcagtggggacaaccccgaagtaacaaacttctgcatgttcatcaacgaggtttacacggtaaaacccttcaatgaaaccttgggtccttgtgattgcatatggcaattgtcttggaagatgtgttttgcattgaattcttttttgttcaaaacgctaacatgaggtgttgaagagcaggtgctgagtgatccggtgcagcgtgcagtgtatgatgaaatccatgggtatacagcaaccgcgaccaaccctttcttcgatgacagtgcacccaaggatcaggtgttcgttgatgagtttacctgcataggtactgacattttttggtatgaatagagctataaaagatgctatttggttcttcataaagagatttgatatatttcaccttgttgatgtggatttaggatgcaaatattgtgccaatgtgtgccccaatgtatttagaatcgaggaggattatgggaggtcaagagtatattcccaatcgggtagcacagagctaattcaggaggccattgatagttggtgatgctctgaaacccaacccagcataatactaggactgtttatctgttcataacagattactgaatgtgttattcatgtgtgttatatttccatgtccagcccagtcaactgtattcactggacttctgctgcacagctttctctccttgagaatgaaatgcggagaatagagcgggtgaatgtaagtaatccttctttcagttatttagatgtacggtatatttttgtggtcatataaatctccagttctttggtttgattattaggagtttaggaccttatggttaacttctataacatagatgtaatcacaaaaactcctagttaaaataaacggtgcacaagaaagtttcttatatccctgttcctttctttctgttagcatttttctggaactcaagtgatattttacaggtgatattatcttgttttctcctaatagcctagtagtacactaaagggaatttcaattttgaacaggttgggctgatgagtgctgggatgggagtttcagttgatgtattccgattggtaaatttgtatgtctttattatgtaaatttggcatgtactatctaaatttctctgtttgcatatcctcaagattctttcttccatgtctatgttaaggctaatagagtatagataaagcatacttttgtttaagcatacagattatattatgcataatacttctctatgttgttaattttacttgttcttaagatattttctatttaacaggctagcgtgcgttgggaaaagagacagtcaaaagttttggtatggttccttcccccttcgtcatctttgtgtttctcatagagttagatgtttttaaggatttcgttatcatttacctatttgtatctttgcaaatgggtcattgttttgtaaactaaacattttatgtaaacctttattttgttacaggaaaaaattaggacacggatgacaaacaaaaagtattcagatataagtagttcttggactgatatctggggatccccaactcgataccaaggaaatggtaagctaaaacaaataacacagtttgttagaaataccttgcatggtaaccatgcagaccagcatgtattgtgtaaatataattgttgttaccaaaaatataattattgctcattcttgtatttctgaatccgattgagatttgctgatgatatcagaagaagaaggaacagagagagcgaagagagcagctgctgctgctaggagatggcgagaatactcgagaaaaggcgcagacaggccaccggagtacaaacttccagaggcagcgggcaataaagagtaatagcagaacaaagaaatatttctatcctgcttacgttatctgatagcatttcgtcacctgtacatatagccttattgtttgaagagagctgacatgtagattgctctctcccaattcctcatttttcatttgtaatatatagctgataacaataacctgtagaatacaaacgtcaatagttaaacattcggaatgtaaaagatgaatatgtgcacattctccttcaacaatggtatacatcctgaagatccatcttttcttgtgtgtgtttgtgcagatgaattccggggcaaatttcctttggcagtagtctggtaacccccaggcatcgatgatgaactgcaacatctgccaaaggacaacttgcccagcaatgcagctgcacatctcatggtctcaacctatttctatccgtgtgccacatttagtttcatgtgtagagcgcacagttcactgatcattgtgcagtgatatttatactcgctcctgcatggtgaaaggcagcaannnnnnnnnnnagcacaaggccttttgcagctcctcctgcaaaggcacacggaggctgataggatatactgtaggacaatgcctgctctctagattgtgcccacttacaggaacaaagtctgaaatggagagatcattgtagtgcatatatctccaatctttttaggtcatggggctacttccccgtttattcttagcctagcttcttgctgtccagaccatgtaaagttaagtagcatcaaatatctgctgagaaatctagctcaatctgattttctccactggtttcagactttcagtcacacaggtcatttcatcaccataataatgcagcagtacacaacgcaatttagtagcaagctgatctccagcctccaggaagcctctgcagctaccacccagagctggacatatcaccggtctgtcggacaggctcaaagggcctcgatcgtgtgctacttcagaaaaaaggcaggattttgcagattgattccccttgagaccactggaaaacaaggatcgaatcaaggggaaaaagtgcccgcatgcgagatcaaaagagagaaggaatagggatatccatgagcatgttcgctgccggtttcttggttcctgcgctgaacccgtcccactcccaccgcacgtccgcactgcattgccctatttgcccatgcatgatgcagctcgtcgatcgatcagatccatgcgcctgccaaggttaggcaagcaaaggcgccacgacgcgcgctgtgaaaacccgaactcgataaacgtgtttcgcggggactcgcccgatcggggcactcgatcgagctcacgttttcttttgtgtgtacgtgcagcggcaagataggcggagcagcgcgcggcaagggcgagatcggtgaaaccggtcgtttgctgatgtacacgagttctatctattataatgacactaccattatatatactgttgtgtgaaacgatagaaaagtgaaacccacgtattagtgattgtgattgtaatgataatgttattatggtagaagatcctcgtccttctacaggttactactcgtacgtatcgcgcgcgccccgcgcggggtactcacgtgtttttcaggctcatgcggctgcaatacaaggttgacgcgagcgggagcgttctgcgcgtggcgtacgtaggcgcgcgcgcgagagatcggtggaatcggtcggttgatcgatcgacgggcagcacagcaggctgggcgcggcgtacgtgggggttggcgcaggcggtacgcgtacgtacgtgctgttctcggctttgatcaccctccggcgcgtgtcacggagtgacggacagtaacacacaaacacgggctcgttccaaacgttaaaaatttggttcagtataagacaggacttaggctgcgtttgggagcgcaagttcccaacctgcctcccgacgaaaaaaaacaaagcattcaatcatagtgagattcaattatagtgagattaattaagtattagctaaaaatcttgaaaaataatttaatataactttttaaagcaacttttttgcgaagatatctgatctgaacatgttgaataggccagatttacatgttgagactttatttcccctcctcagaaaattttgtatctatgctactaccttcgtcacagaataattataattctagattgtttagtacatattataaggtttaagaagcgaaatactatgatttttcttactaaatagtgtatagataagagtggaagggtaattaagggtaaaatatggagaaatttaaatgagaagtgattaatgagaccattaatactctgttgcagtaattattttgagacaaattcaaataatagaaatacaattattataggacatccaaagtactataaaagacactagagtggtgatgccaccacaactacttttgtaccttttgtaaactagcataatgccatggcattgcaatggattttttctaaaaaaaaatagttcattctatatatttttgaagtctctaaaataagttattcttatcgtctaatagtacatcatagagcgacgaagaattccataataagagtgtttgattaacatttttttgggggggttgatttgcttgcgtggataggaaaaatgtaaagttttctcctcacttttcacgggcctcatatggtagttagggtggtgatggcatcactagttcaccaccaccaacatctttaaagtagtatagattagtgcgagtctatatactattatagaaaacagtggtggataccaccattatttttgtatttttttataaattagttcatgatattttctaatattatataatagtctcatatttattcatcatatattcaaataagcaaatatgtctatggcatattatatattttattctatacataataaagcatgggtatttagtgtttaaaaaagtatgttcgacaacctctaaatgaaatgccaatttgcacttaggctgtgtttagattcaaaattttttcgtcaaactttcaatttttctgtcacatcaaatgtttggacataagcatggagcattaaatgtggagaaaaaaaaataattgcacagtttgcatgtaaattgcgagacgaatattttgagtctaattacgccataatttgacaatgtggtactacagtaaatatttactaatgatggattaattaggcttaatggattcgtctcgcagtttacaggcggaatctgtaatttgttttgttattagtgtatgtttaatactttaaatgtatgtccatatactttaaaaaattgtggcacaggaacagacgaactaaacacagcgttagccaaatgcatcatgcatgcagcatgcagtgatcgagttcgtccatgttattgaccgggaatcagcacgccggccggcatgaatattgaatgcagaatgcgtgatgcgtcgccgatagtatagtccagacgacgactcgatcgcatgcagaagaagcaaagaaatgcagaccgatctgcagccgaggacgacgacatctctgcgcactatggtaatatgattacaagggaaataaaatgtgatctttgtggcctcaaatctgcattgctgggcaagtctcctttggcagtggcttttgcgtggtttgatcagctcgatcggccactgccaagggagacctgcccagtaatgcatgggccccataaagtcagagacacctcgctggtctttgcctgtatgcatgtatagctagctatatctgcttctccgaggattcgaattctcatcgtatttataggcagcgtgcagagaggccagcatagtcacgcaagcaccgcgaggagatcgaatcggcattattcgtagcacaatatatatgatatatctgaacttctgaagatatttaacggccccgatttttgtgattaaacttttgcgcagctaactgtttcagtttccatttgacgactgctcgttttcgatcttgcgctgggcgatctgcattgtgttggtgtcggctggtgtagttgctcatttcttctctttcttttaatggaaaacagcgcgagagtgccttttcattgaatagagcaggagaaaatacaactcctagggataaaggaaaaaaaaaagagaatcactatagctatatactatacagagtacgcgattaactaacgcaaccgcttaacccctgctaaatctcaaaagctagcctcttctttgattttcgttagaaggaaacacgttgccatctctttgtgatcaaagattagcatatttctctctttccaaatttcccaactaacaggatgagcgatcgaagtccctttttcggggcgttgggcgtatttgcaaggttctccaaccactgttggactgactgggcttcctcccattagttcggctccatctgctgatagcccacccatctagcgacgaggtgccagatcctcttggtgtatctacaagtggcgataaggtgcaacgccgtctcagcctcacagcgtcagtagttgctcatttcaattatcatgttcttgatcacctcttctctcttggatatacctggctaagagcatatgctggctgcaatgctgcagcctgcatgcagaaagcagctggaaggtcggagaaatgtagcagtgctgatttgctgaagcattatgccctcaattggtgttcaagaacaagtaatgcgaactgtttttttccttgtgtaacacgcatattccgtttaacttaaatctgcatccagaagtgcaggtatttctctctttgctaaatgaaaatatcgaagatgttcagagagcatgcgagcttcactttcagacctgatacaatgtccaaaaaatctcaactcctgtttacagaattacagctgaagaatttcaggtcgtgtatccaaacttatgtattgacctcctattaaaaggacttagcaaatttcaccatgaattcaccatcgctgatgaaaaggaacgaatgctagccggtcattgctgaagaggtgccatacctttatgtacggtgtttccttcagagaaaaggccagcaactgcatgctctcgaatagaggaagatccaaatatccaatggaatgtaccctgtagcagtaccatcatctcaattcaaaccatgagaacaatttgagctcgtggctgccgagggccaacgcaaagcttagaatcacaatcactgatctactgaagatcaagaaaggcaggttgcttttagtagtagataggcatgcagatgagcgacagggaggaccattgctggagcacaatattccaaaggaaacctgaaagagagatcaagagatggtgcatcggcaaataaaggttcatggctcggttgttcctctcgaatagtcctcgttctgccaaggagcatatgccatcttagatccatatctcgaggccgatggcgagctatataagcgaggtcaaggcacaaccatgttcttccaagagagcttgcagcaccaaaaaaaaaaaaaaaaggttcttccaagagagcttcaaaattcagaaatgttaaggttcaggatttcagattcagccacagtatgcagtgtgcgaccggcgaattacagggcggtttctcctttggcacgtacggaggcaaggcatgcggtgaaaaatctctagctagccatgcgtgccaaaggagaattgccctgcgattcaccaacacagccatgcagttctcgtcccataatgcaatctcatttcgcaatgcatgttcagaacttcacattagctcgcttttgtcactgaatatgataataatggactgccttgctgcaggtttactcaggatggttctcacagcaggcaatcgctcctgcagttgctctgcatgattagaaataggacaaatagggtttattgatatggttaagagcaagagtcgctggcttcaaatatttcttggagaataattaaaacttgtgacatttcttttctctcttctacatgcatgtcaaaaaaacgatatacagaagaatctactcgcctacagatcgctacagttacatgaaataaattatgcatataagttagctacatgtaaaatctaggggttctcagcgtcaatgtttcatcttggagacttagttgaaatacactttccacaaaaggcaagtcttgatagagcccgtgatcttcgtgtcctcatcttcaatgcagagagctgcagtgaaaatggtcagcatgtgtgagaaaagatcaccgcatacagaggaattatgagaaaacaggattagcatattatcatcaattgatcagcaacaaatgttatatgccatataacatacagcagctgttcttttagtactaaactgagtattgctaaagaatacccttttacaaagtacttttgtttctatttggcatatgtttattagcattacctttcgtctagtagtgcttgaagccttccaacaaagtaaactcgacttaggctccaatctcctgcaaatagatcaataatccaaaatcatacccaagcttcttatataatgtggatgaatcctatttgatagctctattcatgtggaaaatttctaggataaaataagactttgcagctctaaaaatttttcataaactactgaatatgtgcagtgctgtatcaagtgcttgttttagtgcaatattatttttttttaatttgggtatcatctgttcccctccagagtatctgctgaaaaaagtactcctctagtacaagagagtagcatagaactacttacaaattctcttgctctagcttctctgcaatcgacatagctttttgtctagaccaacctccttgttgtgaacaagtttctgccttgttaatgacatgagcaagagataccttgccccttactatgctgttttgtcggccatgctcattattcacaacttctcgtccttgaagaactatgttttcttttctgacaccggcgctgttatttggttcactatgccagtccacttgagaaggtcctacttctataatttcaccttcagtcaatatatgtggatctgattgcacccatcgtgtctgatttgaattagcaccatggaccacgttgtctttttgaagtctcctaattaagttttcacctctggaagaagcggaactatgtctagtgaaagacctccttaatgccacattggaagtgctatcctcaggatacggtgaaatagctggaacatgacctgcccttgcatcatcctttggttcgtaccggatttcaagtgttatagcagaagcaaggacagactcaaatgcatgtagaacttgttcccttgacctctcagctttggatttattcacacgagagctgaacattagttgcacagttggtgctggaggaaaagaactaagtgttagaagcaagatatattggaaaatggaaacagtgtagctattatttcgccaacacaatattcttaaaacaaaacatattacacgttttcaaggaatctggcatgcttagttttttggggggctatgtgtgtcttaataacatcaacaaagttttaaacttgctctcatcaattctagcatgaaaatttagtcaccatgtggagatgcatattattttatttacatgagatattttatggtccttgggaggtatgcggtattgagaaatgagaggtagatatatcttatagtatagaaaacatgtactattacatggcctaggcaccaagattgacgcatattacttgaacaaagcgatttatggtgtttggagggtactagaggtatcaggcacctttacttcaataaatttcaacggttgagatgtttacaggcacacatagcaagccattctatcttattgcttgattacttatgaaacagcatatttatccatcgcattacttaaaacaataataggtcatccttggatgtattctgcaatgaaatttagacatgatataactagtaatatacagagaatgagcaagaaggaatatcttgcctgtgcctaggctgacagaaatcagtcgtgcttctttagccagcatctttctcactgaatctgatcggatatgctctagtacagcctgccaaatcatctcattgtcactttttctgtatctagataaattcactctagtagcacgcgctaataatacatggttgtctggtgtatgttcaccaggtccctttcctctccgggtgcctgccatgttgttgtcagaatcaacccccagattagcatttcttggtaaaccatgaggaccagcatatatgttagtgtgatctatagcagtgctccttcctatgtccccctcagggcaggtaagcaggccctggttaaagcttgcacttgtggatgaactcggcagaacatattgtttatcaggagcaagttgaagcagagcagctgtaagccacgtcatcttatcattagagaccctcaactgtttttcagcttcagagagtgttttcaaggcctggcgtagtttttccatgtcatcttttgatactgtaatccatatattaagatgttagattgtgtggaagaagaatgtttaggtaacatgaatgctactaaaaaaggagagatcagcgatccacgtactactagcccagtcaacaatgtattctttctataaaggaaaggcgtaaataaaatatgtactagtatagccagatctataaaaggataacaatacattggtgagaaaaaaatgctagagcatgacttttacaatacatgactcatggatggatcaacccaactataaatccatctgaagagagtgataaaaagggagtgatattgcttacaggttggacatttgaagaattttcttcgaaccctttcctgcgtgaatgcataggtgccagcaaggatgtcagtaattattgtggcaagctgagacatcagggccaaaggctcaacacctgtttcagtaatatctcttaaagttttcacggtgttcacagtgtcagcagacagtgccaaatcaagcaaatcaaccaatttatcatcagaaaccaagccgacctgtccaaagcaaacaatgtccagttgttattgtcaggtaaatttttaaatgaagtatttttatccaataatataatagcaggttattttattgctactgttagaatttatacaatgtttagtaaacaacatttagaatgcgcacaatgtttagaaagcgaaaattgagtaaaaagactgaacttttccagagtactctttagcccgccttcatggtccaagtgtcaaaattttgcacacgttcaacgctaaacttaagtatgtcaaccaatgctagagtcccaataattaaatcaatagcatgtttcagaattatagaattacaatagcttgaacaaagaatgttttactactatcatttaaattctctctgaaattagaaaccagtagtatactcaataaagaagaaattttgataactattgttggatcacttacaagttcttggacaagcgacattgagattctctgcccaagcaagctcagctgatccaaagtcatctctgcatccctcagtgacccatctgaccgggaagcaataagtttcagggcatctctatcaacatctagtccttcgctagtagaaatccactgtaaagtgttgacaatgtcacactccttcagtttgggaaagaagaacttttggcacctcgacacgattatatgtgggagatcaagattggggctgatgaggataaaaaccacacgccgaggtgcacgttcgatgaccttcgatatgacactccacgtatcaggtggcaatgtgttgcaatcatctactataaacaccctgtgctgagttggtacaggtgaaagcatcacattatcaaggatatccacaatgctgtcaaggtcaatgttaccaacaggcccaatctccactaagctcctactcttgcccagattgtgtgcgatacaagacgcacatgaatcacagggcctcgggtgctcaggagaatggcaattcaacgcctttgcgaacacccgagcgcatgatgtcttgcctgtgccgtgcggcccgtagaacacatacaccaacccaattttcctcttcaggatggcattggagagagcctgcaccaccaagctctgcccaatcatgtccttgaaagtcttgggcgaatacttctgcgtgaggctctggtgccggcctcgatgcgagccccgtgacctctgccccgaccgtgcctctgatgcgaggtcagaatcaagctcactggtctgattcgagaatatcccgagctcccccgagaagctcctggcaatgccaccgatgccattgcgcacgccgtcgacgagcagaggcaacgagtctgagtccgaactggtcgaggtcagcctcgccgtgaccgggaaatgcggatgcgaacgcgagccgtccatgtgaccgcacgagcctgcggaggtggcggcaatggacctccgcgccgccgacgccgacttggggtcggagaggccgcacgagaagctccggccggccatgtcgaggaaggatttgccgcggtggtggatgcgtgaccaattccaggggatgccgcacacattgcgcgagtcctgcgacgcctgcggcctctgcagctccaccccgcactcgtcgtcgtcgtcgtcgtcgcctccgacgacgccgaagaggtacttgttgccgcagacggcctcctgcgagctggagttcaccgagacggcggcggcgccgtccacgccgcgatctagagcgccgccggtggcggacgcgggagcggcgcgccggcccgcgccgcccttgaaccggcgccgcgggccgcgagacggcttgggctgcgggttctccgcgagctggtcgagcagcgtcttgagcgcgccgccggggcgggagctgtcgtcgtggaggtcgtccccgagcccgagcccgaccccctggggctcggcggcgaccctcgacgacgagtccaccgagcggcgggtggacgggtcccgcagcgagcgcgagcgctgcagcgcgagcaggtcccgcatcagcgcggccgacgccgacgcggacgaccccgtcgggctccgcctccgccccgacgacgcgctcccggcgccgagcccgtgcgcgtggtggtgccgcaggtggatgcagttggtcaggtgcgcgtgtccccgcatgtggtgctcgccgctgccgccgccgccgccgccactccccatccccgcggccgctgtcgccgccggcgccggcattgcgggcgatcgatccggactcctcgcctaaatcatcgcgtcgcgtcgcgtcgcgtcgcgtttcgcggcgagcgaggccaaaaggagggtggtgggttggggggcgtggcctcgggtggcgtccccgaagtggccgtgctttcgacgtcgcgtcgcgtccgcgaccgcggcgtggggtggggggagtcgtagggttcgagcctgccgtttggccgttggatgcatctgcagatctgcaccctcacgcccgcgtgtgattactgtgccggttcggtaagtttcggggagctgagaatggccagatgatagtcagtttttaacaatataaaaaaactggattttctagtttctatttttattttattttctaaattttataactatatcttctcataatatgtaccaaaagctaaatttttttggaagaagcttctgatcttgagagaagctgcggtagctagaagattcccaaacaggctcgaatatatttgagagcataagattataagaatatggaaaagctgaagtcctaatttctgatttccaattcattttgtgaattctataactaaagatttttaaaatttgggtgaaaatctagattgtttggcttatgccagctgaatattttaggagaaaatgtagttggcagaaactccccaaaatagacaaaagctcttctagacaatttaaatttctgtttagattctaaaaaattatagatgtaaaatcgtaaaaatgaattgaaagtcagcaactagaaaacacaacttctacagatttttagaaactagctatcagctacttcttgtttcttaaaattttgaactccattgaacaagtctgagaccgtctgtgacacgagattattacccttgtgctaaagttgagtggtctaccgctaacagtggcaaaatggcgctaatagagctgcttgtttatgctttcttttcgaggctatgtattgaggctaaaaaaaggaaaggtgctaaactgctgattgcacgttgtgtcgtgctacattttagtttagataggtaagttgttggtttattaaggtgagctaggatgccattcggtgggagaatctctctacgagactcgacacgctgctgattatcttttggttcagagcttttccttttgttgacttcacgttgcctacttggtctatgctttggcaccgtaccacgaacgtgcatatgaatatgtgatactggccgacagcgtcggtaattacttattactgtacctaacaagttaaccggagtaacgtaccagtaggtaatgttaatgtcaaatcatgagaaattatcgtgccaagtacacgacagagtcatcgacccgtatgagagtagtaccgcggtatagccatggtgggtccgtaatctagcagtagctgcggtactctagctgtgggcctgcatgtgttatctgtttttttttttgttcacagtgatacactagtacatccatccaaaatgtagagtaatatttctaacatattacgttgtctcgaaataaagttatttctccgcctatcttctctcaaccaatcacaactattcttcttcatctactttctcttttcaaccaatcacatattttctccaatcattctcatctacagtattttcttaatacacgtgctaaccatttaagttatcgctatcctatggtttggtgattattgcacgaaaccacgtaattatcgtgatatatatagtaattttaaaaattgaaaatatcatgatagccgcactgttttataaattgtgatggtgacagggattggggaggggtgtacagcccacgcggcagtggcgagcactgggcagcacggcccgggctacgagtagactctacggccccttataatcataggaatgaaaaaaacgaaggaatagcaaaaagattctgacaggaatacaagtgtaaaacagaggattataaaacacagcaaaaacatagaaataaccgtttgattgagccgcagaaaaaacactgaaatttgaggagagataaagactcagaggattcttaacatgaggtaaaacctcatgctaaatttcctccaaaacttacatgggaagaggcattccataggaattttatgggattacataggattcattcttttgattcaaatggctatataggaaaaattcctataggaataaaatcctttaaaattactatgaattttctttgaatcaaacgggcctacgagtgaaattgctaggcccagaaaatactccgttcgatctgatcttcctgcattcttcatcagccagatagcactgtagtttgtgcggatgaattcacgcgaattctgagggtttattttcggtgcacaacaccagcaatccagccaaaaattgaaaacagcatatcacaatacaccgggaaacgtttttgaaagagagggctcctacccccaatgggcgcggaaatcgaggcgaatcattgtgttctctcgtccaactgcagctctcggaacagaacgaaaacgaggagaccgaggagaagatgagtgcatcgtagtacactcgcaccactggaactccttcctgtgctcctggcgcagtagcttcagttcgccgcgagtcaaaatctgaaacctctgatgacaccctcaccagtactgcaaactgacatatgggcccccacagaccctcgggcccatatgtcagcgagcagtacggcagaggatctagattgctgatgaagcgtgtgcctcacccgatcttcaggtaaccagtgtgtatcgttacatggtacaaaagtatgctcaagccctctttgtttagatttataagctaacttataagtcgaatagtctaaacctaaacaaacaagtatctttttcgtttggattttttgaagccataagccactctaacactattaagccaaaagctaggttggataagttttttttggcttatgtgaggtagatgtattacttaaccactaaatttagtacattaaatccactggcttataaatcatataagccaataagctgacttaaaagtctaggccaataagtctaagcctaaacaaagagggcctcaagctgccgggcaatattatcttttttgacgctgacttatttattttctttactctgaatgtactccctccgtttcacaatataagtcattctagcatttcccacattcatattgatattaatgaatctagatatatatatttatctagattcattaacattaatatgaatgtggaaaaagttagaatgacttatattgtgaaacggaggaagtagtatattatcttcagtcttacttcaccttgcaccgtccacacagtaaccctgactgaagcacagatcatacagtacatgatacgtgtagtaccatttttactgtatcagggtccaatatggagtagtcctagactctgatgagaagttgacaaaacatgccctggtgctctggtgagaaattgctacaatactctctctttacatgtgggctgcttcacacacagcacggcagcatgtagccggaatactgcctaaccctatgaggacatagacaaagtagcaatctgtcacaaaattgatcagtgaagctataagccagctaaatactgaggtggagaagagaagagaggagagagagaggagaagtgggctgtaaacttacagctggcttggacataagaaccaagaaactctatgagagagataagtgtgccatgtattaattatgaagagctaactatttgttaggaacctaattgggctgtatatgggccaagctagccaagtcaaagcgaggcccaagcaagcagaagggggcagcatacaaaagcagcagcagcagcattgttggaaggcatcgaacagaatagaacccggcacggcggctcagcaacggcggcgacttggttcgggcttgaaccttatcgatctccttcttcctccctacttctgctagtaacttgtatcccctattcaatcccatttccaccacaaagcttgagttgtagtaatacaattgcagctcaaaaccacctcgaccttcattgcttgtactgtatattggttcattgagatttagatattgggttgctaacaatctggtatcagagccgttcggttcactgggattcttgtcatggaggagtttgggaggcagccatgcaagagggagcaggaattaggttgggaaagttttcatccaagcagcgcccaccatctgttcgatgaaatgtcaagcccattggaggtgtttgaggaagacgttcttcttgtcatgagtgaggagaacatcacatgggatgaagcactccatctgttacaagaggaactgaaggatgcccaatgtagatttgatgagaagctagatcgttttttggaggtgttcggcttgatgggagacaagagcaatcaatctgagggagacaaaaggagcaatgaatttaaggaattcagtgcctccatcaaggagctcacccccaccaccgaggctgctgcatttcaatcaccccaagcatcaccttcttcagcgcccaccaagtgttcgatgatttgctttggcctcgacaccatgtccgacctcaacatggcagcagcggttgtgtgcgccaccacttctctagcctccgtggagttagtggctagagggaacgcaacctgtgaaccctacgtcaacacccctggtcatcccaaggagacgcacaccaagtgttcgatggttggctttgaggtcaagggtggcaccgaccacaccaaggtcacatgccataccatgatgggtgtgcctgatggcgttctagtacctgaagcatcattccatgaagcgtccaagtatccaatcctgtagcccatcacagttggatacgctgtgacagattggcgtgctcacccccgccgatcggaagatttatttataagagcaggtacaataacaagctataagccaactataaatatattttaaagagataaaggaagagagagaagaacagcgagctagagatctgtagccaactgcagcacggactccaaaagcaatgcgtgtatgacaggtgggaccaggtattaatagtatagtaagtaactattgtacaaatttgctattacattggctatagataatttagagttagtagtgtgctatactattaaacttgctctaaacaggccagatccgacaacggcaatctatcagcagcgattccagaggagaaatcatgaacaacgatggtccctgttatggcgtctgcttgcttcatcatttcgtttaggctaataaatcaaaattttaaatttaatttaaaagtttagatcgcacaccgtactgtttgtttgcaccattactgtagcaccgaatctggacaattgatcggaaaagccaaaattatatgcagtcgttaacttgaagttcctaatataactgctgattcgtactcgtagtactttgttcatcctgagtgtctctctctctgtcgttttggctgatatgtctgtctgcactcagccgcttgtcccactcccaagtcccaaccgcataacattgtgcttcaaccttcagatgtgttctctgcatactagaacaatgtaagatgctcattcgtgctgctggactcgttagttcccatcacaagtcacaaccccagcatgttgcagcagtgcaacatcctgtatatgggtttatatatgtaatgaggtcgtacaagtaacaagtgtacaactctagcgcaagcaagttcagagacaatgctgcacagaaaaagcctaattatagagtaactgcagaactacgaaagtaacttaaacttcatttatgttctgagaaatacagtcctgagtcagcgatcaatgaacgatttacatcatttacaggatctgtttttctattcacataacataaatcttcactcaaccatcacggttcacggatcaaatttgttggctcactcaaaacgtacttgggcagttcatacttggcacctgcagcagagttttaaaggttgttattagtcttgcgtgatatagtggagcaaaacagtataggtggtgaagaaacagcgagaattcccaacgaagatctgctcacctctctcgtcataacaaagcgtcatgtcagaatttgaaacaacaatcccagcactgttcactatggtttgtgcaagaggtaattcagcttcagcagcagccctaagtgcatcccaaatctctgtaaagatacaacgagctaccagttatttaactaaggcgatatttgtcagagcacactgttaaaattaagcaattgtgttcaaattttaagccatgctacagttgtaaaataaactccaatgccaatatgaatgatttctacaaactttcttaaattcgaacataacagggcttgttgtattgccaaaccaaataaagattattcagaagagggcatagataaagatggaccttagcaacttagctgcgaaatatgatttaacagtatacaaacattcaattgattttgtttgacatacataatagataaatgtcatagatggaactatggaagagcgttttcccaatcagccttgaaaaatcagctaaatacctttctggcctccatagtgtggagccgtgtcccagaattcttcacgcatctttgagagttgtgttggtgttattgcctgagtgtgcttccaaggttttggctttttgagcttcttactgttctctgcattaaagaagaaggttcaacattacttattcattctaactcatgtcaaagaaatctaataaaaccttgctaggatataaatgcatatcaagcaggattctagttccaggaactgttctgcaataaggccttgttacaacacgacttatttataaacctacattcatctactgtgaatagatgtatcataattttctgaacaaaaaaagcagattcatctttggctcttcactaacttggcctgtatttaaagtagcaataccaggcaatccaactttcgaaagaagtataaccagtgctaaaaaaaattgaagtttcattagcgagcagacaaatatcccaagtgtgaggctgaaatttcacagatgagtgtgtctttctgtaatgttccacctaataaagtatctataactagataaggtgttagaaattgatcttttcgataagcaagacaagatttagcaattggtgaaggcaaagtgcttaatctgaacaaacttttgattattctacttcgagaataatctgtcactttatttctctcatcatagacaaatgctacttttgcaacatacaaacaaaatagcttttctcctttaagaaaatgatataaccaccaatgctcttggcattcagaatactggtagcgttatctctccactaaccaaatgtgacctccatgacgtaggaatttgcactactcactctacttgtatcagataccatccccacatttcgatacattaattccatgagagcactgtcaatcctgcaacataccattactagcagcagatttgatacactacatcacagtaatgagtaatctacaggtgatactaagtttcatccaagtcaacagttctactgcagctggatacttgcaagacgcttaaatcgacagctcaaagtactatcggattatcagttccggtcacaattcgatcaataaacgagaagactaatcaacaatagaacgaacaacctactcctagctaacaacagctctggaaacaattgatctcggatctcagaatctgagcagaaaacaagaacaaagacagacaaacgaatcgaagcatcaaggaagagagagtaagagtaccatcaactttgggagtggatccagcgcagcccatggcgacgacggccgatcgatcagacgctcatgtgggggggacgcccttccagaagcttccggaagcggagccggatctcgcggcgggagaggcggggtgtagtagtgggagacgaggaagaggacggtggatttaataagggttaataaagtggacgagtaggagtaggagacggcaaagcatcagcagcagcagcaaattcagcggcatacgagcggcaaagccagtggaaaaagagaaaaaaaaaaaagaaggcaactgctgctcaggtgacgtcacctacgcaggtgaggtgtcccgccacgtcacctgccgccgcgggcccacgtatcctcccccgcctagacctgttccacgtcgcgacggggcacagatgtcgctgccgagtgggccccacgccggtccacgcacggggatcgcgcctccctccgcttcccgctcttcgtggtcccggttcagtggaccaacggaggctgacatgtgggccctacatcccagccggtccacgtcggttcacagcaccggctcccccttcccgtcccttcccgtcgtggtgccctgcacgcatcctttccgccatttttccgccgcatctggagctctaaaacccaaaccctagccactgcgccccgccgtcgccttcgccgccggcccgccgccgccgcttcagccatgaacgcctttcggttcctcggggacatgacccacctcttctcggtcctcgtcctcctgctcaagatctacgccacgaaatcctgctcaggtgagcccgagccgtacagtgggggtagggtttcggccgcttggttgggggtgggggggattctccgctcacggatctgtgtgttggcgcaggggtgtcgaggaagacgcaggagctgtacatgctggtgttcgtggcgaggtacatggacctgttcacggactacatctcgctctacaactcggtgatgaaggtggttttcatcaccagctcggcggcgatcgtgtggtgcatgcggcgccacccacaggtgcggcgcacgtacgacaaggatcaggacaccttccgccatgtggtgctcgtcgccgctgccttcgtgctcgcattgctcttcaacgagcggttcaccttccgcgaggtgatgtggtctgaccttactttgcttgttcaccgcactgttgaattgatgctgcaatgggacgcccgataaagtggttaattctgctgaacctatgtgcattaagaaatatgatatatctgcttaatatgttttcccatgctacatttcgttgctaggaaccgtaattaaaattcgtgtacaaggctgctagtgctgtgcaatgtaaccttaacaaatttatctcagtatgagccaccctagcaatctgagttcacagtttgcactgacttgaacaagactataggcacaatcatcgttttgttcagtgcagtgaagaattgtggataccctattaataaaatcctacttaagtaaggcaatgcagactgccgacagatgtttgttgatctatatgctatttgctgatgttgtattgttgttagacttcaatagtggtcaaatgccagacaatttctcagacctcattctagttgttttcaaagaacactgctacagtaggagactcatctgaaggtagcatatccatagaatgtaacaaaaggttaggtgaataacacctatacctattgaattaatttagaattttagaaacctatgtattatttgctcagtatacatcatcctgcactaatcaggatttcttccctttgggtaaatagaatctaatcccatttttctgtagtttcaattgtatggtacagattatattcttcgaagtggccactttttttttctagagcacacatacttcttcctcttgtttctactggaaccaattagtcagaatgatgcatagtaaagtagcacattagtaaaacacggtcatgttgcatttacatttgttagtatgatacacaaattaacataatttcaccgttcagatctgctgggcattttcgatttacttggaggcagtggcaattctccctcagttagttttgctgcagagaagtagaaatgtggacaacttgactggacaatatgtattcttcctagggtatgagttttaccacacaagctttttaccataacatatttatacatgattcctgtattacaagagaatgaaacatgtttgcttttcatgcttcaacggcttctgttgcagtctccaagtttatgatggaaacatgaaatatatgcatgcattaactatttagtttttgtttggtccttaggcttgagaatattgaatatgcatgtatttttttttctttatggacatatgacatgtcacatgttccttctgtccatttatattgctggtcataaattttggcacatgaaatgcatcccatctattctttttttgacgtaagaaggtagagctggctctaccttatagccatttccttaatagaaatgaggtagtacaaagttttagtgaaggaaggaaacgaagaagaaacggaggggactttacattagttttggtatttacagatttaaggttctatctgcagtagctgcatcccatctattcttagttctctttcgtcgatcttccatttttcctggttagttctaggcttgattaattaagcctacatttttttaatatacattgtgtccagattcggattagggcatgctttaaatagtgaacgatcgacatgcttctaggttcccagttggtctctttcaagtctcacaatacttgttttgcagggcctaccgtgcattttacatcctaaactggatttaccgttacttcactgagggtcaccacagcagatggatccgtaagcgcctgcccctcgtatgcttgtgtttcatatcccatgttctatatatgaaaagaagttctgacgatctgtttcttccagcttggattgctggtttggtccaaacagctctttatgcggatttcttctactactatttcttaaggtaaactggatactgttgtcaaacctcatttgcagactctctgggtactgacaattccatgtcggttgttgcagttggaagaacaatgtgaagcttgagttgcctgcttgatagttcttcgccacgccagaaaatgtgcacatcacatgagaattatcgagattagttgatgctggcagagacttggtaatgaagtgggcagttgcaatttgtactgttgactatgaaaattgatgatgttcatgtgatggtttcccttggcaaaggctattacgtttcagaagctaacagttgctactgcacagaagtagactagttcctttttggacctcatactgagatggaaaatcacacccaattcatttggcttgttgtttgcagctctattacacttggtgtaaacaaacagtgtgatttccggtgtcttgtaaaaaccaatgcactccaaactactccgaaataccagaaatattgattgtgcttcctggatcctctcaacgctacttcagcatttgcctgtggaacagatcaactgttcaattttagcttttcaatcgtgggagttgtcatgtgatgattaaactactgaattataatctgattgtcggatgatcgtgggtcagtcttctatcaagatttatttcgtctatcttacgacttaacgtcgttcacgtttagcattagtatatacttctacttcgtgctgatcttggagtaaccgcctttgcagcattttagcctgtgtcatcagttttctgaacatgtgtgtcatcagtatcattttactctctttgagatcgccgttattacaaaaataacgccaccttgtaaatgacagaaataggcgaagtgattaatttttatatcatactactaccttgtaaatgacagaaataagggaagagattagtatatggcttttgcgatattagtatatgacttttgcagccctgttgaagtccatgtcatttgcaaattgcaattggtccacgaactcccaagtcccaacatattgccgcaaaacataactaacaaaacgtctctgtcttatcgttcaaacaatttcctcacaagcctataaaacccaaagattgcaatcgtgaatggtcaaatttgtttgttatactttgttttgacacaaccgagttctccccatcctgcaagcaatcgctcgccggctttatctccgtctccaatctccttctacgaccagacgcgaacggcgaaccgcaaccacctctgctgctacgctagccaccaccaccaaccacgatgtgcacgctggagcagcgcggccgcgtgttcgtgctcacgctcaccggcgacggcgagcaccgcctcggccactccctcatcggctccatccgcgccgccgtctcatccgtcgcggcggcggcggcggcggccgggccgggcgcggcgctggtcaccgtggcggaggggcggttcttctccaacggactcgacatcggccctggcgggatccccccctcgcgggtcggggagctcgtcgtggcgctccgccccctcgccgccgatctcctcgcgctccccatgcccaccgtcgccgccgtcacgggccacgcctccgcgggcgggttcctcctcacgctctgccacgactaccgcctcatgcgcgccgaccgcggcgtgctctacatgagcgagatcgacatcggcctcccgctcccgccctacttcgtggccatcctccgcgccaagatcaccgccgcgcacgccctccgcgacgtcaccctccgcggcaggaagctcaaggccgcggaggccaaggagatgggaatcgtcgacgtggtttgccccaccgccgctgaaacggcggccgaggccgtcaagctcgccgagcagttggcggcgcggaagtggaacgggaacgtgtactcgtccattagaatatccatgttccctgaggcttgcaggtccgtcggaattgtcgaggagagcgatgaggagaagaggaatcactttgcttctaagctatgaggatgtgaaaggtatgagtctccaactttccatcccaactccccaattcagctgtattcctgaattgtttgctgaattactgtttatcattgggttaatgtcatggataacactagattgctgaattactgtttatcattgggttaatgtcatggacaacactagatgggaaaaaacggttcagtatgattcctgttggttttgctatgtacaaaacattcacatcaatatataggtttcgctacgtagaaattatggactttagatgtagtaatgcttaagatattgactttcattagatatggtatgcattcaagattaactttttctcaattattaaatatgatttgatttaagcacatttatatgcacacaaaatggatccaacatgtaaaaataaggcactgctagaaggttcattctaggttgagttgggtaatggtttttggtaaatcacagtaaggaggcatctgactgtttcttccctgtctgtctatcgtggtgttaagctcatttttaactgctttgtacatagaatgcgtgtccattagatagtctagaagttttgatatatgctatctcatgagccaattcattggcacagtatcaatttggtactgtggtttgtgacataggaaatcgcaccaaactgttatttctactggaattataatttgattccatattcttatgttattgacttatttcttgcatgggaatacagtgcacaaagatttgtcaagttgtttgtaatttagcacgtctgtttcatattcgtgattatttactgttccatcatttcacatgttgagttgacaatacactttctacctttgtaaactaacttttataatttataacttcctctggtttattgaaaaatggatattatacttagacttcctgatatgaaatctcttccccttagtttttctgatctctgtacaatatgacggtattgcgtggccagaccttaagaaaaggctcctgtattttatagtgggaatttgattaagaatttatcattgtttgtatctcaaaatatatgaacttaaatactactagtattttctctgttcccttttgttctataaagcatgttaccttttccaaacatgttaatttagtgttagtttctcacatatataccttttaccctagtctctctgttaaagtttaaaaggggtgcacttatttcaggattcaaaccttttaagtttagactaacaagtaagctaattatatatatatatatatatatatatatatatatatatatatatatatatatatatatataggtttagcgatacaaaagtgattccaagatttgtttcttaatatacttctatatggtcatgtttatctaattagaaacaatatatagcttcattttgttccatatgaagttacattgtgtcatgtcctgttgtaatgttgagcaagcacctaataaacccacaagtctggcggtttatagttcttgcatcaaccactattcaagcttctgaactcaagatcatttttctcctcctcctttttcagggattctgtggaagtggaccattgagctcttctcaacattatgtgtacattggctagccaagtagccatggatgctttgtatgaaggaccaaataatccagtatatataatttctggaaagcttgtaaactgttgctctatctgcaagtggggaatatattccagttcctttgcaccaccttgagtccttgattaaagaattaatgaaaattctcactgcggaattaccatatgttctccctggaacgttggaacttttggacaatgttccacgtcattgtcaagaatcaagatgacagttgacggcactgtgccaactgccaagccggtgtatcagacttaggccctgtttgggggagtttctagctgcggtagcttttcgcagaatcagaaacttcccccaaatagttcagcttttaatttaaattctgagaagttgtaattgtagaatgcaaaaaatgagctagaagccagaagctgggttagtattagtgcaggtgccgtgcatgacaatggtgtctttagcggcttctgccattgccgttgtggattaccgacaagcttgaggaagtgaagttagagtatcttcaatagcctctccaaacactaatatagctagctctccaatttatttgttaagctaaactcattccttactccaacagcatctccatctatactctctattctgagtctatgacactgggacccacacgtcagcctctactacctccttcctcctcttctcccccatcccctccacaatttcatcgtgagagatacaacctccgcccccacgtccttgggctgctgctcccacaccaccccgtccttcgcctccaccgccgccccgccccttcccatgcgcatcagcagcaccgccagccccaggaacagctcccccgtcctcactgcgagcgacctcctctcggtcccctcgggcggcagcggtggtttcaggtcgtggcccgtggcggcgcgggtgagaatgaagcgacggaagccccgcggctgcgcggtggtgggcacagaggcagaggcggaggagggtggctagggcttgggagggaggccgaaggcggtggaggaggaggagaaggcgaggaaggagggggtcatgggggctcgtcgatggccaccggcaccatcgctgcgccctcggccaacagcgccgttgccacgccatcgccaccaagagaggaaggatgggactgggagtggtggtaggacccacctttggctagtggaggaggctggctacatttggttagccggaggagcaatttggctatctggatggagagtttgctggagctcgttttttctttaacttagagagtcaaatagagagtcggttggagatgctcttactaggctagagaagcagcagctgaatttagcgagctccttggcatgcttgatgaaaaccaggagtctaggacgaaatgccggagctaaggataatccagagtgtaagacactactatattcttatgttaactagtgttaagcatctatatctccgacgtctctttaaaaaccactagtaaaactcaacttataaaatatacacatactactaattcaatatgctaatttaaatatcatatttctctcagtgtgtcttgagcattgtgtataacggtataagtcagtggacactttgctgctagtacaccaatactatgggctaaagttcggcaagcctcttttttttcctttttgttaggccacacactatgcaaaaagttttgtggcaaagtctagatgattttgtcttcaaataaccatatttcccttagagtggttgatggtttttctgcaataacatatgtccgatttgcatataggagtatttgatttgctgtcaggacgcaatatttcgggaaaaaagtattgctcatcacacttaacgaacaactttctctatatgccagtgccttcgtcctataatataacaatctagtatcaaatgtaacacatcttaatagtatgaatatgaatataccttattcagattcatagcattagaatacgtcttgtctcatactccctctgtcccataatacaaaggattttggagtgatgtgacacttcctaatacgactacgaatcttgtctattgtttagattcatagcattagaaagtgtcacgtccctctaaaatcccttatattttgggacggatggagtattatgttgcaatattattagacggcggtagtagtagtatacaacaaccgaatttcttaccgatttgatctttgctcaaaaatctgtacacgcctcatgtaggccctgtttagttccaatggtgaaaatttttggcgtgtcacatcggatatacggatacacatttgaagtattaaacatagtctaataacaaaacaaattacagattctgcatgtaaactgtgacacaaatttattaagcctaattaatctataattagcaaatgtttaatgtagcaccacattgtcaaatcatggcacaattaggcttaaagattcgtctcgcaatttacacgcaatctgtgtaattagttttttgtctatatttaatattctatgcatgtgtccaaacattcgacgtgacaaggtgaaaagtttttgcgttggaactaaacaaggccatagtgatgtgtgaatctaggtgatttgacgattattttagacccaaatcatgcatcatctcgtgataaataccatcacgtaggagtaggggcggattcaacgtgggtgcagggggatttgagtcccccctacacccaccgaacccatgaatacccccctgagcccccttcatttttttcgccatggttgataagattatatagaaggtgctaaagatctcttaaaagcattttagcatagtttaatactaagatgatggtgttttatgccggtatactcggtatgtgagtctccccctttttttcctgatctgcccctgcgtaggagtactgtacacgttgcccccattccattccac

SEQ ID NO: 13642 - DNA, 621 bp, Oryza sativa
ttcctgcagccctccggcacgccgcgaccgccgcgtgctggacccactgcgggtggaactccctcctgtaggccaccaggcctgtgccttcatgctgtgcaagaaccccgacgcaaaccagaggttcaacaccgggttcggggatgacgactgctacttcggtgggctgatggacggcacaagaatgagcggccggagctatacaacccacgaactatctccaacatctgcacctactggaacgcgccctggctgccgaaacaaaggaacacgacgctccgccacagctgggcgtacacccacgcaaggcacgcgtgcctctcgccggcgatccttgatttcctgcctgagtcgaccagcggcccaatgcaatacaccctcgacgagggcttgtcaggaacgcagactccggcggcaagcgctttcatggccttgggctgcagacactcgaagctgttcaccagcacgcccttcgcttgcgtcatccgcttgaatggatacaacctaaccttggtcgcctcgctatccttgtcccgcaacatcgccggcatgtcgacagtgcagatcggcggcatcccgggaaagcggaggagcgcccgcccttgcccatctccataaatg

SEQ ID NO: 13643 - DNA, 538 bp, Oryza sativa
caaatgccacttcagaagacccagcctccttgatggcatctaacgccatgtccctcgtctccaccagcctctccctgagcttcctcccttcctcggcctccatcaccagcctcaccttagcctccacttcctcggccttcaccaaccctccttcctcgtacccgtcaagcgacacggcgatcttcatttcctccaccatgatcaccttgttcatcgcctgctccgcgtacagcggccagcatatcatcggcagcgccgacatgatcgcctccagcgtcgagttccacccgcagtgcgtcacgaacgcgcctaccgcctcgtgctgcaccacctccgcctgtggcacccagttcttgaccaccatgcctctgcccttcgtcctctccaagaaccccgccggaagcagccgctccaggtcgggctccggtgatgtggactgctcctccggtgggctcctaacgtccacaggaatcggcggccggagctctccagcccatgagctaactccttcagctgcgccgccgggaacgcgccctgg

SEQ ID NO: 13644 - DNA, 3293 bp, Oryza sativa
ttatttagacttcattctcctagtcctattcctgattgttatttcggattctgtgcctgggtggtatcttcttactattgattcaacctcttcgggcaaacgttgtcacttcctttatttgaaaaaaaaggggtctagaactacagtgatctgataccttcttcccttggtctgggtaggtaggttatgtaggctacaactgttcataggttgttcgatcgcaaaatgccaaataatcgattactagtatgccggatattgcctggaggcccttctccctatgtttgactcatcctagatgggttcacacttgtcgattccggtcaaagaaaaaagctttttcacggtcccatcacaccaatctacgccaagataaggaatgctgggttgccaggaacaaaccctgtgattcaaggttttgcctagaattgccttaaaaaaaatgcaccccattaattgatccctctttagggtagtataagtacatcctcgactatagcacgagtagagtcgagttctcgtactaacctaagagcagatatgccgaaatatttccacgttcaagcagctaattagtaaacgacttctccataacagtttgaagattggctcgcaacgcaagtagcggcaagaaaggagagcaagacttccttttctaaaagaagaaagaactagacttctataagaagattttgataatcgtagatcgtggaatattcatctatcttattaggtaactactttagctgctctcgaaactgaaccatcgtgaatagaactagcgcttaaggaagagtaggatctgttagcaagtcatattcaatcacccggtcttctccttcctagcttttagatagccctgattctttattggattttaatacacttagccgtgtacgtatcttggctaaactcgaatctatagtttatttaatactgatgtactcggtaaagaatcaaaaaggtacttgaagacgactttgaatgggaggaggttttctttttatccccccctaacctgattttgatgtcttcttcgttctcagtccctatggtccattgtaggatgatttttctaaggccttgaattcgttggaaaggtgatcagggtcctctccctggtcctatcgaaccagtgacttctctcctgggattgaatatgttttgcctttccccgatggttccgcattccaatgtgggtaggatttgccaggatgagcggcttatttagcctatgcgaagcacgaagcataagagaagagtgtagcgaagcgagtgtaatacttgtagcgaatataagtagtgtcaaagcctacactggcttagctctgcagatgttttcaggacgaagacggtgatacgataccactcgccagtgatgataaggttcactcatagcataggtggaagatccatccaattttctttatagatttatttgttcaaagaaaagacgcctaaaaatcattcagggctcttggtatcctttaccacattcactttccatattccctttttttagttcagacgctatcatacctcagggaaaataaaatttctatcaacgattcccacccaactttggaatgactctcccctctctcccttaacatatcgaaggcctcttatccgtcaaccggaccttaatagctcagacttccaagccttgttggatgatgcagaagggccaacatcagaggatcaattgaataaccaactctcccgccccgctgccgctactgctccaaagccaacaaatgcacttgctcatcccaagcatcactttccacaaatagtacccagcgtgtgtcctagccgccgagggcactcctcttgaggaggcagttttcgaatctaatctttctgtctgcccataagagcgggacggtgaattaccagtaggggcaggcccagaattccatgtacgcctattccacgcccctcccccctgggtgaggattagctcctatgatttgccgatggtagtaggatttcctatcacattgatagaagggaaggtcatctactaatagttaaacggaataagattagttacgaggacacctgctaactattagtaaagaaagcaatagttgggccctagtcgatgtgctcttatttgaaatctatagctttttggccgggtaagaaaatgaagtagtagtctatcaggcagtctaattcgtcttctctaaggtcaggcagtgaggcattaagaaagagcagcagcgattttgtcaagcgaatagaaagagctgctcgttaagcaagggatgggtttgtttgcctgtataggtagaagcaccggtgtattaggtatcaaaagaaaggcatctggataggtatttaatcaaatacttcttccctcataccatacttatctacttcgctttatttaatatgtttattgacccgtaaatcaatgttctactctctcatggaaaaccttctttgtagtaatatgaaagcttatcgcaaagcatagaaattaatagagcttataatcaggtcagatattccacttgctcctagaaataaggtaaggttagttagcactttcatgccaactttcatcagcaagcacttatataaggggggtgcgttaacagaggaacttgaattcccgctggaaaagtgaaatagattcagcaccaggcggggaacaactactccttttttctttcctcaatcctcaaacaaaataaaagtattccgttctacttccaattccagctttcgatacacagaaggaaagccatcccaacctagagatgaagccaacaaaccactatctatattttatgtcgaccaacaatcatatgtctgagagtctggtctaactaagcggattggaggcgggcattttcatttcaacgtagcagtagggaaagtgattttggggggttagtacacatgggcagttgggacagttacaggtagttaagtttggtcttattcttatgggcaagtggtcctagaatctctctttccttctctaaagtatagctttacgaaactagaatatgagtaaatatagaaatagaataataagaatatcatatagccgtttattagtaaggataggttttggtgagtagtagttcttggcattagtaagctagcttcactagactatctatgacaggaaattcggtaaatgcacaatatcttttcaatgaagaaagattcataggaaatgaacaatagaaagagtactattcttcagttactcttttttcttgtcttagaatagacaatgtgtcaatggattagctgactttactatgttcctg

SEQ ID NO: 13645 - DNA, 33542 bp, Oryza sativa
  unsure (1)..(33542): unsure at all n locations
ctttgtgctcctgaaaatgcagggatcaggctggacaggcagttacatgaagcaatcaacaacaaggtgagtactaatatatgagcaattccaagttgttcttcctgtcagaaacaaaatgctcaaagattgctcatttctttgcatctttgttccagcaggagatcatgcgtgactcaaaggccgagcaatcactaaatacagctcgtttgatgaacaagcactgcacatccgatgggcattgcaactcaggtacaatggagcagacgattcccagttcttctgttgttgcgaaggatagcgaagtggtcagtgcgattgctcggtctgtaccaaggttccatgaagattactacgggccaagtggccatgaacctaatcaccattaagcacagctagctagctacatatcgccttaattagttttgcccttttctattttagcagcagcagcttactttcttagtagtgatccgtagtagttcttctctcctagatcgatgctgcgttttggctggaaaatgtaaagggagaagtattatgtagttcttcaccaactagctatgatcattagtaccgtgtgctacttgagtctagttcattcatctcactgctctcttccggataatctctgctaattgcatgcatcggtttccgtgcgtggcccacagttcgatcgatcgattccgggcagtaacgatactactagtcagtgatgtcagaacagtatgagatcccacagtagaaactcagcaccacagtcgccgaaccggcatgaatgaacatttgggatcttgtaaaacggctgtaaactgtaaaattgctagtgacgctagctgcagcttttcgcatctttcaccttcctctggcagctttaacccgactgttcttttacgacgtttgatgcaggaaaggtacaaaggccagtggtgcaggctgaggcaggcgcagcagcgaagcagcagcagcagaatcaggtcagtccactagtacactgcactccctgcaggctttcggagattcagctgagcaatcttgtcttgtcacgcatgaaaatggaacggattaacttacctccggcgatgtgaatatctttgcagagcctagagagatcaggtgatgccaatcagcaggagcaggagacggcgccgcgacagcaagagaagacgtcgtcgacggctacggcgacgatgacgacgtaccctgacatcctcgacatcgccggaatggactattcgccggcgacgagaaagccgccgatccacaactgagtggcacgcacgcacgcacgcacgcagtactagctagaaagctggtactttcactggcttagtgcttgctgtattagcttagtttagcagtttagctactagctagctagctagctatagcttagccatagctagctgctagtattagctaagtataattagcttagctagcagcgcgagtcctgatcatcgaatagaatagtagtgcgtacagccagtgaccgatactgggacagcattgcaggaaatgctgcaccttttgtgaagaagatgatactacaaagcttggcgtctctctcgtgtatcccgcggatgtaacatgcgcgcctgtgtaacaccgccattttgaccgctagctagctaactaattactccgtagctcgtttgagatctctcccattcgtcaattcgtttttctgttcttgatgacattctccaaaagtcttttttttttagaacactccaaaagtccaatgatactatattcactcagtgagatggagtagaccggttaattaagttgcacaccaattctacttgtgacgcgagtgatcatgattggtactatattccagcatgctaatcatactatctccatccaaaaatatatacgatgctgttaattttcatttaacgtttgattatttatcttatttaaaattttagtataaatatgtaaaagtacaagttaagattatagtttctttatgataaaataagtcacaacagatcgaatgaataaatatttataattttttaataagacaaatagtcaaacctcacataaaaactaacaatgactgaaatgatgtgacactacgtataacgaatctaaacatatgtagtgctacatcctaatttatacccatccgtctaaaaaaaggtcctatactagctgtgaacctagatatatatgtgttcagatttgtagttagagtttgtttttttggatagagtgataatttggaacgaatgaggtagtagatactactattaattaagagatggatgggttggtgagagaatttgtcacatgcatgccgggtgtgttagccaaggtttgcggcaggacgcgcgtaatgggcgcggcccgtacgtgttggctcgtgtcgccggctggagcggacggatcatggatgcgcatgcatatggccggctacatgcatggacgaccctggcacacgttgctgtcgcgcgcgcggcggcgagacatcgctgtccggcgagaggcgcgagatatctgcgtgcgccgaccgatccatgcatatctcttctcgtcgcgcggcggccactccgcggcgagatggcgatgtcaagtgggctacggcgtgccggcgccggaggctgcagcgctcgcgtggtagaccagcgccgtgcgacgcgagaggcggccggccggcaagacagcgaagcgccatccgtcccgtagccgtcgacgccgactcgcgcgccgcccggttggacgtccggtcttcacaaaccgtttcttgactcttcaaagccaataaccccaccgttgcaaaatataaaatgcactattctctccgttctaaaatataagagagtattttgtttctttaataaagtatctaatcttattaattaaaacaccatttatgtgatacaagagcatgttgataaataggtatttaaggatatgaatatacaaatttaattttatgtcacatactttcactatttaattcttattctatatccggttttaaatagatggtgtagtttacttttaaacatatgtttgattgtttgtcttattaaaaaaatattattatttatatttggtgacttgcttctcattaaatgtagcatgacttattatttttaattttcatatttgtacaaataattcaataaaacaaatcgttatttaaaagtcaacgatttcatctattaaaagccggagccagagggaatacacaagttaaaagaaatttgtagcacaatattataaaatttctttttgttatatatgataaacttgaccgaagagcaataaagtgcctggttaaccgttaactaatttgctttgtgctcaaggatgtaaggtgtgctgcgtgcacacaattacgacgttggcaacttgtcaattgtcatgctaccagcttatgaacctgtcagccggttgttgtcaagcgttggaacttggaagtgcagtgaaaaaaaaagagagagtgagagagtagagtagcgccagtatacaatgggcctgaagtaaacggcacagagcacgtatgcttgccagtatgccactgtaagtttctgatgttttcttactcgatcgatcgcgttacagaattgcagtgtcgcagactcgcagaacagggattaactaggccttcacttctcttctgtcgcagcatggtctcatgcgttggaatgtgtactgttctagttgcagcagcagatagtgtagagacgaagcaccatgcacatttgtggcagcaacctatatatattttcagtttctgacgcggcctttttgtttactgttttctctgtgcttgagttattcttgtaggctgtatgctgacaaccagctgacaattttgatgattgccttgccttgcctgcctgcgtgtcatcagtcgtcactctgaagcctgatcgattggagacgaaaattagtgaggagtcacatgaaacaagacggatatgtatgtattcagtgcacgcccatcctgtcctcgatttttctactcgaccagaagacttgataacccctactgaatgctcacgacaaaccgaaaaactcaaactgtttcctgaatatatttagctggatttcggtggaggatacacatgttgacctgtgcataccctcaatcatttccttgttttatcttctttcagaaatttaggtcgattgatcggaggagaattctgaagtcacaaaacgaagaaatttacttctgaactcaagttctgaattggtgtacactccggcttggcccattaatctttaggcccaacttaaactccaccaggctttcatgggccggatgccattgggtaggcccatttaggcccacaatgggctgattgggccagattacacgtgcgacgtatctgtttgacctcccgtaagactgaccggaaataggaaagcaaagctgcatgcagaaacgcctggcgctgctgctatttatggaccagttttggcgggtgcaaaccgcggggcccaccctggaggttcgtctcctcgcgcattgccatcgccgagctcccgaaaatggtgcggtaacgggagcaatcgcagaagaggactggaggagatcgattccccattgaggacgtgaaattggattctgtggcagaagaaagatcgatcgatctggtttggtctggtctcctgtaaaagaattctcccatggcgccgccggccacctcgctcatcggcggcggcgtcggcggcgtcgcctatgtcgttctgctcttgttcctcgccaacgcctgcgtctcggatgctgggttcgaggtatccagccgtgttctgatgtcaggtgcgtgcagatagcgtatccatcgaccatggcttccttcttcaagcctgatcagtctgttgcaattcgtgacttgcaccatggtgacatccagatgagcaaggaagaagtgggttgctggctacatggaggcgattgatcgtcgagacaccgtcgccgggagccggtgctgacgctgctcatccaggaaccaaatctcttccgctggccgcggcgaggactcaccggagagaccccctcgccaacctcaccatgtacagcggcggctggaacatcagcgaccagcattactgggctgtaagtacaccaattcaattatttcctactcctgtaattcagtaattaattgcttctccatgtgaccattaattcttttgatcttgtgcatttctgttccttgtgcagtctgtggcatacaccgcggttcccctcatcctcgtcggcatgctgtggttcatcgtcttcgggatcgtcctgctcatcatctcctgctgctgctgcttctgccggaaaaagtacaacacctactcgccggcgacctacttcatctcgctgatcctcctcataatattcaccttggccacaatgtaattactcttaaaccatatttcagttcttatctccagttcgccattactttgatcgatcgttcttgccttgaactgaactgatgaagaatctttctccttttgttctccgtttggtgattaatttcagagccggatgtatcatactgcattgtgggcaggagctattccacagtagcacgatcaaaaccgtggactacattgtcggacaaggcaatctgacggtggatagtctgaggaacttctcaggtagcttggctgcagccaagaacatcggggtggatcaggtcttcctaccagttcaagtgcagcagaagatcgacgtcatcgaggataagctgaattcttctgcaaatgagttctccacgcgcgcgctcgaaaactccaagaagatcaagcatgtgatggacaagatgtgcgtatgatggctgcgtaataacccaatcagcactgaacttttacctggaaaaatctgaacgtattcattgtgatttcccttttgttttgttccttttaggcagtacaatttgatggttattgcagctgtaatgcttggccttgcgatattcggattccgtaagcattaaccaatctttgacttgattctgcttgtactgtcaaagcttcacttgcaactgatcttggcttcttttttttttcccgtgcagtcttctccatcctggggctgcggtttcttgtttccctgtaagaaaagctgttctaatttgcagctaattactgtaactgaatatgttcctgttgtttgctaatctttacaaactcccatctcacatgtatgcaggctggtgatcgctggctggttcgttctcgtcatcacaatcatgatgtctgctgctttcctcctcctgcacaagtaagcctgaatttttccgatgaagaaatgcattcgcagcgtgttcaggcactgacactgacagaactgggctggcagcgtggtcgccgacacatgcgtggccatggacgactgggtgacgcacccgcaggcgcacacggcgctggacgacatcctcccctgcgtcgacgtcgcgacggcgaacgagtccatgtaccggagcgaggaggtgacggtgcagctggtggcgctggtgaacaacgtcatcgtcaacatctcgaacagggacttcccgccgtcgttccggccgctctacatcaaccagtccggcccgctgatgcccaagctctgcgaccccttcaacccggacatgagcccccggaaatgcgcccccggcgaggtcaacttcgacaccgcggcggcggagtggaagaagttcgagtgccagaccaccgggccgcccgggtccgaggtgtgcgcgacggaggggagggtgacgccggcggcgtacgggcagatgacggcggcggcgagcatcagccaggggctgtaccagtacggcccgttcttgatggagctccaggactgcagcttcgtccgggagacgttcacggcgatcagcgacaacaactgcccgggcctcgagctctacagccggcacgtctacctcggcctgctcctcatctccggcgccgtcatgatgtccatcgtcttctggatggtgcacacgcggcagcggcggcggcgctcgctcgggctcggcaggtagatgtgaagagtgatactgtacatcgcaatatggcatgcctgccatggcagccatgccccgcacctgttcatcaatctgatctggtgatttgtactatatgatgtgaatgatgtcaatatcgagtatattttggaagtgaaaaaaagaaaatgtttagctgctctcttaagctagagaaaatgcgaggttaaccactaaaaaaatcaagaacaaaaaacagatattccaaacaaacattttgaattcagataagttaattttgctcgattttgatcagtggtaaaaaaaatgttactcctgtacataaaacagccatattgtccagccagaattaagaagaaagggggagtgatgagtgactaaaaacaggtttgcatcgtgcaagggaaaaggacaaatcatggtgtgttcgggatttcagtgttcagatgttttgcttctccgtgactctgtaagctttgtactccctccgtcccaaaaaaaaggcaaaccttggtttcccgtgccaacgtttaactgttcgtcttatataaaatttttttataattaatatttttattgttgttagatgataaaacatgattaatactttatgcgtgacttatctttttaatttttttcataattttttcaaataagacgaacggttaaacgttggacacggaaatcatagtttgtcttttttttttttggtacggagggagtagaccagtcggataggccatactttggttgtttcttactacagattggactatgctatgcatgcttgaaaactgaaataattgagaatttgagatctcatgaacaatttgagaatttgtgaccatcgtgcagacttggagtaagcaaatgcaatgcaccttcttcagtagagcatgtgtgatctagtcatctacaaacagttcacatgttacctactactactaggagtactgcatttggcgaaacatatggagaaaacttcatggtgagacgacatacgatttaatctgctgatgtagggggtacgttatccgttaggcttaggcattgattaccttcatggagacagtcctagtacatgacaaaagtcacaagcctcacctgttcccttgcccgtgctgccgtccgattcgtactccaggaaacggacggcccagatcacccgcagttcccagattcgccagtacaatccttcgcttgctataaattccggcgacttgtcactcggccggccgatcatccgatcgggcagaggcggagaagagagtcacgtgagcggagaagattccggcggcggcgaagtgaagtgaagaggcgatgggaatggactggtacgcgtggctgtcggcggcgaggctggaccaggcggtggcgtacgagtacgcgctggtgttctcgcgcaacgagctggaggccgacgacctcgcctacttcgaccacgagttcctccacagcatgggcgtctccgtcgcaaagcaccgcctcgagatcctcaagctggcgcgccggagccgccgccgcgcggcgctgtcgtcgcgcctcgtcgccgccgtcgaccgcgtcgccaggtacgtgcgcgcgctcgtcgtcgtcgtcgtccagggccgggaggacgagtcgtcctcggcgctcgtgctcgtgccgagccagcagctgcagcccgacgtcgacaagacgccgaggaggagcaggtccaagcccaagtcgaccaaggaggtcgccgccgacgccgccgctcccaccacaccgaaagccatgcggtcgccggtgctggccatcggcggcagggccgcctcgacggtgcacgccgtgaaggacggcgagaaaggcggtgaggacatggtcaggtgggaccgcctgttccaggacctcaagcccaactgagcgcgcaacgacgacgatgccgcgcgtgatcgcggcgccggcggcggatgcagcggtgtgttactgttagggtttaatgcttgttcatctccatgctttggtaatggtcgagcactgtgctctttcttcctcctgcatgcacagttgtgcactgctccggcgccattgctgcatgtacaggaagcacggtgcatcgtgccgatgcgacgacagcaattcacgccattgggagcggtttgggttgctccacttgtctgtagactagctcgtggtgaggttattgctgtacaataaatgcacatggagtggttaattgcgattaatcgtgccaacgaaaatcaacaatgcctcagtaatttccgtgatatttggttcatacacgttacatgtccgtgtccccggccgtaacagaaaaaaagaggtactagtggcgaatctccgattcactaaatttctgaagagcctccggccataacacaaaaggagatacttcaatctcactaaatttctaaagagcctcctgccgtaattttattttggctgtggctacagtgtatctgtggatgcaactgtaactctcaccaattttagctgtcttccagacttcagagcagaaattgatggtttttttgtcaaatactacctccctcccaaaataagcgtagtcatggatatccgtgtccaacgtttgaccatccgtcttatttgaaaaaattataaaaaagttaaaaattagtcgcacataaaatactattcatattttatcatctaataacaacaaaaatactaatcataaaaaatctttcaaataagatgaatggccaaacgttggagatgaacagtgcaaaactgcacttattttggagggagtaattaagtggaggttgctcactagccctcttgtagttgttagtacgatcgtatactaagttttggttgcgtcagtacagacgtactgtcatgcttgattggtaatcatagagcagttaaacatctttttctttcgtatatgtgtggatgtgtatttattatatccatgtatattggatgcttgtaaagcggcagtataatctgatatgcaagaaatgagggcagggatgcttcaaggttttaaaaaaaaaaactctcccaaccaccagaatgaaggccgagtttagttctaaattttttcttcaacctttcaacttttccatcacatcaaaactttcctacacgcacaaactttcaacttttccatcacattgttctaatttcaaccaaacttccaattttggcgtgaactaatcacacccgaagtggagtatacaagaaatgagtgcatggcataaagaaaggaacacagaatcacaggcatacagtaaactgacaaccaccagaattccaagtcctgagattgtctcgtaggagtaagtaaaactcttatgttttcatgctagtgtaaactgtagttgttcagtttttattgtcgtgtttctgcttcacaggaaacagcctgctggttggttgttgtcggtagatggtgctattgtagacggaataactgcagataaacttctgtaaatacaatccaaccaaacaaccgtacgccaattcataccatttaagaaagacagtaccacaaacattacagcggtgtgatttgcggccggtaaggccacttttggtagattttgtggatgtacgggcagtgaaaacaaaaatgtaagcaaacagtatcactttgacttcagaggtaactggaatgtgcaattcaagccatgaaggattgcatttgtcgtaatttaccccccaaaattattattctagtggatgatgaactctagccatcggaaaaatatccgttttgacagtttcaacatcaaaaaagaaattagagctgttatagcttccctttcccaagtaaactctttagagttgaaagtactggcagaattgatttctaacatgaaactcttactaaaatactcattcacaatagtagttagttcatggcaaacatctagagaaaaaattggacaaaatggtcccaaagctacttatgctaaaaaggttaaaaaaatataatagatcagagttggagatataggggaatttgaaaagatatttctctacttaccgtgattcgttgttgaactgcatttcctctgtcacttctgagcataccgtacgcaattgttcttctgttctctgtttcttcatgctctgtcatatgatgttcttcatttccccaactttgtcttcacaattacatatcttttagcattactaagcatgggacttcatttacaccctttgttagttcagtaacaaaaacgaagcatgttcagaacagctatatagtactatatatggtctaacatttccttcacgatccaaatttgaaactattaattagccagctagtacttatctagtagtatctcctttatggcgtcacaatactaattttatagctaacagtcggcgactttgattttttttctatttttgggttgggggtgttggttatcatggcaacttctaacaggaagaataaaatcagaagaacaaaaatgatattagataaatacatactatcactgcactacatttcttgcatccagcgctggttgctacagtatgcatctaaagtaatctgcagtaacaacttcctcagtatcctaaaaccatagtacattcttgtttcatgtaattcaggagcattagaggttagttttaaagtgaactgacaaatgcatgggaattatagcctgtctcagtctcttaacattcacgactcaaaatttcatataaactctgcaagagtaatatagtaggccaaacgcttgcattatcttcagtgttctttagtattccttcctttcccacaaaaaaaaatggtaaggaatcatattcagttttaagttatgctgaaaggtataatgcttaaacttcacagagatcaagtattgttgtttggaaaagggtataaatttaagcttcaaagtagggagtatgagactaccactacttttttcactgaaacagagtaatggagaggaggccctatctgaagatatatttttttttcaaaactctattggcaatctccaaatcaaaatttccatagcccacaataacaatcatcggcaaagcagaacatatgaatatagttgttcagcagctggattcaactagaaaggtcaaataagaagacagaaaaatgcactactttactgtagtcagaagaaactagaaacctaactgtatattatcagactttgtggacataagaaaactgaaactctaaaagtgttgagaacaaaggaatatatacctgacatcattgttgaacagttaaaaatgagcacaatgctacattacgagctccacttgaatatgtgtagaacatgcctaactagtgattaaagcaaatggtgaaatggtaagcataatgaacaaaatgctcctggagttctaacttttagtctaatttgttgtaattcaggacatgccaaacatgccgtctttgccgtagaacattctctcagaaaatatgcaatagaacatataacttgcaaataaagactagttatagatgtagctaatagaaacaggacaaccatactatgcgtgacacttgtatgattacattcgacatggtatgtgatccaacatttatgatttattatgtcataagtactaatgaagttagatattggctagtcaaatgaattcattaaccgataaaactatattagacagaagcagctccaatggaggcttagtattattagttgcataagcattccatgcgatgctgggggactacagactactatgtacattgcgaaatactgtgaagcacacataaattcttcactggtttcggcttaccaggcttaagtgcacggcgagaacatccctgatcctctctccttccttgtctttctctccttcaaagtccgaaaatagttccgcagcggcaccttcctgaatttcctcaggatccggttcgccgcatttgatgagaaaattatggagaagacagccagcaaccacaacatacggcagtgcctcttggcactcacccttccagcattcgtcaagaagccgccaccgtgatcgcacatgcccaaatgcattcctcaccagccgcatcccgtgtgaatgcacattgttgaagatgctctctttggacatgccattcttggcgtccatgtcattatacggcgtcacgagccatgggagcattgggcagcatgctggccccaagaagtagcgcggcactgagccgccgatgagctcgccgtgaggagcgttcgcgagcaccagtgactgagagctgtacagcttcgtccgtgggaggatttccgccggcgccatcgcggtgtcccacccgacggagacgtcgagaaagcggccctcggcgtccaccagggcctgcgcgatgacggcgtccccgatccgcgcgtagccgagcgcgccgcagcagttgggcagggagagcgcgcagaatccggggacggcgcgggcgatgcggtcgggcgcgccgaggtcgagcaggatggcgaggcggtcggcgatcgtgcggcagacctcgtagaatgcgcgcgcggcgacggccggggaagggaggccgaaccggcgcgccacggcgcgggcgggcgcggcgtgggcgaggcggaagagcgcggcgccgagcttgtggtcgggcggcagcgcgagggaggaggaggaggcggcggcggggtcggagagcgcgagggagtggaggagctgaaagaaggccggcctggacatgcggaacgcgtcgcgccaggcggagtccgggagggagtgcgactccgagaggagacggaggaaccacgaggatgggagcggcggcgacggggccggcggcgacagcgacatggaggtgagcgtgagggtctggaggtggagcgggagcatcgcgagcaggcgggacacgccgcgcgccgcggcgaggacgagcggatcgagctcgagcgtctgcgacgggtgcagcagcaggtcccggtccgacgcgaacctgagggcgagcgacaccgacgacgccagcagcgccagcaacgacgtcaactgcggcggcgacggcggcgacggcgtcgccggaacgaccgccaacgcgctccgggaccggcgcttgcggccggcggccaccatcctcggggcgcgcgctgcggttttcgcgggtggcgatggcgactggagcgagagagagagagagagagagtgggagaagtgcgcatgcgtgtggctgggtgggtcaagatgggctagccgctgcgcctcgggcttgatgacgacatgggctttttctctgcggcggtcggtggtggggcccactcgtcttcctcctcgggagaggggaagcacagcattgttgcagctgcaccgcacctgccacccacttcgtcgtgcagtggtcacgtcggagtaaattgcagtcagggctcgggtcggggttccaagttccagccggatttttttttttgacatgcttccagccggatttttggtcccgagaaaaggtttttgttttgtggggagagagaaaaccggttggttcttgtcaatacttgggttccgattaggccgcaaatctgtgtgggcgttgtggcccaacctgaactgtagcctggacggctgaaaaaaattggaatgggccactttaaaaatagtatagctgggccaggccagggaaggtcagatggtaagtcgtagtctcatcggttgccatatttcttaataagcttttttttattgggaaaattggaaccatgtcattataattttgtaaaatttgagatatgccatcctgatccacatgtcatttacatgtcattgagataccgatggcatatctcaaactttacaaaattataatggcatggttccaatttatccttttttattaggaaacaaaatttaatttgtagttaaaatttttatatattgttcgtaatgatttaaagccaacactaaaaataacttgcattgaaaatatcttaaaattaaattaaaaaaaattaaattttaactttgctttgacttattaggtcactcgtctctcaccgttggccatcattgttggtttaacttgagcttcccaatctctcttttcccatcccttgctatgtggatgaagcgtcacttaagaatattctgactacggctgtcctcgaggaggatatcggctccaacattgcgcatgaaggacttcgttggtggctgagaactttgatggcagtgctcatgtgcattgctacttgttatagaaggaatagacgaaaaagaagagacgaaattatagcgactaatagatggttgttgatgggaccaccacctcagttgccacgaaggcaaaaactattgtttggactggtttggagggggttgtaattgaacggttttgacaagtgaggggtgttggatgtctggttttatagccgacgaatgtattttatatgaacataatagttgaagggtacaaaataaacttgtccttattttatggagtatgtatctatccattcagatttgattgttttttaatattaagaagtttgtaagagtgcgatttgcaaaatctataataggagtactgagtggaagatgcacagttaccattacaaattaataatcccttaattagctttgttataaataaaatagaagtcttacattggccaagagtggaactgtggaagaaactcttttgagacaccaatgaagaaaagcggatagaaaagcgcctactttacaaagtgttatgaaaatatatgcacaacggagacacgaattttacgtggaaaacccttgtgggaaaaaaccacgggcgccgaccggcaatgatcactatagaggagatgattacaaacgtaggggaatcgtaatgggaacgtcaccccttcccgtacggcttacaagagtatatatagggataaaagaaagacacctaataggactcctactaggaaactaatccgaatatattgtgggcccaaaattcggatcacatatttaacaatctccaccttgagacgaatttcctcttgtagcataaaaacatcaatcaccaaaaatacctcatgtaggtaaaatcaccgcacgccaaatagtctctaggactatactgtaacacccaccaagcttgagcaaagctcaaacttagtagcaggaactggctttgtcatcatatcagctgggttatcatgagtacttatcttgcatactttgacatcaccttcagcaatcacacctcgaataaagtgatatctcacatcaatgtgctttgttctctcatggaacatttgatcctttgtaaggcatattgcactttgactatcacaaaatatattaatgcaagacgtaactccacaaagctcagtgtataaacctctaagccaaatagcttctttacaagcttcagaaatagccatatactctgcttcagtagtagataaggcaacagttgcttgcaaacttgccttccaactaacagcacatcctccaatagtgaaaacataacctgtgagcgatcttctcctatccaaatctccagcaaaatctgaatccacataaccaacaagtccatctctagatctcccaaactgcaaacaagcactagatgtaccatgtaggtatctgaaaatccattgaacatctttccaatgctctttgccaggattagccatgtatctactgacaacacttaatgcatgtgataagtcaggacgagaacatatcatggcatacataagtgaaccaactgcacttgaataaggaactctagacatgtactcaatattataatctgactgtggacataaatctgaagataatctgaaatgtgcagctaaaggagtactcactggttttgcatcatgcatattgaaacgacgaaaaactttttcaatataacctttctgactaagatataacttgtcagaatgtctttctctagtaatttccataccgagaattttcttcgctacacccaaatccttcatctcaaattcactactcaattgtgccttcaactttgctatctctgatttatcatttgcagcaatcaacatatcatcgacataaagaagcaaatatatagctgaaccatcaacaactttgagataaacatagctatcataattggatcttctaaacttctgagaaagcatgaaagagtcaaatctcttataccattatctaggtgactgcttcaacccataaagagattttctttaacctacaaactaggttctcttttccaggaacaacaaaaccttcaggttgctccatataaatgtcctcttctaactccccatgtaaaaatgcagtcttaacatccatttgctctagttcataatcatgcattgcaacaatactgagtaaagtgcgaattgaactatgcttcacaacaggggaaaagacatcattgaaattaatacctggaatctggctatagcctttagcaactaaccttgctttgtaccttgcctcatcacttggagacataccttcctttcttttgaagatccacttgcaacggatatgtttcttctcctttggcaacttcaccaattcccaagtatgattcttttcaagttcttctaccacactcaaagcataagcaactatgttcgcttcttcaatatctttgaggaggtttactatttcttttgggcttatcttttgcaatagaacgttttggagactgctgaacagtagaagaatctgaatcttcaataacaggtgcatcttggttaatagcaacatcttctttttctggtgcatgccctgaattgatcaagtgctccacctgcacacttgctttctcctgactctcaacaggaacattagtagaaggtttgtcatgtaacataattgattcatggaagacaacatttctactaatcacaacctttttggtttcaggacaccataacttatagcctttcacactagacggataaccaagaaaaatgcacttaatagctctaggctccaatttaccattatcaacatgagcataagcagtacaaccaaatacttttaagtctgaataatttgctggggaaccagaccatacctcaattggagtcttcttattggcataactgggtgatcgattgataagataacaagcagtagaaacggcttccgcccaaaactgtttaggcaaacctgcattagacaacatacaacgggcctttgatataattatcctgttcatacgctcagctacgccgttttgttgaggtgtgtgaggaacggtgtagtgacgcacaatgccttcagacttgcaatatgatttaaatatcttagaacagaactccatcccattgtcagtacgaaggattttcaccttcctttcagtttgtctttcaaccatagttttccactctttaaacacattaaaagcttgatatttgtgcttcaagaaataaggccaaacttttcgcgaataatcatcaacgatggtcatcatgtaacgagcacctccaaaagatgtcttacgagcaggcccccataaatcagaatgcacataatcaagaataccttcagtagtatgtgtagatgtgttgaacttcaccctcttatgcttgccaaagatgcaatgctcacaaaatttgagcttactgatgctttgtccatctagcaatcctcgcttgctcaattctgccaaaccaatttcactcatatgaccaagacgcatatgccaaagattagtagcatcggaattagataatgaatcagaaactgttgcaacattacctaatatagttgtaccttgtagatggtacaggttggcagatttaatactagctttcatcacaacaagagagcctttagttaccttcaaaattccgtctccaccggaatatttgtaccctttgcgatcaagagtacataaagagatgagacttctcttcaaattcggaatatgccgcacatctgacaatgttctgatacaaccatcaaacatcttgatctgaactgttccaatacctgcaacctcgcatggtgtatcatcacccatcaaaacagtaccaccttgaacaacttcataagtggcaaaccaatccctattcgggcacatgtgataggtgcatgcagtatcaagaatccactggtcactagtttgtgcacaaccagcataagcaacaagcaattctgcatcagacttctcatcagtaacaactgcggctttaccttcctcttctttcttaccttttggtatatattttccggttctcttgtctttatcctgtagcttccaacacttagagatatcatgtccatctctcttgcagtatttgcatgacttatacctgcctctggactttgatctcccacggtagctacttgagcttttatctcttgatttgttgtttgtgttcttctcctgttggctaccccgaacaaccaagccttctgcttgtgaatttgaaccttcagagggtaccatcttcttcatcttttctttggcatgcaaagcatcataaacttctttcaaagttagagtatcacggctataaagtatagtatccctgaagtttgcatatgagctaggcaatgaacacaatagaataagggctaaatctttttcatcatactttacctccatagactcaaggtcagcaacaatttccttgaaagcggagagatggtccatcacagacccatcatcttgcaacttgtgcaaaaataatttttgcttcaggtgcatcttactggtcagatccttagtcatgcatatctgttccagcttcaaccacagcccagcggctgtctcctccttaagcacctcctgcaaaatattgttagatagatgaagatgaatatatgacatagccttacgatcccttttcttctcatcgttggaccaatcctgtgtcctcttgtcaaatccagaaagcgcatcatcgagttcttgttgtgcaagaacggctcgcatcttaacttgccaaagtgagaatcttgtgtctcggtccaggagcggtagatcatacttcaaactcgtcatgggaattaatcctgaaatttgctagtaagaaattagggtaaactagcaaaaacgcgaaacctggtacacttctcgtgtgcatgtagtgtagatctgaatcttcctggtagacaagcttgtgtgcgcgtagcaatttcaacgtgaataaaaattcacatgtacaggagcgctctgctcctatctcgatggctttctggcttctgccctacttttcctcggtgaacgtgcactgcagatggaagggttttctctctgcttgcttttcctctcctgacgcgtgcgctgctgctgctctgattcttgcgcggtaggaaggacgaagtcaactccgctttggattggatttcgccgaacagaatttcgacggaacgacgaacacgactatgtgtgccgccgattagatcgatttctatgatcgggaaaaatcgccggtggccaggactgcagtagatcgatctccaatgctctgatactacttgttataaaaatagatgtacaacggagacacgaattttacgtggaaaacccttgcgggaaaaaaccacgggcgccgacaggcaatgatcactatagaggagatgattataaacgtaggggaatcgtaatgggaacgtcaccccttcccgtacggcttacaagagtatatataggggataaaagaaagacacctaataggacttctactaggaaactaatccgataatattgtgggcccaaaattcggatcacatatttaacacaaagggtgtaatttatctatttggagcaaaggaagaagaacaaatcttcgtatataagagctaaaagtgtggaattgtataacttattatcgactatgagggtaaacaactgtatttttcaagcatatcataagtacggcaacaaaataaacgactatacgttgtttgcgtgttgtatcctaaactaaacaacctacaattcgatgcagacgtcgattaaaattagaaactcagctaaacaaatagagattttaatgcggatagtgtctaaatctaataggccggttcgagttaacaacgtaaagacgtttatactccgtacgtttttttgagacttctatcaacacgggacaaaacgaaccggcctatcagaagattggacactcgagaatggaatgctcatgtcgcaaatagagacatctatccctcatgtcgcaaccgctcgagaatggaatgctcacttcgcatggattccgtttgtgcaaaaacccgacaaaacgaaattactacgaaagtgtctgacgggaagattgacgtaatgagggaaaactgaacacgggacgacacgccccggagtcctggacgttgggactcggtggaggtggtcgagttaactctcgactccctctttcttgcgcagggagtaagaaacaaacgtgtcttttcctttatgcttcctttcttgcgcagggagacaaacgtgttttttaactttctgaactcgaagtttttctatctccaacagaaccatcacagactcaggcctgttcttttctcgtaaacatatggagtagattttacctcagttttgttagcacgtttttcagttttgttagcatgtttttcaaactaaatgatatgtttagtacgaaaactttttatatagaagttatattaaaatatcaaatatattcatttgtcaagcttataataattaaaacttaattaattatatgctaatagctttttcgttttacatacgctaacttaatattcatcttcgtgagtttcacacacaccttaagtacataacccgattgaaactaccacggcaacagatctactagggggcctctgttcggcggtgggagtttgtgagttggtttgtttcgttttccgcgcgcacgcttcccgaactactaaatggtatattttttaaaaaaaattctataggaaagttattttaaaaaaatcatatgaatctatttttaaaatttaaaatagttagtactgaattaatcatgtgttaatagctcacctcgctcgctttgtgtattttctcaatcttctcttctcatctcatctcaaacacagccagtactagtctgcttttagcagctgtccagaatattgagctcctcaaactgtttaaattattaaacatcaaataatcaaataatttatagttataaaatctagaaaataaactacaagttgaaagctaaatgatctaactttttcatattcttagaaactaactaacaatcagttgcttctgactcagaatcttaagctcccaaacggaatttgaaatttgagatttgacttcatcctcacaaaacttgtaaccttacaaatttgaaatttgactaacacgaacttgcaaagtaaaaacaaaacggaaacccgataacaacggttcaattttcgagggtcccaacagtaacaactacatacacaaattgaactcaactcaaattatgtgaaataatgctgccaacaaatgggctcacaaacggataaatcctagaccaaagtgatgactgacgtaagatcaaactaaatcaagactaaaatcatcactcgatacaacaatgcaatctaaaattcaacaaatcataatctaataggaaaatataacaactcaaattggtttggtaatgaattcaatttgttcctggttataggtcgatacaacactagtataaaggagaaaagaattacctaaggggtaaactgtgctctaataccacctggtgtgaataggtgtttgatcttccgataggttcgatttggaggcttctggtcggccgatcgtcacctcgcaactattatatctgcatttagtcattattgaccactctctcaagtaattgaccttatcacgaaggttatgtttctgcaaatataattgaagaaattcacaaaaacaaggataatgaatgattggcacacaaaggtgaggttgtttaaatcgatctaccggtgaaactgcatgattgtaaaataataatataagtaaaactctcactctaagcgatgacgactactgaatgtatacgattagaggtgtcctagagttagccctagagcgcacacctctttggcttagcccacaacacggtcacaaggcccaaggcccaaatctaatttggactagatgatgtgcataacttatttggatgattacgtacatcttagaaaaaattttgaaatgagaccaaaatcaacaaaaagtagacttcataagcttttcaacaaatactcatgagcttcgcgagtctttattgataaacaactagatccgtttgaaatagtgttgccgaaaggcctaaatctgagtccaaaatatgtagaattttatcgcttgccttatgtggctcaataatgacgtggttgtgttgaaataggtttggggaaggccatagtttaatctccaatctttttttaaacaaccaatacaagcactcaagtaaataataatacgtaaaacctatgttttagtgtaatttgtttgaatatgtagaaggtaaatatgtaccctttagcttattattgatgtatagaagtatatatgatcatacctgagccgacaattccatatcagaatttaaagcatgtctcttaattaaaaaaaatgcaccaaatctgatgcaaaataaatcatctataaataagtataccagaaatcttagcccaaacgaactctatccaagtcaagagtgccaagtctcctccatagacaatcccgttccgttcgtcttgccttttggctgttgcaatctgttgagcacacaccaaaaaccgcctacgccgagccaaaacccccaaccccgatcagtccgatggcgtccgacgaggcctccccggcggcggcggcggcggcggcggagaggattcgcgtggtcggggcgtgggccggctccctggaggtggagctgggcggctggacggtgccgatgctgcgggcggaggtggcgcggcgcgcgggcggcgtggagcccgaccgcatcaacctcatcttcggcggccgcgtgctcaaggacgatccgcccgcgtcgctccagcaggccggcctcaagggcaacgccaaggtgctctccaccctcctcgcccccgatcgcggcaaggccatcgccgcccaggccgccgcggcggcggccgaggaggagcataataataggctcgtcaggctctggtaaggaggtctccgttcctcttcgatcaaattctagaggatcgatgggggattttgaggattccgctcccatgtttccagtcaaaattccagtcatattgggcaggatttgcagcctgaaattaggaaccacgattcacttattactctttagttgcatactcaaccgcaccactgaacatagaatccatcgtgccccttggtttgggtactgattactgaatgtggtatcaagtcgttagtcatctttacaaaaggattactctatgccaattctgggatgttctaatgaatatgcaaagactattgatttggtggttgtttgtaaccataccccatggttacttgtatgttttgttttgtgtgaagtagtaagaagcacaaaaaaaggtattgagtaccattgtttctgagtaattgatcacgaagcatgcgggtgcagagcctggaatagctcctactgaatctgaaagaaggctgagagtctgcacaaattgtgtgcccctattgaacagtgaaatgatgtataatgtattaggattaccacataattttgttggtttgctagaaactcacacacttcttttggtcgatggatgacacaataatttttgtaggaatgctgcagaagcactatgtcaaaggcatactgatggctcctttcatgaagaagatttcaacttagatcttgaggatcagagtggccagaaagtgatgtttggatctgtagatgatctcaagtaagagattgaatcgtctaaacagttttctcatactatgatttattattattttataatataacatcatcatctgttatctctagggcggtaaagatggctttgatgcttcatcaaaaagccaaaacatttatcaagagggacatgcacaaggaggcacttgatgtcttagcaatggctgaggtatgtatgtttgcttgatcctaccatgcttgtttgactgtttgtttccttccaatatcagtaagcatgtgcagctttttaattggtctgctttatatgcaaccaaatatttgtatatttcctgacccttttgttgtgtgaacaacaggaagctttctctctttgtgaccctaaactcattgaggtaaattgaattgcaagaagaacattttttacatgtatcatagagtgctgcaaatattttacctacactccatgtatattctgcagagggttgataatgtgccgatgcttcagctagatatagtttggtgctatttcgtgcttcgtgatgtatcacgcttagaagttgcaggaactcgcttagaaagggctcgctcaggatttgaacgttctcatggtaaagactctgctcgtttcagattactccaagctggccgtcatgcagatcttgcaatgtgagcacttactatcaattctcccttctttttaccatattagagtctgaattttcattgagaagtgagaactgttccttacctatgaactgatgaaagcattcattctctaattttatatatgaaaagcaatgttacaattgtataactttttatagtggtgtttatcaaggttcaatcttacacattctagttttgacttatgctgttttccaatgcatgaaaaattgccatgtgttttagatatgtaaggctggagcttttggaaggagtggtagcatatcacaatgngaaatactgtgacaaggcgctgtgaatcctcttactntctgcccaagctaaaatacatgctaggtattttcagttgttaattttgtctgctgcgttttctattattattttgcattggaatattttagtaccatagcttctagtaacttcttgactttatatttcctaactgcatgcgatatttagcttcaagtaccagatgaagctatatcaatcttaatgagcatgggctatggagcacaagctgcaaaaagagcattaaagatgactggctatgatatccaatcctcagttgatctcttatgtgaagagcgtgaaaagaaaattcgtagagtacaggaagatatggagatgcaaaaagagatcatgtgagcttctcatcaaggggtttctcttctattctcatttgcttttcctttttgctgaatagtgtgaacttccttggtgatgtcctagggaacaaaagaaatatggtaaaactcccatgaacaaggcagtgaatatgcagaagttgaaaggcttggttgcaattgggtaagaatgttggtcttattacattaatcctgaagttctagatgttgattttgtcatgatgatctaatatagcattttgttaccagccatgaagactagatctgttgagaactttagggcacctattgcttggcagtccatacattatcttctagaaatattcttgtctgttattgtcttattgactaatgtattgtaggatcattgtattataagtcatgatggaaatcttagtcttatgacactcaatataatctggataccaggcataccatcttgaaatgcttgaaagttctctctttgcccttttccttttagcaatagcttttacagtctacatgcattgtgaaagaaacaaagggacaaaatatatattgactacccagttgcactttaaattatggatagtgagtgctgatgtaatataaagcaaaataaattgcactcagttgtttgtggtagcgctctttttacaattccacatatttatgctgtcgtacttcctatttgtgactaatcagttgtttgtatctttaaggtttgagaagaaacttgctgctgaagcactccgcataaatgaaaatgatgctgacaaagcactagatctcttgacagatcctgagcaaaattgcatcctacaagtaattctttgcaccgttttggaactcatattgagatactctgcagttgttaactctatttctgtctctttcactttcagcacaaaatcatgtcaaaggcgaagcgattatctcgcggtatggatcataatacattcatgattgctctgtaaaatcagaaggtctcagatgaaaacgaatttatgcccctttctgttctcgttgttcttgctaggctcgggctcagggtcatcaagctccagggctgctgctgccacgactgcttcaggggtaaacaattcacaggctccggttgacacttcagctaatgttccagatggaagcgctatggaggagagtcatgtgttgcctgtgatcaatgaagaagctgcaaacaacgtagaggctgtgaacgatgacgaaactgtgaaccatgaggaggaagatatgagcgaggagtcagctgagggtgaagaagaagcaaatcctcctccagtcagggatgtggcgatggaaaacgagcttgcccatgaaatgacgggggatgccttggatgactatgatattgatgttagcaacgaagggcaggctatatcagagtacctgagcttactggattctgctgcttaggcttgatgtgcaaacatattactcacctggtctagatagtttttatcaaacctcagaaagaaatatagtcagcctcaatccgagagagtttgcttaatagggtcgatttgtacatgagtttacctttctgccacctggaaacttattaccgtgtgcttaagtaatttctcatggatagcaatctcagctttagaagttactccttgtgctatcaactgtatcttaatatgtgtagtacgtatgtagttcctatagttcctatagggtaactagataagctcgcgagtatagcacaaaacattgcaaacaagagttacatctgggaattaaattaaatagttttacaatacatgcatacagtacaattgatgacaatttccggagccactacatgtacaaattaacattgcaaaacaagaaaagcaaatccaataaaaaagaagttcactgaataattgaacatcccagaagcgagtggcttcatcacccgaccgatttgaccaaattaacgaccgaccttaatttgattgaagctaaactgtgtactcgagagagaataatgaatgcgtgcatggcttgggacgtgacgtgcatggtttgggacgtgacgtgcatgaggatggcttaggcgcaggtgtagccaggcgggacgtcgcagccgcagttgacgaggagcttgagcgcgatggggatgtagatgctgatgtcgagcaccttggccttgatggcggtgcagaggcaggcggcggcggacaggccggcgatgtccttcaccagcgggcagcacgtcacgtgggcgtcgccgatgtgcacctcgttgccgaggaggtccacgcacacgccgagcttgagcgcgtcgatggggcacgtgtccgaggacgacggcgtcggggtggacggcgtcggcgtcggcgatggcgggcacgccttcctcccgccgtgtcgcttcggcgggctcgggctcgggctgtagccgccgccgccgctgccgccgccgatgattcctccgacaaccggggcgatgcctccgacgacgccaccgacaaccggggcgacacttccgacgaccggggcgacgccaccgacgactccaccgacgaccggggcgacacctccgacgacaccgccgacgacgggagggactttcccgacgattccaccgacgaccggagctactcccccgacaactcctcctacaaccggaggaactttcccgacgattccaccgacgaccggagctactcccccgacaactcctcctacgacaggaggaactttgccgacgattcctccgacgacgggagcgacacccccgacgattcctccgacgactcctccgataccaccaccaccacccgagggcgcgctgccgccgccgcccgacggtgcactgccgctaccgccggagccgcacgagccgcacgcgagggcgagcggggaggaggagagcgcgagcatggcgagcaggagcatcgccgagaccttggtggactccattgtaatcaaagaatcaaatggagctcgcttattcgctgctacgaactgcgaggtgtggcgggaggcgaaggccgtggcgcgcgcgctcttttataggcggggaaggcgagcggtccgggaaagtattttcatcacttgcttcttgcatttcgggtttgtttactttaatgtcatttttaaccttactaaattttagtaaaattactaaaaaaaatagctatatttagtttgctgtcaaattttgttaattatataagaaatcctgctaaattttttggtaactattgccaaaatttggtaagttttttttttgacatcaaaatgaacaggcccttcatcgtctaaatagttatataaaattagagataaattaatataaaatatacttcctccgtttcacaatgtaagtcattatagcattttaacatcaatatgaatgtgagaaatgctagaacgacttacattgtgaaacggaggaattatcactctataaacacatgtagcttcgaattcaacttttataagttgtaacgaaaataacaagtagaattatgaattaatgtatgttaccctctccgtctcaaattataaggcgtcctctttttaagaaaaattaaactcgataacttttgactaataatcatattaaccatatatatgctaactattatgcatgctatattactagatttatattttaaaggcttttcatgtgatgttaattttatatttgttggtaactaaacatgaaataaattaatggtcaaagtatatcaatgaagaccatttaaaaaatataggcattataatttgggacatatggagtaattatttttagtttaatttgttcttttatgacaatttatagaagctgaatttagttttgcatatttgtatattctatattaatctatgatgttattttaataatgattatttagatacggaagaaacgaaatgatgatgccctgtcgagaaatgaaaaaccatctctgagcaatcgagcggccaggaatggtcgagagctttgcgcgcgcatgccatgccactgagcgacgggggcgtgggttggcgcgcgcgggaacgaacgaaccggccacgtgaagccagtgggattgccagtgttgggaggcttggcccgttgccaagccgccaaaaaaacaggcgcagcggcgtgtgacactcgcttgtccgcgcccgtcgccatgagcgtgcatgattgcaacgcactgcttacttcccttgctctctgtctaatctcacagctcacggcgagagcgaggccgtagcgcgtgctgtacatgcatgaaccgatgaacctatcagagaagtttttttttattacagtttaattaattcgttccagagttcaaatgggattcatggattcctctctgatccattaataatgttgcttaactctgttcagagatgtggtactgctactccattgtattttcatataatccatatgcagtactgctcttcaatctgaatcatcatgtagtgttgttcagttggagcgggcatgtatatatccatgatttttttttgatgaaaatatatatccatgattgattcagagaaatatgcacgcgctcaatatttttagaatttctgaaccatctcgctataagagaacttttatggtgcttgcattccaaaaaaaaaagtaaaaatccaacgctcctcaataacaggtaccatatgaaaagtatttaaagtatttaagtattagtattggtacttagatactaagggtaaaaatacaaatatattagttgagagaaatggtagaattgtccctaaatttttatcggtaccgcataggtaccagttaagtgatttgcccagtactagctgtcctcattttcatgattttctatagatttatgttgtgttctttgagattctcatttgcatgattttctttatatttacgttttgttccgaagaaaatgttattggagtaaaagttttcatttgcgttcatttctatagatttacattatgttctcaagaagacgtcaaaacccctctgtttaattcttttgagatttatatcttttttactagaagagatttgtattgtgtttcataaacatgattggttaaaatatcaccgaaggtttgcgtcgatttaaattatataatattttataaatttatccctagtaaagatgaaacttcttcctcgactacataaataactaattaactgtgtaaataagtcatggatatctttgaaggtagagaagaaaggagatatgatctttgatttttttttctctccgatacatattgaatcaatcgctaaattaacggggtagccatgatttacgtttttatttctctacaatggtatcgatatgtacaacgataccggtcaatagaaccaggtattcaattcacattaaatacctataatttactagttaatactgccatcatgttataataattttattccgtaccttatccctcttttgatcaacggttcacattaatccaccttttaagtacctcacaaacaccgtaaaaatctaattgatggcacttacattatggtaagaactattaacaagttcagtgcacctgacaaagatattcagatgcccattgtactttcctctagtagtattatctaaagggtgaccatcaatgccagcacattgctgaaggagtattagccatattggtatactggtctgccagcactagattttgatttggtcgaatggtggtgataggaattcagtattctcatgctatcaaatgtttagagaactttctgcagcgattacatcaaaagttcttgactagaatgcgagacatatcgttacaccgcatagcaaactgatgaaggcctgctcactgtacttagtttgcttggttttgcttgcaccaagctaacccagatcgatacgcagatctggttgtgggtcgaactattactaaggcagtcaagtatcgatctgcctcgtctacatgcccccagatgttcagccatactgccataccctcatcctaatcgctgagaccagcgcatagagtagccccatactgacgagttgttcagaagcgaaatgcacatcatcatgtgacgaggacgtgcgccatgcaggttttaagatcttaattattgaccaacaatatcagtgacagttcttattaattattgaccaacaatgtcagtgatagttaagctcgattggacgtgcgtcgcgtcacatgcattttctgattataagtgttgcaagatcgagatgccgtcgacatagttcagaattctcatatcatggatgcaaactctatcaccatcgtagcctcaatcaagttcttttttttgttttgttcttttgttcagatgaactcgaagcacagtagcgaacgcagtaagtgactgcatttttatggataatgcaaaagcttgtacaagggtaagcaaaagaattacaatgctgcttcactttggacactaaacgaaattataaaatgcagagcaattttacgttccttgaggaggtatcacaaggtaccattttttctattgtaaatttagtatcttatggtacctaggtactatgaggtatcataagatactaaattttacactaaattttttgtatctcatgataccttctcaaagaccgtagaattactctaaaatgcagatctaatcagacacatttgaagccgtcagggagctccgtcttgcaggtgctgacgaggacgctgacgccgacggtccactccgtggggatcccgagcacgctctccttgatggtggtgcagaagcacgccgccgcctcggccgcggcgagcccgtcgacgagcgcgcagcacttgctcccgaggtgggcgccagcctgcacgcccacgacgcccagcacgccggcgcacgcgccgaacttgacggcgtcccacgggcagaacgggttcaccggcatgtccttcccccacagccccctgcgcggcgacgcgccggccgccgccgccgcgcgtcgacgccatggtgagcatgatggccagcgcgagcgccgcgacgtcgcggcggctggccattatcctttgcttgtgccgtgtcctcgttctcgccgcgtacatttttatactgcataactacgtatgccactactacgtatacgtacgatacgacgtaaatacgtatgtactgaaaaaaaggttacgtactttttttgcatgtacggtgtagttatattcgttctagttttacatggaactacatactattgtggtaacatagtaaggtacactagaagaatctagaaatcgctcgtgtgttcgacagtgcactaggctctgcatcaacgacgtgacgatatttccgcttgcgtagcattataacgatggtgatggcaccggaagattgcaaattcaggtggtccatttgccatggtcccgtcgcaaaacacaaggtacgcgatcaccactctcaccagcagcgtacgcgagcgcgcgcagtagctcggtcatgtgaggaggaaatggcttcttcgatggagcaa

SEQ ID NO: 13646 - DNA, 3968 bp, Oryza sativa
ttggattctgtttatgtgttttttctagaattggtatgttgcactcgtgttctgtaaagtgtgctaaagtggtatgtatgtgccttatgttctgtgcattgcgggctttaattgtgtgatagtttgtttctcggacagataactagtaaacagctttaaaaagatggaaacataggttgtttgtaactataaaagacagtacattatcagcagcattaggtaataatgtgtctctagtactaaatcacgcgtaccagcatgtacagatatatgctcaattggttgttataagtaccttcaaaacaaaagatgatcgaaatgccaaattgatcatagtagcaaacaaaagagattagggtcagaggagatagcaaacatggagattaatgcttcttcaggttctaattgcttttctgttgcactattgcttaactcctcctgtggatcttcctcatcctcaccaacctcttcttcttaacccaatagcatgtttagtttgattttacactaatgcaagctctgccaatttgtttttataatcagcgatatatcttcgataaagtgctaagaaaagaacaagtaaactattgcatggtcttgtgaagctgtctttcgggtccaacttaactatattggtaggtctgactatctgtctttacctgctatcgatgtaaaactgccctatgtggcagctctggtcctccctttacattaccagtaggtaatttgtctagtgcctgtaccctttcttttgatagaggagtcagtgtaagccaatgcttaggtcttcacctccagccaatcagaatctgaagtcagcggggtattccaatatagctacttctaaggaggttccctagcactcagaaaccctgggggccaggcagtgaaacgttccgcagactgctcacccggccacacctcggagccgatgaaggctggcaatacaagcatcatctgtccaacagcctacttctcatccgtaaacatcacagttcgttagtgcaagcgggaatgagaacaccactatcttagaagaaattagtagaacttagttcagaatgtacaaatgtatgctagatactctcactacgattccagattagaaccggaatagttaaccaatggaataggtgtaggcggtttgatcgtttccttttctccgatcataaataacctgatctctttctttgtctttcatcaaataagtacaagaattgcatagatgaggattcggtattgatcgctaaaatgcgagaaaaagacccacgtttctctgttcgtccgctgtcagatcaaacgggtagggatcggcccagcctagaacaactcgcttctcataaaaacgaatccctttgtgcctggaagaaatgcaaaggggaatgctgggtcagtgtaaagaaaagcatggggcgggtctgctgttttgttatcttatagaaagtgaactgcgaatcgaaccaacttgtccggaatatgctctatcggccccgtctctcggtcaggtaagaaaaaaccaaggaattgatcatccaggcgcgcctattcggcttgcttgataggctggcgcataacccccatttcttgacccagattcacaaccgaacctatttctcatcttcatcccgacctatctatatgtgaaactctgcccaaatcctcgtagtactaagtcgtggcttacaagctagcccctactccttgtttgggcaagatctatatggtttaccaaaatggcatagacaccagatcctttttatcaagcgtgcaggaccagtgaagaaaaaagatttgcaaaaacacacatgaaacatattgaactcctaagaaacacctgacctcaggtgcttttttctcttgccttctggatggttctgaagtagtgaacagcttccgaccattatgaccttttattgaatttttgattttctataggagctcactactgctgcatttcaaatgtgcccgcctattgccttaatttacagacctctgcgattcacatatagccccactaatgtaagacagctcaagcgagtctagcttaagatataaaatcacactagccaataaaaaaagtagccaaacaaagccaggtagttttcatctaggtgaacaagtagaaagagcttacttggtagtggggaactcttgctgcattatctgagtgtatatgcctgttaaaaactagcatcgtaggaactttaagaaaaaggatattgttttagcagctcttatttctattttactgctcaactagctcttaaacattaaaagggcacttacccagaaaggtaagttttcttactaacccactttaaaggccagatcatatgcggtgatatactacggcagaaagaaaacgaagacaacaaagctttcccagtgataaaacggaggactttacacacttttgcttattaccaaagaaaagaagcttgttgaaagcgctcgcttcgtgaaaacaaagcagaaggaagcggggaatgtcccgtccaccaatagtatacagaatttggatacgtcactaactatagtgaaaaggatcttcggagtttttacgatgttccaatcaatgggtaagaagatccacccacaatatgttcatctcttgcttcaaagactagttcttccgaaggagagaaaggaagagtagttgtaagataacaccgagaatagttacaagccatatgtgactgcaaaaagtacgatttacctagcaaccatttattttgtgaattcattagcaacaagctgtttgtgtatcactttgaactgggaatgaattttgtgctttttcactgaagtactcttgcttttgaactcagcaaatccctccttttcccgcaacaaagatctttagtaatccgggctaacttttgtccataaatcccgcgtaagaagtaaaatgacaagggctgacaattcttagaatataaagagagacaagtttgttaaaaaccatattatcatatatagttttcatgcctgggcattctggcgcatgttttacaataagtaagtgcggcgcccaatagagctaaccttacacagtacctatacaggttgagcccccaaaaaaagcactcttgtgtgcctactcctcgacttagccgccgtcatagagagctttctaatcgttgaaaagccctggaactcaaataaaaaaacactcatttaagccttttttacgggcaagagaacttttatctgctcgtcttttcccaggatttctttctgaacttgtacgggtatgacccgcgttcctttcatattaaaaacactagcttgtttagttccacttcttttcacaggagaacttgccggtacctctagactcgcttcattgtcattctactcgcggcactgggtatcagttatcggagtgatcggggtgatggtgatagttgttacgatccgtaactggtgatgaacagcaaaggtttttggttagttgaccctgttaaccgtaaagaaaaggagaaagataagtggactgggcaataaatgactatgtccatattgtaataacccgagtaagtatctgagtaagaccaataaggaaagtacacggagatgtattaaagtgaaatccgctttattgggacaactcggatggattggattggatatagtagcaggctgaatccttggagcatataaggataggctaataaagtggaactgggattttttgatagaatctacccaatgaggaattttcaggaatggagaatgttgtggtaagaccgatgatattctgatagaacccatggttggacgtagattgcactatacttccccaccacaggacgtaaagacggaacgctgaaatcaggagatgaagtagctgttggtcttgcctaaattcagtattctaagttggcgaagcctcatacatatcgataggaggttgagggatccggaaagtctccgttacgttctatcttgctttgggttttgctgac

SEQ ID NO: 13647 - DNA, 2585 bp, Oryza sativa
aaaggacacctatcacgcggtcatgccttgaacgcagtaaagaaattaataagcttcgaataatagctacgctagtctccaatagcgtcttaagcgttggttttctttgcgggcatcgtaatggattggtggttcgttgcctctattttaaatagggtacggcatactcgcctgaatcttctctctcggttactcagtggagtgatctctctcttaaattcccataaggataaggaaaagtagacggttcgaaacccgtgcttaaatcctactgtcacgcccggaatttctatccaaaattccaaacgcttacatgtgtgtgaaccctcgtccaggaatcagccgaggcacacaataacaaattgataatagagtacaaatattactctaattaataagcgaataaaatgtcattacagaggtagatagttcctctcaatcaataaagatctaagcagcggaaaataaataaacggcgcagacggctccactccacaggcagcttgaccaaggctacacctaatcctccacaccatcagcctcattgtagaactcttcctctgatgaatgattgcaaggtgagtatatgacatactcagcaagccacgcagcaaatatgcaagtgcacaggataacaaagaatggcataatagggttgcatttgcaaaagcagcatttagcaaacttttgagaatttgataaaacagttaagtaattaaacaatattaatccaacgctatacaacataccctgttgtataggcccaaccattctgaacaaccaccccggctgcacagttctatctccaaaccaggaatataccattccaaaccaggagctaatcaaattattaccagtttaagcatcttttacaatgatgagaggtgtgagactaatcacgaaagacattgttagacccgcccataacagcgggcacggctattcgaatagttttactctgatcagaggtgtaccactgtacccacaagacacaaccccacatcatgtcaccatgtgcctcaataccaccacggtacctcggaaaggagttgtgacaatacccctcgcataacacaatccactgcagcgcaccttcctggatcataatcacccccttataaacaaggcatggactccccagcgacccccgtgggcttatctccgccacttctcagtctggtgccccgcaatgaaccatgctatacaaaagataaagccgttgcccatgctggcttgtggttggcacggttaatgtttcacaaccgaaactcgtgaaccggtccttaattgtcatgagcacgaccaacaaaaccatgtgctcacaacccaccattaccaggttttagttggcacattaattaattaactaatcacgattgaccatcgtgaactatcatgaaaccatcattaaataataatgagtcattagttatcccgaatgtgtactaatgtttctaagcagggctaagcaattatatctaatatctagttgaaacaatataaataaagctcaactagtcaaattgtaataacccaaggtatcaaggaataaggtaatcaagtacgaaagggccataacaaagaataggtcaattccacccaatgacattcgaaaatagatgcaatagttgaatagaaacaatagctttaaataggatcaacatgctcaaagggttgtttgggatctgtgtgacttgccttgctggccttggaactcttcaaactcttcttctgcgaaaacggactctccggaaacgacggaatctaagcagaaaagagcaaaatcactaaaacagcacataaacaagcatgaacagtacatgtggatatttttaatgtgtagatctcaattttagaaaaatttagagacttgaaccaactaaatcggagctaagatgaattagttatgaatttttaaagattaaatcggattaaaacacttatatcggtttaaattgaattatgacgcaataatgaattatttttgaaaaggaaaagaaggtttattgcgtcagcgggctagggttttggtggaccgggcgcacgggcggcggttcacgcgaacggacggccgagatcgaaccaatccaaaacggacggccgagatcgatcgggtccacggcggctcacggcggacaaccccgatgacgtcggcaatgacgtcaccgacagcggcggcgactcgacggagcggacggctcggacggcgcacgctcgccggcgaacggcggcgcgaggacgcaaacggagggcaccagcacgtagaggacaacgcggcgaacacaccggtgaccaaaacggcggcggaagaacaacggacgacgacggcggcgaggaggaaacggcggaaaccttcgggttgtcgacggcgacgaagctccgacgatctccggtgacggcgaaggggcggacgaggacggcgacgtgacggcgaccacgatgacgtccttcccgagcgacggcgcgtctggaacggcggcggagcacggctggagcggcggcggcgacggcgaagctagggcacacggcgctagagcgaaaccggcgacgagaggcgaaggcgagggtgcctaaaaaaacaggag

SEQ ID NO: 13648 - DNA, 8154 bp, Oryza sativa
tccttcggcttcgcagcatcctcgccgacctagtccacctctccgtttcggtcgccgaccgccggagcgccgtcgtccccgtcgacccgagccgcgccaccacctccctccgctccggccgcctcctccgtcgccgccgtcgccccggggtgagccgtggaccgtcgcctcctttcccccttccctcccttctctcggccgccgctccgccgcgccggtggtcgccggcggcgaccatcgggacgcgggcgcgccgcctcccgccggccgcgctggcttggccgccctcgggcgcgtcgagtggctgccgtgtggggcccggccgtaagccgcccgggccctcgggtgcggctgacgcgtgggacccacggcgccggccggtgtgagccgggtgcacccggtccaccgtggaccgtgaggctgccgcgtgggccccactcccgtggacccggtccgcgcgccctctcccctcggctgacgcaataattccgattttaaattaaaatttaaatgaagaaattcgcaaatattcaattaaagagcatataaacttcaaatggccataacttggccatttgaactcggaattggaccgttcaagtctctaatttttccttaagaagtcaagaacccatttttgtgctttgtttctgcttgttatatggagtttattagagtaaaagccttttcttttctgttggtcgtgtagacgctgcagcttcggaagatccgctcttcgtggaagttgaagccggcgtttgggaaagcgagcaaggcaagtcacatcatccttgaacatattaaatcccagtttataaaattattttgatttaaattattgcattgtcgctttatttaaattcccgcgttatcactgttttatttagccatgcctatttacctttgttatgaccttattattattgttattgttattattaccttgttcaccctagattaaacaaaaccccaactagtggatactctacttacggtaccactagtatgattttaggtagatgcttcgctgtttaattaggtaacattaggtggttttacaactctagactttgggatattctcatcacctggacactttggaattgttggattattgtggaattggattcacaccgccccctctattcaaaacccccaaaatggttttaggctgggctcggggtgcatggtttggatagtagcacctcggccatataaggaccggtcttcgggcctctgttgcaaagcactaccgtacttccacatgtctagtgggtaaggcttagtttgtggctcagtctggttataaacaaaagtacacggatggagatggacgaagtcgggggtcgatggacatctctaggacaaatgaaggctacacgagctgcggcccggtagtcgagatgtcatggcacagggctggtgtcctgctgctaggggctcaatcctgcctacctgtcccggaggttccggccgtaggtggggttgggtcggtactcttgtctatggctaggatgggttggaaactatgtcatgtcttccgtccatatgccgtggtggtatgtggcacgtggttacacgtgaggaagatgtgtcttgtgggtaaagatgtacacctctgatcagagtataacctattcgaatagccgcgccctcggttatgggcaagccgagcaatgtacccaagttagtgttttaattcttaaaacctgcttaacaactaaaatgtggaatggttggcctgggttggcttgggacgagctgggacccagggtcgggttgccagttcggtctgaatcatcgtaggccttgggttaaggcaggttcgtgagggttcacggccttgattaataataccgtgtagctttaggatcgtctttttaaaatggctttgggcaactaagtgacttttaaatgctgtttactgcaaaacttaacccctttattattaccccttgtacccccttgcattaatcatgcatctgccggtgtggcttgctaagtactgtggttgtactcattcttgttcaatctttccccccttcagtaagagaagcttcggagaagatgtcttaggtggagtcctggcttataccccagttgagcgcctgtgaagatggagccgtaggcccgctagtccgctgctgtttatttttgtttgtcaggccgaagtgcctttgtaataatgtaaatattatcgatataataaagatgtgccttttgtatcatgtttgtttggtgtaccccggcttttcctgggacggggattaatacactagcgttcgggaaaatgtatttttctcggtcgcgacaagctggtatcagagccatctcgactgtaggataagccaagtggataaaacctaaggacatattttataaataaaactatttgcgaaagttccttctttctccttcccctaatgctatttgcaaaaggtttactcccttcttccttcttcggatttcaactagtactagatggtcaggtcagtgaagaagaagacatcgtcagttgtttgccgaagctccggaagactgcaggatccgttagcgaagtggaggaagcagtgaagccaactgtgaagcaggagtgaagatcttgggaacccgtcgcagaacctaagccaccctctagtgtttcgtttgtcgtgtgtttccttgcttgtgtgtgtagcgcgtggtttgcatcagtgggttgtgatgtaaccatgctaggttgtttgcttaatcaacttgcagaataagcctaacatacatcataacagcaaaagacttagatctgttaaggtcctatccttagtttctaatctgtctctcccctttgttttccctctctccctctccaaacctttgcaacagatggctgacaatgagaaaggcaataaggtcagaagtcaggacattggtacctcaagctcccgagtgaatgaagcaccagacaccagttgtgtgacactggtccaacacctgattaaccagaaccgattgcttatagagatactacagcagcatcagacgccaattctgaacctgagtcaaatacaacctcaagtgcagttggaggcagtccaagcactcacaccacaagtcagcatgccgccagcatcccgaaggacccatggtgacgtgccacatgttgactcaaaagaagcaagtatcatttgttttatgtgtgatgagcaagggcactatgcaagggagtgtcctcagcagaaaagaaaaacaccaatgcgaaccgaagatgaagtccgtaagatgatcattaccagcatagaatggcctccaccaggaatgacaaaacgtcagagaagaaataccttccgaggtgcaccacagttgacagagcatcttttagctaatggaggtagggtgtctgatagtgaagattcagatcaagtctcctcagatgatgaagatgagaagtctccccaaggtttcaaccagaataaaatggaacgaaaggcatgctctcgttgtggagaaatcggtcatgttgccagctcgtgtgccactacatgcgttcattgtgaggaagaccatccacccgacaggtgcccaacgagcaggatcacttgtttcttttgtgaaggaactgatcatgtaccaaaagattgtcaattcagttttctgctgacgaagaagatggccaaccaacccgccagttccaacggagagaagcatcaaggcaacacaaatcctcgtcaagattacagttttagcctaactccagtgccaggacagaggaatcaaaatgagaaaagaaaatgccgagtccggaaagatatttgttgcttcaattgtcaaggaatgggtcatttcgccgacaagtgcccaaaaccgagaaacatagctgccagcacctcagtccacgcaactccctgcaatcagaagcttgctcctcagcgaattgtcatccatgcatcccgaagcagtcctatagcccccgttgcaacagctccaactccagcgagtgcattaccacaaggtgtcaatgctcaacttcagccccagccaccagttgacaacacagaggccagtatcggcattgtacctttggatgttccagcacagcagccaagaaatcaagtacaagataaagaacccaagccaatgggaatgagaaaagcatcaacgaaacctcaccagagctaatccaaattgtggttaaccaaaccaacatgttggcaacagcctttcaactattacagaattggaacaacccagcaggggcaaccaacgttcaagtacctacagtccagcaacagtgcaagttatcagaatttctaaaaactgagactccaacctttgccattgccgtcgatcctatggaagccagtgattggttgcgcacagtcgagaagaagctggggttggttcagtgcacagaccaggagcgggttgtcttcgcaactcatcagttggttggactggcttcagaatggtgggatagctacgaagcatcacggccagaaggacataccatcacctaggacgagttttcatctgtattcaagatatcacatgttcccgcaggaatgatcacactgagaaaacgagagttccgctacctgaatcaagaagatttgaccgtcacagagtacctgcacgagttccatcgtttggctcactatgcaccggaagatgtggaaaatgatgaagacaaacaagagaagtttctccaggcgttaaaagatgagatcgcagtgcaactactcctagaggaatatgaagattttgagaaacttgtggacaaagccatacaactcgaaagtgagcataatcggatgaagaactgtaagaggaggattgtcagcatcccagtatcttcatgtggtaaccaaagacagcgcactgagccacttcagatcatcggatcttctgttgcacatcaagagtttccgccccaagaagatggacacaatgcagacaacaacattagcaatactaatgatgatgataccaccaacaaccatgctccatgccccattagtgaccactcaaaccaagcgtgcaatgtcaacatcattcaccaaggtgtcgacgatagtatcgatgatggcacccaaaatgacaaccctagcaattgtgactctgagaaagactccaatggtgatagcaactatggtaccactgatgccaatgttagcaaggatttccaaccaccaattccaactccaagtcagaatgatcgtccccagacggatagctcagcaaagaagacgttgatttgctacaattgcaaagaaccaaggcattactcgagggactgcctgcaaccaaggcaaagtcgacctccacattaccgccaagttacacaaagcagacatcccaatcgtattgtggtcactggagcaaacaccgtacccgtgaggcctcgtgttaatcagaacccatagcagaaacaatgtaccgatgctaagcacttttccttttaggcagtgcttagtattcatgtaatgagggagaaatgtgtaatacagacaagttctatgaggattcttttggaagatgcggatatgtgattatgtgtataattgcttactgataaaggagacctagggtctcattccagaggaactatgttctaacctcgagttaataaccaaccggatgatggaaaagaaaatcaagtgattaaccaaagagacatttgtttggactaagtgtttcagatgtgtcttctttggatcaaaggcaacaaccgtcagtctagcttttgatgaaccacttgaaggttctgtgaaaggcagcaggctcaagtaccacattgccccagaagcatcctcaacacccggagcgaagagtacctggttgagaaaggtcgaaaggtgattaatggaagggatcggaaaagatgtttggttactgggaaaagaagtaggtcgaaaggtgattgataaaggataacgagaaccacgatttgtgtcactcgaggaagactcccgatagcaatcaaccctacaacagttgccctgtcattaaagtaggtgaattcacgagtaagagagatgaccacaggtagaagtacttctatggggacaaggatggaaacttttgtgacatgaccaagaagtcaagaagtaaaacctgaacagtggaatctaaagctcggttcaaccttgggctttgtatcagatgctactagaataaaagcacttgcactagtatcgttcaacgcacttttctagcaatcgatccatcgagaaagaacacatcaaggctgaaggtgcaaaggaatacgttgaatgctaaatgatgacaacatgaagagaatagtggaaagtaaactgaacataaagaaagtgaatccgagttgcttgttcgtgagagctattcccagttatgaatcaagtgatatgttcgaagataatctacagaggtcagattaaaatcacatctaacaacgaagcctcagatttggcaagataatgatcagacaataagaagtccagcagtaaaactatttgggaaggcgtcaaagtatatcaagtgggataagttggttctcttgggaagcataattcaaaggcaaagttatcgacccttgcatcaaatagaagaagtagctatcacccggagaccaggaaaactaatatgaggcagttggtggcaagttagaagtaaatgacaagcatggtattctcatgatgacaagcatggtatcttagtaatgacgagctgatctcgacgcatgacatgaagtgggtaacttgtatgaggttgacgccaaagatatgaatgataagaagttctagaactgaagccccatcctcgaccgccacagcctagtctgagtcagttagaggtgcaaccagggaaaagtcgggtgaagagaagattccatctgcaacaggagatcgagccaagcagtccagagtggagaagttttgttaggcaagtttgttatagaagacggagcggaagaagtcagacaagaagagaagaccgcccaacctatcttcatgctagcctcctcgaatctcggggacgagattcttgtaaggggggtggatttgtcacgtcctgataaattcatcccgaattaaaaatcattcgctaaaaggaataatagaattaattaaaattcgaaaagaaattgacaaacactaaaatacgtacaagaaaaattcaaatgtggcccggagaatttttgttaaattctccttggtctaaaaggagccctcaaattttagtggaattttcagagcacaaataataattattaagaaataaacaaagttaaaatgattttataaaaagaaaaaccctaaaaagtctttttctccccccctccccctcttgggccggctcggcccatctccttccctctctctcctcctccccgcggcccactcggcctctccccgagcgcgccgctgacgggcgggcccgcccgccaccctcgctgacgggtggggcccacctgtcatccctatcctcccgccgctcccgccgccccgcccgcgccctagcgccgccgccgccgcgaatcccgccgcctcccgccgtccccgcgcgcattaaagtggggggaattattccccgcgatcccctctctctttccccccatttctccctctctctcccgcgttcaaacgggcggatttgcccccgcaaatctcgccggcgccattgatgacggccgacctcccgcgccggtttcctcccttccccggccaccctctctcgccccggctctatttaaaccctccccgcacctcctccgtccggttccgcctctcgccgcccttcctcctcgccggatttgagctcgcgacgtcgctctctctttccgccgtcgccgccgagctccggtccgccgcagtcgtcaccccggaccgcctcccacctcggcgccgcctccttcggcttcgccgcatcctcgccgacctcgtccacctctccgtttcggtcgccgaccgccggagcgccgtcgtccccgtcgacccgagccgcgccaccacctccctccgctccggccgcctcctccgtcgccgccgtcgccccagggtgagccgtggaccgtcgcctcctttcccccttccctcccttctctcggccgccgctccgccgcgccggtggtcgccggcggcgaccatcgggacgcgggcgcgccgtgtcacgcccggaagttcccctcccttgctctaa

SEQ ID NO: 13649 - DNA, 8509 bp, Oryza sativa
aaaccctaaattaataaatgcaaatattaatcggaatcggcatgtggaatttttcttggattctacatgtcaaaatacgctaacaggatttttagtggaattttcagagcattggaaataattttaaccaattaaaattgagcttgtgcaatatataaatccctggaaaatcctttcttcttttcttttccctcctttttcctttttcttgggcccggcccattccctccagcgccggcccgcttcacctcccgcgccgaccttccctcggctgggccggtccaagccggcccactccctccctcctctctccgggtcaccgacaggtggggcccacctgtcggccccttcttcctcctccagccgacggcaccgccgccgccgaaaccgccaccgacgccgccggtttccccgtttcccgcgcccactccgcccgtaccgcacgcccacgtcgccgcccaccttccccgcacctcccgccagctcgcgcgcccgcaaacggcgggggatttgaaatttcccccactctctctctcctcctccatttcccccacgtcgccggccaaatcggccacctttccggcctcgtccgcccccccgagcccatataaaccatccccgcactcccctccacctttttcctctttccgccgctctctcccgtgccctccatcactcccgcaccgctacacccgccgccgccgccttttccactcctccggtcgccgctcgccgccgctggagccgccgccgagccaatttgccaccgccattagcttcgccgccgccaaagctaccccggccgccgcatccccatccaatcccgccatcggggcccgcttctctccgcgcgccggtgagtaccaccatagccgccgccgtcggccatggtttccgcccgccgtagaccaccctctctccctctaacccctcacacttcctctcttagggtgtcccggagctcggccgccgttcgccgtcgcccttcggtcgctcaccgtcgtcgtttgccgtcgtttcctcccgcgccggccgaaccccggtgagaactccctctctcttcctcccgcgcgcgccgccgctccccgcatgcgcgtcgccgcgatgcaccgtcgcccgcgtcgccggccgccgtcgtcttctcgccggccgccgccgtcggaggccgcttgccgccgccgccctcgccataaccggccggccggcttgaagccgagccgagccaggccgctttcccccccccccttgtgacgctgcccggtgggtcccgcctgccagccgcccctctccctctctcctgtgcctctgtcccgtgggtcccgcatgtcggcgccgccccaccccttgctgacgtcagccctgggatgaattattgcgcaataaattgattaagggtttttcttttatagtaataaacacagtgaatcttctaaaattcataactaattcatccgagctccgattaatcccattcaagtctcagtaaattcataaaaatgtgtagaatccattaaaaatggttttgcttcctgtttcagtagtcttatagcatgttttgcttgtgtgctttgtttgtcgcgtagatttcgcccgtttcgtcgattcgtggtttcgcgaagacgttgctgtggttccatcagtgcgagagcaaggcaagtcatacattgcaattgatcatattgtacctaatttacaaatgtcccgcatttctattaaatattgcattgttttacaatatcatgtgggatgggtcctattactcagctatatgttgtttcccttatgccattgataacttgggtattaaaatgactagatgttggtttaggagatgcttagccatgcttagttcaactagtgcacaaaaggggaccacattaaagcatagacttgattattggcaatagctttggattagtgccaccgcaatggtgttggctaattaaaatacactacatggtgggctgtgggtgcatggttttgctagacgtgcccatggcgattaaggaccggttcgcgggatgccctggaagaacttatcgtacttaccacaagccagcgtgggcaacggctgggcttgtagtgtagcttttctctagccgacgtacccaggcgagggtgggcgtgatggagttgggtcggccggggtgtccggttgatcggctgccggattcaccgcggcacgaaaggggggctgcccgttgcctgctggggacgggggcgaaccctaaggtgtggtgcgatcggttagagggggttatacgaagggtcctgtcacggcctctttccggtatgtcgtggtggcatgtcggcgcacgggaacgtgtcgtggggctgtgtcttgtgggtacagttgtacacctctgatcagagtaaaactattcgaatagccgtgcccgcggttatgggcggtcgaccagattcaccgtgattagtttcaccctagttagcttttggaactgattagtttaggtggtggtttgggcctgttgcaacgtggtgtaacgttggacagtgattggttaatatggattaattactacaactgttttactgctttcaactactgttttgaaatgccggctttatgcaaaagaacctttagcctcccttggatatatcttgcatcatacctcctcttccggtatgacttgctgagtacagtgggtagtactcagtcttgctctcttttcccccacaccagagttgaagtccttcccagttgaagatgtctcgaagaggttggtttcgtcgctgccgtcaaggattgcctgtggaatggagtcgcccgctgcaggagtcaagtcttcaggcttagctcgcttttatctttttccgctgcatttgtaatcttttatatttttgtaagacgtggatctgtatgtcaacaattgtcgtttgtgtaccctggctggtcctggacaggggtttaatgcacaatcagcttagaaattctggttcgtgaatttctgggcgtgacaagttggtatcagagccgaccttgaccgtaggacaagccaaatggaaaccctaagagccctctgaaaccttttcatctgcatatgctttttgcacttggatttgtttcgggaaaaattttggggttttgttcttttgagtttgtgggaaaaatcttggtcgcttatttaattggatttctcgactagggacagtctagggtttggtaaaagtttatttggagtttatttgacagtcagttgggaatttatcgggtgatatgcattaggtcgtgtctatgttcgatggggcaatgttacgcgcatcatttttcatgcatctagtttatgcattaagctatagtttagtcagtcgcattagtgtctttatccgggttcatgaaaaatgttctatgcatacaaatcatcatgcttggctagtggtttgggccatttgttgcttggtttaaatttggatttgagcatgcattgattcctatcccttgtctaccttagaagtcagacatgttcttcgatcgcaagcgccgctccgagcttcagagtcgccgcccttagctttatcgtcttcttagtctgtttgcgtgctagtttttgtgtttaggtttgttgcttgtgggttaatcggcggtcgatatcatgtgtgagtggtatgacagccttaattaggaattgcgtgcctctttttcagtgttttaatcaagattaagataattgcacttaattttataagaaagattagtttccgagccatctgttttcttcctttctcttatttctacctatcctcctccagatggtgaagacaaggaatgatccccgtgactccaacgacgccagtggcagcgaagagcagaccgatggagctcatgtcagtggtgcatctggcagcagatcatctccaccgcccgaaaacccaacagtcactcaaatgatgacaatgatgatgcaacagatgcagcaacattaccatcagatgttgcagcaggcgcaacagaaccagcagtttggtcctccaccatcacacgtgtccaaactgttagactttcttcgtatccagccacccactttctcaagcaccaccaacccaatggaggccaatgactggctccgtgctattgagaagaagctgaacctactgcaatgcaacgaccaagagaaagttgcttttgctacacaccagttgcaaggtcccgcttctgcctgatgggataactacgtggcgacccgtctagatgcaacggaggttacttgggcagagttttgtcaaagcttcaggaaggcacagattcctgaagggattatggcacaacagaagagagagttccgtgcgctccagcaaggaaccatgtcagttacagagtacttgcatgagttcaaccgccttgcgcgctacgctcctgaagacgtgcgcaccgatgctgagaagcaggagaagtttttgtttgggctcgatgatgaattgaccaaccagctaatctccggagtttatgaggactttgagaagcttgtggacaaggctattcgtcaggaagagcaacgcaacaaaatggaccgaaaaagaaaggcagctcagatcagctttcctcaggggaacaatcagaagcctcgcttcatgacgggacaactaggtgggccttccaccctgatcgtctgtcagcaccgtccctatcacccgagtaacttcgacaacgactacaacggtggcagtcacaacaacagtaagcagcacaaccacaactcgactccacccccactaatggcaccagctcagtcagatccgccagctgtgtcagttcagtcagaacaacccaagaagggggctgtaggaaagccaggaccctgcttcaactgtggcaagcacggccattttgctggcaagtgtccgaagctgaatcgcactggacccaggttcatccaggcccgcgccaatcatgtgtctgcagaggaagcacaggcagcaccagaggtcgtgttgggcacgtttccagtgaactcatatccagcaacagttctctttgattcaggtgcctcgcattctttcatttccaaaagatttgctgggacacatggattatcgatagtagaacttaaaataccgatgcaggttcatacccctggaaatgatatgaggacagcacactactgcccctcggtgactatagagatcaaaagatcaccgtttctatccaacctcatccttctcgaatctaaagacctggatgtcattcttggaatggattggttgaccagaaacaagggagtgattgactgcgcaagccgcaccatcaccctaaccaacgacaaaggggagaagatcaccttccgttccccagcatcgcagaagcccgtagcgagtctgaatcaggctgctattgagggtcagacagaaacagtggagaaaagtcccaggaagttggaggatattcctatagtacaagagtatcctgaggtgttcccagaagacctcactacaatgccaccgaagagagaaatcgagttccggatcgatttggcacccgggactactccaatttacaagaggccgtacagaatggcagctaatgagctagcagaggtcaagaagcaggttgacgaacagctgcagaaagggtacatccgaccgagtacttcaccttggggtgctccggttatctttgtggagaagaaagacaagaccaagaggatgtgcgtggattatcgcgcccttaatgaggtcacaatcaagaacaaatatccgttgccaagaattgatgacctgtttgatcagctaaaaggagctaaggtgttttccaagatagacctacgatcaggctatcatcagttgagaattcgggaagaggatattcccaagacagccttcaccactcggtatgggttgtttgagtgcacggttatgtcctttggactcaccaatgcaccggctttcttcatgaacttgatgaacaaagtgtttatggagtttcttgacaagtttgtcgtggtattcattgacgacatacttatttattcaaaatcagaagaggaacataagcagcatctccgtctggtactcgagaaattgaaggagcaccagctatatgccaagtttagcaagtgtgacttctggttatcggaggtcaaatttctgggtcacgtcatttctgctcaaggcgtggcagtggatccatcaaatgtggaatcagttacaaagtggaccccaccaaagatagtttctcagatccggagttttcttggacttgcgggctattaccgtcggttcatcgaaaatttctccaagattgccaggcccatgacacagttgctaaagaaagatgaaaaattcaagtggtcagctgagtgcaaccaaagttttgaagaactcaagaagaggttagtctctgcaccagttataattctgccagatcagacaaaagacttccaagtctactgtgatgcatctcgccaaggattgggatgtgtgttgatgcaagaaggcagagtggtcgcatatgcttcgcgacagttgcgtccacatgagaccaattatcccactcatgaccttgagttggcagcagtggttcatgctctgaaaatctggcggcactatcttattggcaaccgctgtgaagtttacactgatcataagagcctgaagtacatcttcacccagcccgacttaaatctccggcaacgaagatggctggagttgattaaagattatgacatggggatacactatcatccaggcaaagcaaatgtggtagcagatgctctgagcagaaagagctattgcaatgcagtatgtaccgaaggcatgtgtgacaaattgcagcaagatcttgagcacctaaatttgggcatcgtagaacacgggtacgtagctgccctagaggcacggcctacgctcgtggatcaagtcagagcagctcaagtaaatgatcctgaaatagctgagctgaaaaagaatatgagggtcggaaaagcccgagatttccatgaggatgagcatggcacaatctggttgggagaaagattgtgtgtgcctgacgacaaagaactgaaggatctcatactcacagaagctcatcaaactcagtattcaattcatcccggcagtactaaaatgtaccaggacctcaaagagaaattctggtgggccagcatgagaagagagatagccgaattcgtcgcactctgcgatgtttgtcagcgagtcaaagcagaacatcagaggcccgcaggactgctacaaccccttcagatcccggaatggaaatgggaagaaatcggaatggatttcataacaggtttgcccaggacatcatcgggtcacgattcaatctgggtggtcgtggatcgactcaccaaagttgctcattttattccagtacacactacctatactgggaaaaggttggcagagctttacctttcaagaatcatgtgtttgcatggggtacctaagaagattgtatctgatcgagggagtcagttcacttcaaaattttggcagaaactgcaagaagaattggggactcgtttgaatttcagcacggcctatcacccgcaaactgatggtcagaccgaaagggtcaatcagatcttggaagatatgctgcgagcgtgtgcgctcgattttggtggagcatgggataaaagtctaccttatgcggaattctcttacaacaacagttatcaagccagtttgcaaatggcaccgtttgaagcgttgtacggacggaaatgccgcactccgctcttctgggatcaaactggagaacgccaattgtttgggacggaagtattaactgaagcagaggagaaagtcagaaccgtcagagaaaggctaagaattgcccagtctcggcagaagagttatgctgataaccgccgaagagagcttactttcgaagcaggggattatgtgtaccttcgtgtcactccgctcaggggagtacaccggttccaaacgaaaggcaaattggcaccacgctttgtgggaccatacaggattttggaacgccgaggtgaagtcgcttaccagcttgagctcccatctaatatggttggaatccacgatgtgtttcatgtatctcaattgaagaagtgtttgagggtacctgaggaacaagctagctcagagcacattgacatccaggaagatctgacttatgtggagaagccgattcgtatccttgagaccagtgagagaaagaccagaagcaaggtgatcaggttttgcaaagttcagtggagccaccactcagaagaagaggccacctgggaaagagaagatgaattgaaggccgcccatccgcacctcttcgccagctcttccgaatctcggggtcgagattccgtttaaggggggtaggtttgtcacgccctgaagttcccttcccttgctctaaattcataaaataaatcgtccgaagaaattgtttaatttaacctagagagaaaccctaaattaataaatgcaaatattaatcggaatcggcatgtggaatttttcttggattctacatgtcaaaatacgctaacaggatttt

SEQ ID NO: 13650 - DNA, 1610 bp, Oryza sativa
cggcccaaaaccctctctctctctcctcctcggcccaagtcggcccaagtcaagccgagccacgcgtgcgctcgctgcggttgacaggtggggcccacctgtcaggcctgtcgtctacctccggccggccgccgcccgaaccctagcgccgtgccgccgtcgtctccttccaaatccagccgcccctttccgtttccggtgaaattaatagaggggaaatgatccccgggatcccttctatcttttctcttatggaatcgtcggctaattttgtttggaaatccgtggattcgagttcgattcggatcgatctctctcctccgaaccctagactttccttcgcgtcaccggtcgccgtgagccttcgccgccgccttccaacccctatataaggacccccaagcctaccgctacccgtcgccacccttgccttcgtctctagtcgtccgtagcgccctagccccgtgagacctcgcgccgccgtcgtcgccgccgctccagccgtgcgccgctgtcgctccagtcgtcgccgtcgctcggggaggtcgccatcgtggtcgccgtcgcgtcgccgtcctcgtccgccccttcaccgtcgctgtcaaccaccggagcaccgtcgccgtcgtcaagccgaagagtgccgccgccttttcctcgtcgccgacatcgtccggtcatcgtccgccgtcgttttggtcaccggtgagttcgccgcgtcgcccgctacgcgtaggtgtcatccgtttgctccgccgcgccgtaattcgccggcgagcatgcgcgcccgagatgccgccggtggtgacgtcgtcgctgacgtcatcgtcgtcgtccatccgtgagccgcggtggatccgatcgatcttggccgtccgttgtagttaggatcgatctcggccgcccaatcttgtgaaccgccgccgtgcacccggttcaccgcgaaccctagccaatgacgcaataattcccttttccttttcaaaaataattcattattgcgtcataattcaattaaaatctatataagtgttttaaaccgatttaatctttgaaaattcataactaattcatcttagctcggatttagttggttcaagtctctaaatttttctaaaattgagatctacatgttaaaaatatctacatgtactgttcatgcttgttaatgtgctgttttggtgttttgctcctttctgtttagattccgacgtttccggagagtccgttttcgcaggagaagaatttgaagagttccaaggccagcaagtgtcacgccctgaagtacccctcccttactctaaattcataaaataaatcattcgaagaaattgtttaatttaacctagagatgaatccctaagtaataaatgcaaataataatcggaatcgacatgtagaatttctcttggattctacatgtcaaaatatgctaacaggatttttagtggaattttcagagccttggaaataattttaaccaattaaaataagcaaagtgcaatattaaatccctggaaaatcttttcttctttttctttttcctcctttttctctcttcttgggccgtcggcccagtccgttcgcctcccgcgcgctcgccctcctct

SEQ ID NO: 13651 - DNA, 5479 bp, Oryza sativa
catgcaagcttgtgaaagagcaactgctgtctgatttggaacaaatatggctgacattattctgatcagccacaaaatatagtcatcagagagcgcaccatgtaattccatccagagaaaaagtgcctgtcatttggacagccacgaagtcggatgagattcaacttttttgcatgcaataacctttggattcggttgaccgagggtttttggcaattttctcaatagccaccacccaaaggaagaaggtcaattttatttgctcaatttatcttattacctgatttatgtgatcaattaagctggaagcattacactgttttacacaattggttgcgagggtgttctaaccccgataatgctggtgtttaagattatattgagcaaggaaataagtggaatgtgtagaagtgagagaaaagggaaccgaattttttgatgtgttcctttcagtagttgaatgccatctctactagctgatagcctgataccagctcctgtcgaatttgttttgttctgcatgtattccatgtctccaaggatgagctaaagatatagagaaaacagtttttggcgatctttgcttttcagttttgcccttgttatactgagcgatgtgcacttttttgaatctctctttaaggaactttgctagacattaacccctgcttcttgtgtcttcagctgtataacatgttgcataaacccgggccgttctacgttttgttcaaacttgaaatttagttaatacagagttggaaaaaaatcaagacaaagttaggagaacctggacctaatcaatttctcttggttataccttcgcgaaagttcaaattaggtcggaatcgataaagcttaatacgaaattagatcggaatcaactattaacaaggaatcctaatgtgggaaggtttgatacgaaatgaatttctagctgatacaaagaatcctaatgtgggaaggtttgatacgaaatgaatttctagctgatacaagtaggaaggatttgttcattctctctctcgcactggaagatcagtgaaaacacaagggcagtatgtaaactctgtatgaacaaccaggtcatgtagcaagaacaaaatcattcagaggctcaagccacttttcagtatggagtggacataatcacatacttcctccgtcccaaaataaagctatttttgaggttggcacgggtattaagaaagtatgtgagaatgattggaggaagtgtgtgattagttgaaaagagaaagtaggtgaagaagaatagttgtgattggttgagaggaggaggtaggtgaagaaatagcttcattttgagataagacactgtgctagaaatagttacattttgggacggagagagtactgtactagcagtagtagtatgtcgtttaacttggaagaggtaagggcgtggccaacttgcccatccctgagcagctttacagatgagcaagaatctctaaacaattaatgaggtcccaagatccagatctagctagtcattctgtgagactctgatctgagtatcgtacgcctgcttttgctgataagaagctcacagatttggagttttggatagagagaacctgaacctgaaccatgcagcttcagttcagcaaacagcactggcacaacggattcttgccatgagcggacacaagaaggcttgaccacttgagctacaccacatgttgccaggacgaagcttgatactcaccattagctgcaacttgcaaagaagctagtagttgatgtcttgttacgtgatggttcacccatcgccatccttagcttaacttgcacattccaccgaccgaacgaagacgcgaagagcgaggcatctgcctatctgccttctgcaactgcaactgatcaacacgccgacccttttctgacactgaaaggaacacactgcagagcatgcacgctaagtctttgctttccatctagctaatcttcgctggccagcaactaaactataactaaaatgtggtctaaacctgtcggcttcatgctccaggccctgcatgtcagtgaaacactccttgtcgcctctatgttctgctcccctaatctcacccaactagcaaggctagattaaaggaagagttaatgacagatcataaacacatactttctacttgcttttagatagtttaattacgtagggctgcataatctgcatttctttttttttatagatatgcatttgtgtaatgtcccttgtgtgcacgcaacagtgaagtccagtctcacttgcttatgttgcatgataatgacaccaacagtagtggcattgttcacctctctgaaacttctcgcattgatgcatttcagtgaacttgtcttctctctagtgatgtcttcagatcaggcagttgtctatgccgctttgcatcattgtcagataagggcttgtccgtatctccgtatgttgtcattcagagatctctcttatttatgtttgattggatatggggcacccgacaccagatacattgatatatacaacattcgtttcatactataagccgttttgactttttttttaagtcaaccttatttagctttggccaaattttataaaaaaaatataataatttttcaacataaaacaaagaagctattaaaatatatttaatggtagatttaataaaactaatttaatgttataaatgttactgtatttttctataaacctagtaaaacttcttaacttagttaatttttttaaaaaaatcaaaacgacttataatattaaacagagggagtagacgagtagtgtatattgataagtgatgagtccagcctacctgaataattcttttgagttaatatggaatgaattatgtaggaggtatccatttggacaccacttcagagttcaagttgatgtcaagtgctccattaagcacactgatgtagtcccttttctgtagtaagaaaaaggcaataagctagataaccttccattgcaattgtaatgctactcatagctaatgctgtagggacactttgatggtccaccaaatcagaaatattacaatgacaaactttgtctggtcaataacgccctggttcttaaatggcaggccatccgtttgttttgcagtagctattcgtcatgttggctacaaaaagcaggaaagcaaaggttggcaatggttgttcttcccatccgtttcgagctgcaatagaaattgaaacgtccagagtgagtaatgctattctgtctatgagaaattccaatgatctgtggctgaagctgaaaacatgccctgttgttgttagtaactgacaggccgttctgcgacttgatgatagccttcaatttcagtttaccagcataaaccacgcattgaattcgttccaacaaaattttcatgcgttgagaacttgagataacagctcaagatgaggtcactagttcgtttgtcaattctcctcgaaattgtcgatcatctttgcaggccttccaagttaaggtaccctgagctatcacgctgtcacgcggacgacgtgcgtaatacttctccgtgtaaaacgctgatccgtttgctacgaacttggtacaagataaatcgtaaaacgttaggacttgattaacgctgaaaaacacgcgtgttagagtccaaaccgattcattctccatgagaccatgacaaattgacaccaacacaaacgtttcgggcagttattattgaacaaactaccaccacaaattatctactatgtattatagaaattatcgggactggtgagagccggcgatgcacggaatttttgaaacgctctacttcactaaggaagatatgtttcacttttccgatcggaatttgaactctggctggttcaggttacagtcagaggaaataagaagtatggtaagatgaatgaaaggcagaaatacaggacatacgctttatcgcagaacatctatttgctttctattcgacaagaaggacaatgaaaagataatggatatggaacacaggtcctggcactattggaaaatgaagctctctcagttcaaacatatgagattacttacccggtttctaagggcggaacaggaaagtaccaaggtgcactaggtgagaagaacttttttcgcttttttatcggaatttgactcattttagtatagaaaaacaccattctatctgacctagtaggaaaagttactattttgcattccttagggaaagtggcattttcaagggtcatttttgaaaagcatttgtcccaaccatgtgcaaaagtaaagaaaattgcttctccctcgtaaatggctccaaaatctactccatttttgaaaacttgatagccagcatggggcaatttggtagttttttcattttgcttgtaaatcggctctttttggcatcccagttctgaactttttcatctcgcctagtggaacttgagactttttccagtatctttatccagcagcaggactttcactactttcccaagtaaagctagtgttaagagactggattgtagaagtgttgactgacttgactggaaatataatatggaaagactgatggactgactaaagtggctattgacttaagtggctatttcctgattccgatatggcgtcctgaatccaatattgcttgattgtctgttgatgcccagccgaagaagtgacttgcttaacgtagcaatttctgttttcttgtgctctccacctccgcttgacactatcgtagtagatcataagagaagtattctttcaagaaattcgtatagaaagatggactagctcgagaacaagcaacggattgagcgcactagcgcaaaagcgttagcacgcgcatccgttttcttgctccttggcttcaaacaatcgattgaatctggattcctttgcttatccttcctggctatagtctctcttgtgccttcggcagttcagttaaagatttctgtatcaacagtttgtttccccatttgctcaaagaacgcataaaacctgttccctcatcgtatcaaaagatcaagcggaagagtcctcttcttcaagaagagtttttcatttcactcttccgcagcaatgcccgggcaagaaaacaatatgagcaaatccgcaaaacaatatcatagcaaacggtatgtgctggttggatagagcaatcagtagttgacgttcgaaccaatcttctctctagtagactttagattcagtcgtccgtttgttttgttttgaattgacatagagaaattttcccactacgtaattaaggaataggtggcgaaggcccttggcggactatatataaaggaaaggggttatttttcctttacggcaataagagctgattcccttgcttgtagtttttgatcgatggagtgtatttaacatatttaagagtggttaggagagagaatcaatgtttagtagtaggcccggttcaccaggttctaccactgttcggcccaatcatagtcaaaatct

SEQ ID NO: 13652 - DNA, 2079 bp, Oryza sativa
aaagaaggcgccccggcaggaattctgtaagcttgacttgcgcgcagcgtttgggaatcaaagataaaaaataactctatgggacttacggaactggaaaaaaggtagcacctaggcgtaagaaagaaagtaaatagagacagcacctactacgctatctattgaagcttactatataatatataaaagaaaaaaaaaggccatataagtgagatcctagccagagaagagcaacaggagctataaaaaaggaacttatggacttgaatcagagattgggttgacatccgaaacagagaggaaaagaggaagcaaacatagctagctcacgaaagaaagcttgcaactacgcgttatatattttattttcaactgcgctaataagggcacatccgctttctctgtatgtagattaaaaaaatacataccatattttttcccttgctttgctatttgaatgcttacctcagtgcaagagcagggaagaggtttgattgctaataaaatgagtggaagaaggccgtcatggaagagtttggggtccaaagccacaccttctttctcccataggaacagaggtcaggagctaccggcagggcgctgcttttaatctgactgatggctcaagataagttggagacgtacttgagatagataatttatgtatttcgctatttcgaatacctaaactcaagcggtgctaatttgctaatccaagccttatcaataataccaacacgccgtctgatccaagattagcaacctctctttctctcacagaggaacctcactgacgcattcagggctctgcagttgaagcgttcctaccatccatatatagggaatccataccgtcagcttgtcgatccgggatcgcccaggatcgggtggaaggtcagagaagccagtcttcagtggtgcttccatggcagttggatagtagatcagagaggcaggccagtagaatatggagttgtttttgttctcttgttattcttttatggctataagtctttctgtcttggattcgtaatgtttggccattaggtttgaatttccttctctttctgtcttccatttgaattctgtgacttatcctgcaatttggagagtagttgatatggtctttcttggctttggctttcaaagtccccttcttttagtattaggtagtagagggcatcgccactcagagattctacgataacccgcatattctaccttttgttccccttcctctggccccagaactctgtttgtccctagtagcactcccgtcttcttccaaggatgaagcctcaatgccattccctctttctcgggcattagattttgcttgcttgtactagaagttaacatcttcattactcgatggtgaaacctactctggtggggtccgagaacatagctagcccagaaagattgaagtgagagatttgcctggaaaagaaaggtttagtgctgcctgggttgagccattcctaacaactcatccagctcgactagcttgcattaagagtagttcatttcctataaagtgtagcgagttttctcccttttcacataaccaagaaaaaaggaaaagttaccctactacatgtattagctagttttgtctagtcaacatctaacgctcatttcactatgggatttatttactccgattgcttctactctcttacaactgggtgcgcctataaggaagacttttcatagattgactttgggcaggcaagttgaactatccggcttcactaacacaagtaagaacaagtataaaactccatattaagggttccttttgacctagtgattagcacaaaggaggagagaaaaaaggattgaataagcaagcaccagcattgactttcttgctttaactaacctgacaccaggcccttttgctctaggctctactccttgtcattgatttctagctagctttcccactcgcataaaaggaatgaatcgagggtatttacttgcatttctttgtcctacttgggctttaagaagagaggatttattagcacgacgagcaacgcatgctaacctagggattgaataggatatcataga

SEQ ID NO: 13653 - DNA, 1321 bp, Oryza sativa
gactttttagggtttttctttttataaaatcattttaactttgtttatttcttaataattattatttgtgctctgaaaattccactaaaatttgagggctccttttagaccaaggagaatttaacaaaaattctccgggccacatttgaatttttcttgtacgtattttagtgtttgtcaatttcttttcgaattttaattaattctattattccttttagcgaatgatttttaattcgggatgaatttatcaggacgtgacattaacccaacgctatacaacataccctgttgcataggcccaaccattctgaacaaccatcccggctgcacagttctatctccaaaccaggaatataccattccaaaccatcccggttggcacggttaatgtttcacagccgaaactcgtgaaccggtccttaattgtcatgagcacgaccatcaaaaccatgtgctcacaacccaccattatcaggttttagttggcaaattaattaattaaccaatcacgattgaccatcgtgagctatcattaagacatcattaaataatagtgaattataagttatcccaatagtgtgctaatgtttctaagcatggctaagcaatcatatctaatatctagctgaaccaatatataaagcccaactagtcaagttataataacccaaggtatcaaggaataaagtaatcaagaacaaaagggctataacaaacaataggttaatttcacccaatgacattcgaaaataaatgcaatagttgaatagaaacaatagctttaaacgggatcaacatgctcaaagggttgtttgggatctgtgtgacttgccttgctgtcacgcctagaaattcacgaaccagaatttctaagctgaatgtgcattaaacccctgtccaggaccagccagggtacacaaacgacaattgttgacatacagatccacgtcttacaaaaatataaaagattacaaatgcagcggaaaaagataaaagcgagctaagcctgaagacttgactcctgcagcgggcgactccattccacaggcaatccttgacggcagcgacgaaaccaacctcttcgagacatcttcaactgggaaggacttcaactctggtgtgggggaaaagagagcaagactgagtactacccactgtactcagcaagtcacaccagaagaggaggtatgatgcaagatatatccaaggggggctaaaggttcttttgcataaagccggcatttcaaagcagtagttgaaagcagtaaaacagttgtagtaattaatccatattaaccaatcactgtccaacgttaca

SEQ ID NO: 13654 - DNA, 802 bp, Oryza sativa
tatgacttgctgagtacagtgggtagtactcagtcttgctctcttttcccccacaccagagttgaagtccttcccagttgaagatgtctcgaagaggttggtttcgtcgctgccgtcaaggattgcctgtggaatggagtcgcccgctgcaggagtcaagtcttcaggcttagctcgcttttatctttttccgctgcatttgtaatcttttatatttttgtaagacgtggatctgtatgtcaacaattgtcgtttgtgtaccctggctggtcctggacaggggtttaatgcacaatcagcttagaaattctggttcgtgaatttctgggcgtgacacgccgcctcccgccggccgcgctggcttggccgccctcgggcgcgtcgagtggctgccgtgtggggcccggccgtaagccgcccgcgccctcgggtgcggctgacgcgtgggacccacggcgccggccggtgtgagccgggtgcacccggtccaccgtggaccgtgaggctgccgcgtgggccccactcccgtggacccggtccgcgcgccctctcccctcggctgacgcaataattccgattttaaattaaaatttaaatgaagaaattcgcaaatattcaattaaagagcatataaacttcaaatggccataacttggccatttgaactcggaattggaccgttcaagtctctaatttttccttaagaagtcaagaacccatttttgtgctttgtttctgcttgttatatggagtttattagagtaaaagccttttcttttctgttggtcgtgtagacgctgca

SEQ ID NO: 13655 - DNA, 8654 bp, Oryza sativa
cagcacacccatgctgcacaggcccaaccatcctgaacaaccatacccggctgtacagatctatctccaaaccaggaatgtaccattccaaaccaggagctaatcaaattattaccagttatagcatcacttattatggtgagaagtgtgagactaatcatgaaagacattgttagacccgcccataaccgcgggcacggctattcgaatagttttactctggccagaggtgtaccactgtacccacaatacacaactccacaatatgtcaccatatcatcatgtgcccatgctgaacatgtcaccatttgtgtagttgtgacaagatccctcgcataactcaacccaaagcagtgcaccgttcctggatcgtagtcaccccctcaaaaccagaggcatggactcctcagcgacctccgtgggcttatctcctccacttctcagtctggtgctccacaatgagccttgctatacaaagtgtccagccgttgcccattctggcttgtggttggcacggttaatgtttcacaaccgaaactcgtgaaccggtccttaattgtcatgagcacgaccatcaaaaccatgtgctcacaacccaccattatcaagttttagttggcacattaattaattaaccaatcacgattagccattatcatgtccatcattaagtagtagtgaagcattagttatcccaatagtgtgctaatgtttctaagcatggctaagcaattatgtctaatatctagctgaaccaatatataaagctcaactagtcaaattataataacccaaggtatcaaggaatagagtaaacaatgcaaacaggccataacaaaggaataagttcacaccacctggtgacattcgaaaataaatgcacagttgaaataaatagagaatttaaatataggaccaacatgctcaaaggaactgtgtttgggatatgtgtgacttgccttgcaataacgggtcttcaattaatcttcttgaacacttccgatgcacttacgatcattcgaaacgacggaaacgacaagctaacacgcaaaacgggaaaaaagactaataaaaaccaaataaacaatacatataaagtaaacaaacatgtaggtcataattttagatgaattatgagacttgaacggcctcattctgacttcatatgaattaattatgaattttacaagattaattccaattaaagcctattaaagaaaagactatttcaaattaattaaacaatttacaaaagatttttaactgagacaaaatattaaagcaacctccggaaatagattagattatatttggtagatgacatatattaaaaaggaataatatgccactgaaaagagagaacggatttatatcgattttggacggctgagattaatcttgaccgagagttgaccaagatcggatggcttggattgatctggcaagcgagcctcacgagataccgactcaacaagtcaattctacgtgacacgagatcacctaaatgatcaactgaaaccggcgaacggaaccggcggctctgaacggctctaaactaaagaacgactccacacggacgaacgaacaaagcatggggacacctcgttcgaacgaacgagcgaacaactcaacaacggctgcgactaaaccggtgggctagacacgattcacggtaaagccccggtacggtaaacgataggccggtaggaatttagggttgcaccttaggctttgcaagtcagctacgtggcaacggcagcgaacaaaccacaacaacgacaacgcgggatagcggcggctaggtttaagcgacgcacggctgcgacatggtatagcagcaacggcacggcacggcacaacacagcacggcgaccagtggctcggtggttgcagtagcgggacggcaacaacttggcacacacgagcagcagccaaacagcagatagcggcaagcggtaacgcacagcaggagcaacatgattgtggcagggagggcacaacggcggctaggcgactagcgcagcagcgacggcaagcaacaacggcacaaccggtagcgacggtgcacgggctagggcagcagcgcggcgaacaacaacgcaacgggcacggctgcggctgcgacgaagcggcttggcaagcgtggccgatgggttgaaatctaaaccaaggagacaaggatagacgtctcaccgatccaaaacgatcggagagggagggatgatgacaacgttccgatagcaacacacggagacgacaacgctagacaaaccacggattagattatattggattaagaccctagggaaaaacctacaccggcgaacggcatgggagcggcggttgccggcgaaccacggcacaataatgcaaacggagggcaccgggaggaagagcgtgagacgacggtccttaccaacacttacgcgacgacggacggcgacggaagatggccggcgacgagcttcgaagggcggcgaggtactgtccatggtggcgatggctttccggcgacgagagacgacaaccgaggggtggacggtcttcactgtttttggaaggggatcggtggcactgtgcacagcatgggagacagtcggttggagaagaaagatgaagtactgtagcacggggaaggcaaaacagactttcggccgggctgaaagaaaggaagggaaaaaaatgggttgaattcggcccaagactagaaagaatgattttattgcttttccaaataaattaaccaatgagatgatctttcaattgttaaaaatacttccaatgcacaaataagttcggaaattactagtgaatttctgggcgtgacaatctggtaatgcaagaactggtgctccactgagagcttgattcacagcttcaaaggcttgtttctgagcatcactcccagattacttgagttccttttcagcaatgtagtgagaggttttgtcatcacaccatatacttggatgaacttgccgtagtaaccagccaaacccaaaaaatctttgagttgcttcaagtttctaggtacctgccattattgcactactttcaccttttcaagatctattgctactccattggtgccaatgatatggtcgaagtatttcaattcctgttgggcaaaggaacacttgctttctttcacaaaaagctgatgttgttgcaatagagtgagcaccattcttaaatgttttacatggtgttaacaaccaaatttggtaatatcggcatcgggaaagaagtttagatcgaagcggagtccgaggcggagatcgagttcggaaacagagcaggaatcggctggagtccagatcggctatgattaggatcggctggatttgagtcgaactaggtaagctgatgcagccgattccgatagtgcaacttgatgtatgatatcgggttgaattgaggcgcttcaaggtgattgccgcacatggatagagtcctgagaaggcaattgtatctattaattaggatgttttatgtaatttccttagagatacgcattgggcaaaagtctgccgcaaagacttatggtatcttagagtttgttagagatggtagtcgtgtccgttatggacatatcttgtaattctcgggtataaatagacccgagccctatgtaacttttaacacacatattcaatacaatttcagcacatcgccacccttttgctttagttttgtttcgacgagttcttgctttcgagttgagctgcatcggtttcgatcttcaacaagaggtaaaacttgttatgacggcttgtattctcgggattagtgcttccatctttatgatactctaatcttgtttatgtaattcgtcgagttatcatatattttacataatctctggcaatatcgctatctgtcacgcccggaaattcactagtaatttccgaactaatttgtgcataaaatcctcatccaggaatcagccgaggtacacaaactgacaatttaatatacaaatccatcttaataataacgttacatacttacaaaagaaaagaaaacagcagcggaattaacgatctagcgatggcttcagctccactcccacaggcagctcaactggggtataagccaaacgtcttctccttctggatcctttatcttcaactgaggtttgatgattattgcaagaatgagcatatgacatactcaacaagccacacagcaaatatgcaagtgcacaaggataccaaaggatggcataatataggctcatttgcaaaagcagcatttaacaaagatttaagaatagtaaaatagtagagtaattaatcatcaattttaatcaacactgaacagcacacccatgctgctcaggcccaaccaaacctgaacaaccaaccccggtcgtacagatcaaacctccaaaccaggaattatccattcaaaaccaggagtcaaattaattaccacattattaccattaatgagtagtgtgagactaatcacgaaaaacattgctcaactcgcccataaccgcgggcacggctattcgaatagttttactctggccagaggtgtaccactgtacccacaagacacgattccacacatgttgccatgccccgaaataccaccacggcattgcaaagggggaaatcgtgacaataccctttgcacaacacaactcaaaacagtgcaccgttcctggatcataatctccccctcaaaaccagaggcaatggactccccagcgacccccacggacttctcgccgcttcacagtctggtgccccgcaatgaatcaggctatacaaaagataaagccgttgtccacgctggcttgtggttggtacggttaatgtctcacaacagtagctcgcgaaccggtccttaattgccatgagcacaaccatcaaaaccatatgctcacaacccaccttaaccaggttttaattatcaattaattaacaccacacaatttaccatcgtgtgcgaccattaaatataaccataattaataataataataatataatttatatttaacccctttagttagcttatgtttctaagcatggctaagcaaaatacatataacatttagctgaaccaatccaatatataaggttcatgctaatcaaattataacccataggaaaataaagtcatcttcggccattatttaattgggaaaggttcaccacccgatgacattcgaaaataatgcataagttgaaataaaacattagctttaaatgggttcaacatgctcaaagggttgtttgggatctgtgtgacttgccttgagcttccgcaaacacttccgaaccttcctcaacgaaaacgctctcctccagaacgtcggaaactaaagcgaaaaaacaaaattcaacaaaacagtacaaaaacaagcataaacagtacatgtggatatttttaacatgtagatcttgattttagaaaaatttagcaacttgaaccacctgaaacggatctacggttatttagttatgattttcagaagatttaatctattagaaaaacgggaaaaaggaaaaaaccgatgatgacatgatgacatcatcaatggtggccggctaggatggcaagctcgccggagattggatgatcggctgcgaatttggaggacatgtacgcgtagaggacgacgagacgaacccaccggtactcaccctcgagccaaacgacgaccgacgacgaccggcgacgaaggggcggcgacggcggttcggcttacacggggacggcgggctacggcggccggcggcttcggggaaggggcggccgagcttctcctcgctcccacgcacctaaacgcggcggcggcaagcggcgacgacgacggaggtggcggcgctacctcgccggagatggccggcggcaaccggtgagctaggcggcggtggcggcaaggctacgggacacgggagaccacgggacagggggaaaacgaaagaggaggactagggggtcctatttatagccttggattgaagagatcggactcctcccgcaagaaatcgatccgggaaatcaaaaactcggttttggagataaactcaaaaacgagttcgattcggataaaatactcaacgatttgctccgattcttggggaacagaatagaggaggataagaggaatatttcccctcaactaattttgcaaacggagctcgggatgtggcggatttaacgaggaagcggtggctgcacagggcacagcacgggcggctcggctctgtccaagcttgaagatgaacagtgccagggaggcaaactagactttcggctgggcttctacttccaaggactgattaaaggagggacacaaagcagacttcgggaaagagaggaaaagggctgcaggctgagaggagactgggccgagagtgagaggacttttcctaattcggcccgaaaaggaaaaggtgaactttaattacttttccaattaaattaatcactgaaatgatctttgaattgttaaaaatacttctaatgctcaaataatttcaagaaaaaaaacctgaaaatacttggacactcaaagtacttaaaaaaattacaatcagaccatttaatgattaatttaatatttaaataattgctgaacttctctttgtatgattaaaattaggaattgagctccgaaaaatccgagaaagttccagagagtataattaaccatggagaatttaataaaaattaaatccatccatgctttatatttaggaaattttatttcccacatttaacttcacttgtaaattaatgaacatttaatataaattctgataataatttattaaataatttataaatcctgaaacgaaaatcagggtgtgacactatctaacttacaatcggctaacatctatcgaatagagcaaccgattaggttagattttgacgttgattcagattatataagatatctaccactctatgaaacttctagcggcttgattgtctagatattgttcttcttttcatacttaatgctgcatcagttgagtttgatctattaagtcgtgtttagaatgtcaatctctagcatgccttctggttgccaattagggtagcatcggagtttcagccgatcttatctaatttaactatatttgctctatatgcttcattgacatgttaaatctgccctttatgtcaaggtattgctgtatctaagtatattaggccttatgtttgatatattatacctgttttaatatcctgatatagagtagtatcggagtattagccgatacatgctagatctatctgatcggctatgctataaacatatatagtcctattattaatatatattttgatctaagtgatttatactgtctcgacatgacgaccgatctatcccaatcacttgattcaagtatatatcgatataagaactatatattggaaatatctatagccgatcgaatagatttagttctttattgtctatttacaactgccgatcgattcacatatgacatcggctcaaagataaatgatatgtcatcggcatctagccgatcggctatcatttatagatttaactgcggtttctttgcttttatttcttgttgattacaggatcaaatcaactggcacgctagcacacccgaatgcgagctttggacctgcactggaattaagcagatctcccaggcctcgtgttttctgtcaacacatggtcatccagggtcttgttgtatgttaatatatcatccacaaatacaagcacaaactttttgacagtattcatgaggccttgaaaggtggctggtgcattggtgagcccgaagggtatcaccctgaactcatacaaactttggtgggttctgcaagctctcttgtgttcatcatgctcattaattagccttatctgatggtacccagaccgcagatcttgtttagtgagcgaatttgcttcagctagttcatccaacaattcatctaccacatgtatgggatacttatttttcacagtgatgtcattgagcccctgtaatctacacagaatctccaagaccatccttctttttaaccaagagtacaggtgatgcaaaaggacttgtactagtgtatataattctctatttcagcattttgcaccacttgctgttctatctcatcctttcggcgtggggaatatctgtatgtcttcttagtgactgtcttagcaaaaggaagtagaggtatgtgaaggtcaaattgccaatttggaggtaactctgtacgttcctggaatctgtcttgaaactcccttatcacttgttccactgattatattaaatcagaaattcagatttgctttcttttaggctacataaataaaatgtgaacgtttcatgttcccaggaataacggataaaaccaatctttcaactttaaccgcatccttgagtagcaaaaatgttgtatcctctatttttgtgcaaataagctttctatgccagaagtaaaataagaatggtttgttataataagggagattgaaccaaaagaggcaaagaattagaaccagtgcacgctcttgcctagcacccgtctcgccagcaggggcggagctagaataaaatgaagggggttccacttgcttgctttactctggtttgaatcaaatttagcttgggtgcctaagtttaaactgatgggggtat

SEQ ID NO: 13656 - DNA, 1109 bp, Oryza sativa
tgggaccaactttttatcttatttgccacttcagaaaacctcattgtcacagtcttagtcaaaatcttcaaaattacattttgcaaacaaataggtctatactgcttgattttatttgcatcttttattttgggaagcaaagttatcaccccatagttaatcctatcaatatctagctcccctttatgcaaatcatcatcatttctttgatcagacccccaaaatggctccacagatgtttgtaaaaaccaactggaaagccatcaggcccgggtgcagtgtttgctttcatacttttgatcaccttctccacctcctccatagagaaaggtctgaccattcttaccttatcctcttcacttaacctaagcctatctccccaagcatccccttttagatgaatgttgcagttgtcctccttaccaaaaagcttcttatagtacccatatatatgctgattgatttgttccttatctgtgatcacctcccctcattttgtagagagaaaattaaactcttccttttcctaccattagcagacctgtgaaaaaggaggtgtttgcatctcccctaagcagccaagtctctccacatattttctgccaccaaatctcttcatgagagtaaatatcctctaattctctttctaattcatacctttctgcccactcatgctcaaaaaggtccctttcatctgctcttttgtcgattgcttccaattgcctttctaaagctttttttcttcttttttgttcactgttcaaattagcaccccaaccccttaaccaccttctcagaataggcattaagacatgccaataatccaacacccttttctgtaatcttgttggcataactttaattaaatgatatgaaagtttggatgctggaaccaccccatctcaaacctgaaaacatcactccttgtcttttcctcatccctagtgtcaactagtggatatcgcgttttgaaagcgtgatatcgaggttcgcaacgggtcaggcaataccgccacgttaccgccaataccaattcgtgagcgagagtgtgacgtcagctatggatttcctgctagtcttgagcaatgaaagagcaaagacatttgagc

SEQ ID NO: 13657 - DNA, 813 bp, Oryza sativa
aacttcttttccttcgtgcttattattcgcttgatattcgtggggtatccagatggtacctttatactctccaagcattcaaacatactttccttctctgccttgctaagagtgtagctggctggactcaagtaatggcttcctttctcctttggttccaggtgaaggtcgccgcgttgttccatatgcttcagatcattacgtgcttccagtgtatctttcgactttccgtgtacacctaggaagccaagaaggtttacgcaaaggttcttagtgaggtgcatcacgtcgattgcgtggcgtacgtccaagaattcccaatagggtaactcccaaaatatagagttctttttccacatcgccgcgtgaccatcttcgctctctatagactggcttccaggcccctttccgaacactacttttagatctttaaccatagcaaacactgttttcccgttgcgatgtttaggcttcgtacggtggtcagccttatgttcgaagtgcttgcctttcttccgtaccgggtggtttgctgcaaggaatcgacgatgacccatgtatacaaccttcctacagtgcttaagatacgtactttctgtttcatccatacagtgagtgcaagccttgtaccccttgttggactgtccggataggttgctaagtgcaggccaatcgttgattggtacgaacagcagtgctcgtatgttaaactactcctgtttgtcctcgtggcacacggggacaccttacttcttccacaacatcttaagatctttgaccagtggtcataagtatacatcgatgtcgttacca

SEQ ID NO: 13658 - DNA, 1302 bp, Oryza sativa
ggtatgtatgcacatgtgctctcctcttcctccctatgtttttttctcgatctatttctgtcggggggtttgatttagttagggatggcgctccatcgtacctgcttgctagttgctatcgtgttggaaggtgaggtgatgttatcgtgttggtcatcgtcagcgctgcgcctccccaagtttttaatttaggttcccttttgaagaggtgttgaggatcattacatctaaacataccattagtataattacatcgcaacccagtagtattagaaagggtatgtataacccacataatttttgcaactacaagatgtttcttaagagtgatcaatgagcaacattagttttttacaacatacacctttgtcatctcgcagatcggtgggctgctgtccagcaatgatgtcgatggcctccaccaccgccagccccttttgcccttcacccatgcccagaggacgcaaatgcacagttcgagttcaaggtatccgtctactcaatctatgcagtactctgtaatctgatcgatttctgatttcttttgcttaatttgggggtacacagctggagctgccggagcggatgcatctgataagtcgctcgagattatgcgcaaattctctgagcagtacgcccgccgctccaacaccttcttctgttccgagaagtccgtcaccgccgttgttatcaaggtaatggaaccaaatctattttctacttctctcttgaatcctcgttaaactttacttttaaaaaaatctcactgcgtgcacatacaaatcaaatactagcaaaaatcatcttagccacaaacaaattcttctatgctgctatttcatgtgttctgtacctgcagcttgataagaagattattacgccctattgctgctgttgaaagttgatgcagtaggcttcaatcttaggtagaagagaacctgccagtatgcccctgattttccattggttagcaaggccttccatacacctcattggttcaacacgctaagttaacacacagttttaagtatcctaggttgcattgatgtagaaggtgagtgctgcgtactgcctgagattttcagagcacaaaaggaactttgaatgcaacatgtatttctttcccagtgctgtttgggatatgaaacaactagagcagaaacagtgaagcatgccagctgaatgctgattactgaactaaaatgtatatgaagagtgtattcacagcaatctcttcatgaaaaaaaatagaaaacccaagtccaacataataaaaggcatatatttgagccccatcctcta

SEQ ID NO: 13659 - DNA, 8753 bp, Oryza sativa
cctccccccccccccccccgccacgctcgctcctagctgctgcaatatttgagaggagaagatgagagcaagtgaagaagaggataagggagagggggaaagaggtggaatggtaggaggaaattaaaaagataaggagcaagtgtttgcgatagtggaggagaggataagtgcgagggattatatatactacatgttaaattttagtcccgattggtagtaaagattatttagatctttagtccaggttataagatcctcagccccctgacaggccactgacaggccttatcagggatgaaccgggactaaagttccaatcgggactatagatcacatagttccgatggaatttttaagcgggactaaaaatgcttttttattaatctagtttttgactgacccagcaaaggtcagttctccagttgtggtataagtcaacagttaattaattgttcaatactacttactccgtttcaggttataagacgttttgactttggtcaaagtcaaactactttaagtttgatcaagtttgtagaaaaaaatattagcatttttaacccaagacaaatttattatgaaaatatattcaataattgattgggtaaaactaatttagtattataaatattactatatttgcctataaactcatctgtgacgggctccaactccaacccgtaaaaggtgactcggtcccttttgacggggtactttagagcctagcacggatgactaattggtgatatagtcctcttgcaactcaataacaatgttgcttatagttggccaaaagcccgaggcctgatagcccggcccggccatggcacggggttttggtccggcccaagcacggcacgacctctactttggcacgatggcccgacccggcatggccaggtccaactatcagggatttaatagatgagggagccaaaatagacttaatccaaccatataaggcacggcgaaagagatgagggagacaaaatgaacttttcaaaggaggaacacggtaggcttcgtggcttcgagttggtccggcatgacccgagtcttattgggtcgtgcttgggccaaacgcgcagcaagtggatgggcacagcacgatccggcgtgtaggtcgggccgtgtcggcccgactgatatcggcccgagcccggtcatgctcgggccatgctagggcgggtgatccttttggggtgtgtttggttgggtggatgagcctggatgggagatgcatggccgcccgattttttttggtgtttggttggagggcagggtggatggggcggcccagaatagggaatcttccctcaataggttggataagtgcatctggccgatttggttggatgaagccatctagttttggtccgggtgatgtgacctattctgattggctatggttggtttgattttctgttaagcaagctctaaatgattttttttctcctaaactgtttatctaatttatggtttgattacaccattatatttgttacaattaaatctttaaaacaagatctcggatgattatattatgataaaaatatatatatatgacaaatgggtcccactatcttatggtttctcccattcatgctatatcccctaaccaaacaagaaattggatcaacatatccatataaaccaaacaaaaaattgaatcgccatatccaacaaaatatggatggccatatcccatccatgcatgaccgtgaaccaaacacacccttggccatctataatgctgctcaaccgtgacggggttatatatgttgtaatccggcaccaaagaggttttaccttaaaaatgtaactgctaacaaaatgacagaaatagagatatacattcctagaatccccatacatttcacaatcacataaattccaaacctcgattatttacaagtctcaataattggatgcctcacatatttcttcaacaaaactttaagttgcaagcctgaagaatttagggaactggacatgcatcttgaaaagagagctatcacacgacctgtgaatttatatacaatttgataaaaataatagaattagtaacgcaaatgttaccaacagcccaccatatatagatggttgtcatcggtcataggtttgatcacacagcccatcacagatgattgccactgtacgggctgcaggtctccgtcgctgattggctgattaggatgctagggttttgaagtagtaaggctaccagtgctacttccaaagtgccgaagagagtttctctaatagtgaaattctcctaatgactcattttgtttttgtgctccaaatttcatgcagtaccacatggggttttcatccaggggaaaagagatcgatacatttctatgcacataaggttactcgccgtgcacaccaactaacatatatacaagaaattacagaataattgatacatgtacatataatactattgcacctatatgttaatatgtaaagtctcaacagtataacatgaaaaatctgataattttctcagagttttgtcttctatgtctctgtgttcgctgaatctaaagtggagacgttacacttggatatgttgttctattataagtacatgtacaattttttaaggcatgttggtgagatttcttaacacggagcttttgtgtacatccgtttcatctagtctagttgtttgttggaaatctggtcttcatgtatctgagtatctctggggttttgatatcagtaaattctcaacttgtaacctagctgaacaaatcgagtagtattttttattcattggcgagttattccatcatatatattgtgatatctcacattgattgtaatacttttacgcaggtatacgttcaaacaagatcatcttactcactgggacatagacaacatcagtgttcctttcgttcttcactgggatatcaaggatggacctgcatgccgaccagagacaaattatgatagtcccttcggcgcatgtcatagcaaccacagcaaatgcgccaatgtcaccagtggtttggatggctatttttgcaactgctccgagggatacattggcaatccgtacataccagatggatgcaaaggtttgtatcccagcgctctactctccatccgcatgcttatgttttttttagataatggattaaaaacccgacctctacatccaaaaggatgtacacagcccaacatgtccatacatgagtacttagactccagccattacatgggacaaaaaaaagtttagaagacacgaaaagaagacagaattacaagttcaacaaacaaaacgaaatgactagaccaacaacctcaacgaccaaactcaaagaaccggtctaaacttcaactctctttctgaaattccagccacacctagacaaaaactccaaaactctcatctctaaagccttgcagcattctttaaccacgttgccatcctcttccttaagcagcaaagaccaaagtctcacccaattaatgcattcccctgaaaattacctacataaaagagtacgggtatgatccattaaaaaccacatcattcctactcaatcacaccacccagcacaatgctgaaatgcccacaaacacttgatttttaagcctaggattaacactggttagccaaataccaagtaaatgtgacactgtgtggaggctgatgccaaacgtgaaataaaccacgttgcacacgtacctaaccaatggacaataaaaaaaaggtgttgtattgtctcgttagaattacaaaagcaacatctaaggctacctttccaccttcttttagcaagattgtccttagttaaggtgactcctttctaaagtaccacaagaaaattttaatcttaagtggaagccttagcttccaaataaaagacttcgcatttcgaaacatgattttttttacatcgaattgacagaaaatattccatgcttatgttattagtcgatattgtcggaaatctataaacacccacatcccataggtaagtacgtacatatcccctgtaggataataaccttacacctatctagatcacagctgtcagtggaaaagtttgtacaaggatcggagctctcaagcttgttagactaattcttgctgattgtagaaagaccaactctcactgacgtgcttcggcttgcttttatacccaccaagcaccagcactctctctttctgtccacaaggagacatataatattgtatataatcattagcacaattagctctttgaagccgcgcgcaaccagtttgtagaaaaccaaacccagattcactactggatttggataattggccggaaggcaaaaatcacattagtcccggttcaaataggaatcccggttcaaaagcccaacagtactttttgatctttagtctcggttggtaagatcatttttagcccccgttgagaaagtgttaggcccctcactatctttagtcctggttgggttaccaaccgggattatagatcgacgcgtgcgtatataatctactcgtacttagcaacgcgcggtgcacttcgttgctctcgtctctcaatctcttcgaatcctcccctctccctctctctctctctctctctccctctctcagctctctgtctcgctccctctccctccaccgcaccacccgatgagagcggtgggagcggaggagatggcggcggctcagcagctcggaggtggcggcggcgccctggtggcggcccgatggctcggaggtggcggcggtggctccctccgcctgttcgaactcctcctcctccctttcctcatcctcttcctccgtctatcctcctcctctccgggagcatcgggcggcaacggcagagccctcccttctgtcggatccggtgtcccctcccccggatccagcgggaggggaggcggcaggcggcgcatgaggggcatgcggcggtgcacgagggggaggaggcgagcggcaggcgggcgcaatgatgctcattcttttttttttttgagaattttgtgatgtccattcgagtatgaattctatttgtgatattaactgtgaaatcgtgatgtgaaacatagtatgttcattcgatctgtgatgttaaattgatgtggggatttggggatttatatatggagcactcgctttggaaaaatcaatatgcaagtagcaaaaaccaataaaaagaagcaacccgaaactaaagggttgcaaaccaggactaaagagggtatcctcagcagttatttactcgccgctatacgcacccaaatccatgcatgtgaacacgagaattttgcttacagcgtactccctccgtccaaaaaaaaaatccaatcctataaatgtttttgaacattcacgttatccatatacatcctcaggattgttttttttccagagcagtatccctttgcgttaatataataggatagtgtaattgaatctggagttaatgtgatggatgtgtgatgtggcactgactcagcaaacaagtaaaggtaaaaattaaagttggcgacgaggaagactacattaattggagattcgtgtagcggtggctcgaggtggaagatgtgagtgaaaggattcagggcatatttggtagagctccaagcctccaactcttaaatttagcttcaggagttgggtctggagtggagttgtggagcagcctaaacccatctccacctctaaagttcattatgtgagagcgcttcacccagctctgctcccactttaggtggaactgaaactgtttggctgagctctagctctaggagtggtggaggtggagctatagctggagctatgccaaacaagctctcaattatgcagcgatagcgatgttgacaaacagtggattgttcctatgacaaataggatagatgcaattttggtttccagcgataaaatgggccacatgtatactccctccttcccataaaaaaccaacttaatactggatgtgacacatcctagttctacgaacctagatatacctttgtccagattcgacgtactagaatatgtcacatccaattctatattcgtttttttggttggatggagcgagtatatatctagctagccaataggctacggtcatctaggccaccgagccaggtcaggctcagcttgcttcattaaggagatacagagccaggccatatttccaacggtaatagaacatcccccaagaagatgagttcataagtcaatgtacatgaatgaatatattcacagtcaaatttagcatttggaaaaatttaggcgaagccttgggagggatccgagagagccttctcgctaaagctagtaagaacccttgtcgatctgaccggaatcctttgtcatgagtagaggtcatggatcggttttgtcatcagaatccaatccaaatccaatttggctcttcttgtgttcccttttttaggtgttagggtttttggagtactaattttctctaaagcctaattaaaccttgatacgcaagaccagccatactataaatatagatgtcaagcctattgtaggaaccaacaattaatcgacaaaatcgatttagtatctaacctctatcttctaccctacctatatcattcttcacttattccatccctattttccctccaatcccataattgctcacgtattttgtctcccctgcattagaggacatcctaactggcttttcaagcctagatcaaactggcccacactcattttgcgagttgcgttcctccattgacaatgaacatctacagtaccaccctttcgttgacttatttccgtgttcactactcttgaacccttcctctcgtatcgagaagcactgcatacagggaattttctatggcatatttcttgtactacgatatcaacgcggtcatggcgattcataactacgagtcatagatgacccctcattcttaacaggtgctacatcttagacgagccactctgtgacccgtaagagatgtaattatctgagacgagcatttttcacctatcatagattaatatgcccctgtttagcatcccaagtttaggctgtgcaagttttaacacagggccagagatatttaactacctatattttctccttcatgagcgtgtaagtaaaactaagaatagctttatttatttttatatttaacatctactgttttctccacttttcagatgttaatgagtgtgaaaacaattctatttgtggtgctgggtccacatgcaagaatacagaaggtagctatcgttgtgactgcaatttcggccaaagacgtgacaatagttctgataacatgggtaattgtgaacccatattttccagagctgccatagcagtcataggtgaggttcaatacatgaatgcaatgttgattgaaatttgcagcatgccatacattccacatataatatataatgctctaattacatgcagttctgcattccatgtatacaccatatttgcattgcactacattcaacttgaagctcaacattgaagtgtgaaaacataattatttccagatagaccatggctgtgcctaaatgttatcttttcgcatgagcatagaccatgtggttgtgcctaaattatcttttcacgtgagcaatatatatggactacgcaattgcatgaatatgtataagttacctttgcagtattgcatgttctatatattaactattttgtttcctatttgtccacagcaacagtttttatcatcgcacttctagtcgtgttactaatgttcattctattggagcgtaagaaaagaaagctgagagcttatttcaaccgaaatggtggacaattgctgaaaagtatcaagatagatatttacacaaaggagaaacttgaccaaattactaaaaattacagtactattattggaaagggtgggtttggtaaggtgtacatgggaaccatcaatggaaatgtgcgagttgcggtcaaacgctgcataacagtcagtgaggcccggcagcgggactttgcaaatgaaatcacaatccagtctcagattagtcataaaatttagttaaacttttgggttgttgcttggagacagatgttcctatgttagtctatgaattcatacccagagggagtctctgtgacgtacttcatggtaaagagtataataagaaacatcctctctcactactagcacggttggatattgctattaactctgcagatgctcttgcttatatgcattcatatgctagtcaaaaaattcttcatggagatgtgaaatctggtaacattcttttggatgataactttgtgccaaaagtttctgactttgggacatctaggctcatgactattggaaaagaccacaccacttttgttgtcggagatatgagctatatagaccctgtatacatgaaaattggccttctcacagagaaaagtgatgtttatagctttggtattgtccttttggagctcatgacgggaaagaaggcaaggtacaatgggaataatagcctccccatgaactttatggaggcttacatgacagagagtagagcatacgagatgtatgataaggagattataactactgaagaggacataaaatgcactgcaaatgttggtaccatcgctgttaattgccttaaaaatagtgtggatgagaggatgaccgaggttgtgaaggatcttcaaattgtgccaagtgaatggttgcaaatccttgggcatagggagcatgactcaactgaacctatgggtatttaatta

SEQ ID NO: 13660 - DNA, 1698 bp, Oryza sativa
ctgcagccctggtgatatttgttctttgatgtgtatggtgtgtacacaggaaggcttatatgtataggatacgttcttatacatctatgtgtatttcttcggaaagaattattacacatcaagcattagttatggttttccacgtgacctagcatcctattcgtgtccaagttgaaaggagcatatttatcattgagatgcccatgggctcaccagcaagcattgaattccaatgtattctgaatgaaacaactcacacagctcatcctccttgtcttggtgtcatggtgacatatatacattgtgctacacaactaagtaatataagctggtagtttaagctggccatacatgcatccatcatccatggctgggatatcgcagctcctcctgcgcgagtccaccatcaccatcaccatcaccaccaccactaatattcccggtgccggcgtcgaattgcccagacaagtgcggcaacgtatccatcccctacccgttcggcatcggcagaggctgctacctcgacctgccgggctccggcagcttcagcatcacctgcaaccacaagacggaccctccccaaccctacaccgccgatgccctcttggtcctgaacataacgctggagacagcggaaatgttcgtcgtctcggctggcgccctcgccgtggtcaagtacccatcagtaagagcaagaagtgccatcacgagcaaatttatcactactactcaacaagaagaagaacattctatgcaagtaaaagtaactgtaggaatgcctgtcacccaacaagtaaacatgacattcttaccaagcggatacaccttgagcgcaccgtaccggctttccccgacgggcaacatgttcacggccgtggggtgcgtcaccatggcgaagttgtacggcagcgtagagaacagcagcagcagcagcagcacgggggcgacgacgacgacagcagcagcagcaggagggcaaatgataggggagagggcgtatgcgtacgacgcgggctgcatcacctactgcccgagcctgagcgacgccgcggcggatggggcgccgtgcaaggacctcggctgctgcgagtcgcccatcacgccaggcctcacccagttcgccgtaggatgggggcgatggccaggtgcatccgacgacgactacggcgagttggaccccgaacagtactaccagtatgcctttgtggcccaggactggtaactagctaattccggacctgatgatgattctttgttatactatatctttgcaagtttttagatgttttcccatttctaattaataacttgacgttgcctagctacccaccatatattatgggttttaattggtgtttcccatatatatatctctagtaaagaaaatttcagcacaaggaatatatatagcacccatatatataatactaaaagaattggcacacgtatgaatttttaaaattgtttcaacagtaatgtagttcaaagactgttcatttcaagtcatctatagcatcaaaatacattacgttttttggaaaggacttagaagaattgcatgtatagtgtacactgctggagaatgcatatatactcccggttcacatccctctttaatcccgggtatgcaaccggaactacgaatcgggtgaaataaccggactaaagatatatcttctttagtcccggttggtgtag

SEQ ID NO: 13661 - DNA, 3850 bp, Oryza sativa
gccgccgccacgtgcaagtgcctcgacggcttcgagccagcgagcggcggggagtggagcgccggcaggttctcgggggtttgccggcggaaggaggcgccgccccggcgccgacggggatggtttcttggtgctgctgcggatgaaggtgccggacaagttctcgacgctcgccgggaacatgacgttcgacgagtgcgcggcgaggtgcgccatgaactgctcgtgcgaggcgtacgcccaccgcccacgccgacctgagcagcagcagtgcccggggggatttcacaagcatatgcaggttgtttcatttgctgttggtttaaaaatgacctgaaaactgtcaaagagaccaaaaaaaaaaatcaaaccagtttcgtattgcatttgttcataatacattgccatgcggagtgcgagcgccgcggcaaggaggatgcgaacggaggaggcgggtcacgcagagtgcaagcgcggcggcgaggaggatgcgaacggaggaggcagcggcgaggaggtgagcgcggcggcgaaggaggcgagcggaggaggcgagcgcggcctcgcagggcgggcgggggaggacggcgcgcgggggcggttggtgggcggcggtgcgagacgaggaggccgacgacgcggtcgagctcgtcgatggtcgtggcgacgacgatgttcccctccactccgcccccctctctctctgccctgagctcaccggtgtccgtgccgacgacgatgttcccctccactccgccctctctctctctgccctgagctcgccggtgccgcatccatctgcttccacctccgcgcccgtcgctggtacgtcgccacccccgccgacccgcacgagggggctgggaggccggcaagctcgcgccgccctgagcccgcgcgccccgggagccgccgttcttgggtcgcccctgcgccgcccagtgaggtagtgactccgtgagagagaaagtgagtgaagagagagaagtgactttgagagagagagagagtgagtgaagagagagaaagagaggaagaggggaaggggaggtatgacacatgggtcccactatttttttaaaaaaaaattgctgactggattgccacgtgtacgccacgtaggacaaaaccgctctgaattgggtcgaggggggtaattcgtccggtattgaaagttcagggtgagtaatgtccggttttagggttcaggggggtaattcggacgaccgtgatagttcaggggggcaattcgtactttttccattatttttagcctttagatgattaatctacagttcaaactatctccctacttttcttcttccataaagtcataccagcattttttttacgtttgaatcacaattctacatactatttaaatttaaattatcataaaccacattaatttacttaatctgatgttatctatctatcttacacgttattttttattgttatcatactaaattcccgcagcaatgcgcggggttttacctagttatataaagtttactctactaaagaattagtagtgccaaaatttacttacagtttagtactaccattgaattgatagagtagagaatcaaatagatcctaaatttgtgtacatgcatgtgccatggctctgaacaattcaatccgtctaatgcagggtttgcttcgttcatcggaaaggagcaggcggtggccaagtacagcagctcactgaagagcgtcatgtgcataaccagccaccggccattcctgtctgcgtgctgtccactgcttccgtgcgagcacagacgacaggttggggcatggccacacggggcactactccaccggctggaggctggagctgcctcccccgccgtccgctgctacagccagctcggctcattaaggctcggctcgtttgagctcgttgtcttaacgaaccagcttggttcggctcgttaatgttaacgagctaaaagactagctcggctcggctcgcgagcaggcttgttaacgagctatatcttattaatatcatattaataatttcaaatttaaaattttattatgtataaacatagtaatcaacactaactaatatagtactcactaaatatgaatagttttgatgtaattaaaagactaagcactagtcaataaacactaagttcatgaagatatggcgatattttatactaacgagctaagcgagcagcttgcgagctagctcattaagctcacgagctaaaaggctacctcgtctcgactcattaagactacgagttcgaatcgatccgagctgagcttgctacgagccgatccgagccacgagtttcgagctttttgtccacccctagctacaagtcatgccccaactcgcctccgtctctagcccattcctacaagtccaattaattgttcaaatgtgaacttttggataatgcaataaaatcccggcatttgctcaaagagctacagccaattattataccaattcaaacaaaaaaaagcataacaaaaaggtcgtaaaactaaaatgatagaaacacatgcaaagtactaaaaaccaacacaagaaattaccaaaaaaaattgaattctatttgtgtatctccacctgaagttggtaaaaaattgcataaccgttaactcaacattacgacatgcagctttaattaacttgatatcttcttcacacttttacagttatgcccaggaccagagccagtgtattgacctaaaaagaacctgcatataagatatagatggtgatttgtcaaaaaccatatcatttctattcaaccatagagcccaacatatagcagaagctcctagcaaaataagtttattagattttttatcaatccccataagccaattcccaaaggtatgagatatactatgtggaatatttaaaccagaagaaaactgtaattctctctaaagaaattttgcataatgacagtccataaataaatgatggatagtctcatttttcatgcaaaacaaacatttcaaactagcatgccaattcttcctagtcaagttatcctttgttcagacaaaccctttaccacataaaaatcttacttaaaaggcattttgagtttacaagtaaacttattcctttcaacgtaaccattattaagtacatagaatgaaccgagaagattccatctaaaaatatcattctactctgtcaaatgaagatgcacaattgaagcatacaaattatgcgaattagtcaggttctgcgctactaaagctctcctaaaagaaacattgaaagaaacggaatgcataacatttgcaaccaagaagtttctccttctttctatagcatataaagatgggtacctatctttaaaggaatagttaccaacccatttatcctcccaaaatataacttgttcaccattattcacaatccagaaacccatatttaggaacgtattcttaactttcataaaacccgcccaaaaatgggaattcccttgtttcctattaacctgggttagagatttattattaaaatatttcctttttaacagatcttgccaaacactttgctcattaattaacttaaatagccacttactcaaaagacattgattttgaatttgtaaattaggaactccaagaccaccttgatttttggacaaatcatatcccatcttgtaagtctatacttcttcttctgttcatcaccgcttgccaaaaaaaaaggtgatatataataatcattttttttagaacctcttttgaaatctaaaataagatatcataaacattgtcaaacttgagagcacaacattaatcaaaactaatctccccctacagatatatgttcagatgtgaatagcaagct

SEQ ID NO: 13662 - DNA, 8708 bp, Oryza sativa
ttaaaaatagcatacttatttttacctgaaatgtcgttcctcaccgaagtcctttgttgagccttcaaagcaacaggtactccgtctcttgcaattcttgagctttgtcttgtagccaccactttctctttctgcttccttttcttcttcttccccgatgagataaagccatcactagtcagctcttgccccttcacttctccagtgatcatctctagaactctgatatcatcctccatccgatccttagtgaaatctcattttcctcctcggcagccttgttttcttgttgtataacaggagtgaccccccctatattgttaccatcttctcctaattcttctaaaacatttgctccacttactcattaattccctggacctccttcccttgtgagcataaaaccacttcttctgcctcatctgaaatatctgggatatactcaggtatatccactttctccccttcccccaaagagtcttcctcttcttccaccatctcattgttcttgtgtctcttgtgcccatgatctccttcccttttttgggtgtccttcttctcttcttcttctttttttgattcccctttgtcagcctcatggctgtcctgagagtcttcctcatcatctcctctcctccctcttgatctgtatgcaggtttgggatcatcaggatcatcttggtgatgttgtcttactccttcaggattccaagtaatcctatacccaactctgtttagaaagatctcagacgtcccccctatcttcaaaggatccctgcaaaggacttttactctcacagcttctctgttcaagctaattgagtctacctccatgggatctccaatcaagtgggcaattttttcaataactttttcagatctagccaatggtgggactcctgtagctctgacccaaacctcctgaagctcggcaaaggcctcaatggttctctcagtctccctaacattagctctagcattggataattcaaagtcaaagcccttgagtcttgttaactccctcctagcatctttggatggaaattccaccaaatatttcttctgctccacctgtttaaccttccaatcccactgcttatgtttctcatacaggtatttcatctccataacaatcttcgagatcgaagtcagcccactttcgatggttagaattcctgtaactggacgcttctccacctcatcttcctggacgacaatatgcaaacaatgaaaaacttgaccagggtactgcggctgattttagcttatcaagttgaagcacaaaacaccaatatcatgcacgcatatattctctagtagaacttccgagcccttttccgagccgtttaggaagtaatcagatatagaaaaattaaactgaatagttattttgtactaccattagacagtatagatcaacacagtcatggattttggggaaacagatatttgagtcagaagattttaactatttgagtcatggattttaactatccatagtgcttctagcgctgcaattcaagttcacagtgtaaatcgaggatctaaatcaattaaacagcaaaagcaacctgaagaaaggagctagctactgctgaagcagcaatagaagttgagcactagaagatgttgaaaggctctgaaactcacatggttaaagcagcaaccggccaagaaggatgggccaaacatgtgtgtggatcacgtagcttgtaaatctgccgatcctcccgcttcaccgtgatgaccaaatcggtgtcagcagaatcatccgcctccacctccgcctccgcctgagagtaagtgcgatgaacaatacgtgctactatgtcctgcttggccggggaagcagtggatcgaaagtcgaaggaggagaagctgcccttccccatggtgcagagaaggtgccccggaacaatgcgcttggattccacctgcaactcaacgatggacagctccttcttgcctgtgcctgaacctgcaattcctggagggaagaccatgacctccatgtagtacactgaagccgcgccgccctttgccatggagcaggaaacgaagcggtggtcgccaagaggcacggcctgaccggtgaaaggcaggttcgtgtcgagcaccatctcccactgctcggcgttcatgtcgaaggcgcaggtgcccttgtcctggccctgctgctgcaccgacaccgagagcaggatgtgggagccgacgatggcgtaggccgcgacgcgcaccgccggcggatcgcggtactccagcgggttgagacggcacgggaagatgggcggcggcggcagctcgcgccatccgaagtagccgaggctgtcgaggacgaggaaccatggctcgaagtcccgcccgttcacgacggaggggcagcaggagacggcgtagagcttgccgccgtgcgagacgaggacggggttcaccttagggaacacgagccggcagccggcgcgcaccgtggaggtcttggggtcgtacacggtggtctgatccagcccgatgcccacgatccgcgtccccaccgccgcgaacgacatgccgcggccgctggtggagtggagcaaaaggcggacggtggcgccggcggcgacctcgattaccgagtgggtgggctcctcctccactccgtgcgccaacaccatgtacaccgctggctcctttgcggcagaaccctcggctggggcctccttccccttccccttcctcttcttgttccccgagcgaacgcggacaagccgagctaccggtgccggtgctggcgccggcgccgctgccgcaattttcttcctcttcttgtccggcatcatcatcttccctcgattggaatcagattcgcctcccttctcgaaaacgagtgggtaaacgaggttagctacgatcaaacaaattattattattaggtggaaagttcattgaggtgtcttaacttgtgaagggattcgattttcatccttcaaccagaaaactttaacttgtgaacggattcgattcatcattcaactagaaaactaatacaacgggtccctaaactgtcaaaaccaatagatcccatggcggtttggacgattgttttgggtgtcgtggcgcctacgtagatattttgactcggtcttcatctgatgtggtatatgaagcaaaatttcatatttttaaataaaacaaaatatatgggcccacatgtatgtggccccacttcctccacctcatcccctctcttctctatctcctgcccttctccttctccttctctatcgcagcctggtcaggcagggaggaaagggcggctccggcggctgtgggcggaggaggagggggtggcaagaggtggccctagctacggcggccggaggaaaggagctagtgtcgatggcggcgttcgacctcagcgagctcgagagggtaggagcggccgagagccaccgttgcattcctcaccccgccggtcatccgtcacgtttgccacgccggtccttgtgggtcggggcaaggggtggtgcaagcgcgggcgaggatgcgtcggtgagtgcggggagcgaggacgaggagtatgggggcggcaccaagggcgcggaggatggcgaggaggggcttgggctaggggaggcgggcctggtggaggaaggaggacgaggaggaggaggccggcgactgtcggggttctttagaaaatcgacgacctcttgcagctcgagtttggcctggtcggcgccgaggacgtcgacgaaggttacacaattctcgggcacctgctcgaacttgctcttggagcggtcgaagtccaagcgccaaccgaggctaccagggctggtgtcaggatcaccctgggcgcggcggaagatgaagaagaggctagcgaaggcaaggaaggggaagaggaggttgcctacgaaggcgaggaattcgcccaggccggcggcgtcaccctcgacgacggagatgtcgacgtcgttggtggcgaggatgtcaatgaggtcaggggcgttggggatgacaacgatggtgtaacgaccgtcgatggcagtaagctacagtactcaggtggtgtcgatgtcgacgtcgatggcagtgtccattatccacacgcgcctttgcacgctgccgcaactgggcccacaacagcctcgcgcgcgtgatttttcactgccgcatgtccgattaagactgcatcgccctctccctcgatttaaaaattgaagatgtttttgtaaaaactatggtatgtcatcagtatccgattcatgtcacgcgtaacattcattacaaagtcacgactcacgagcaaactatgaaagagagtctgtgtgatatggataccaagcgaatgaaactcgcagagtccgtgtggatatcacgtacatcattgcccagatcatccgattctgttcgtactacacgccatgattcctggaacatgttagcataatttcaagtcttttaagtcagtctccacgcatgcttgtacgtactagtagggatactgttacaataatccataaagcataatttcaagtcagtctccacgcatgctcgtacgtactagtagggttacttttacaataatccataaagaatcagtttactttcgaaaagaatatgccaaccaaaataaaggatgatcgaagttaatgattttgtccgtcatccattcctgcccgacttgagataaagctggacgacaaatcgagctcgttttttaagccctcattatttggcttatgcttattcctataagtcaaattttaaattttagaatttaattttgaatttgactttttggttatttatcgtactttattttacagcattttcttttgagtcgctgagaacgtgtatataaaagatttgcacacaaataatcatttatttggcaataatcgatatgtataagcacatgaataaacgaatcaatggcctgtgattatttatccacagacacatatgcacaaattaaattggctctacccattgcaatgcacgggcatcttttctagtgaggtatgacaaaagaaggataccaaattaattcttacggaaaatacaaaagaaaatctataatgtattttcaaataatatgttataataattaagcatgttttagagatacaaagcaattttagattctcaataattcttaagataacaatagatctagtaaaaatatgttctcaaaaacaaaacataggaagcattgttccttaaaatgaagatgtagtagtcaaacattcaaaaaatttatcttctgccggattttatttacacagaaagagctccaaccaattttaaacgattgtattactgtgaatacatgctaataagatgcagcacatacatgatatcaaataaaaaaaaatcctcatctcttggttctgcatgctgcagctatctcaacaggaagcactagcttctgtagttctgtgggtcacaagaataaatcatgattcccaataggctggcgaacaaaaaagaggaccagcaatcttgttttagtcttaatacatctctcatcttgtttgttcttccttctgctgagccatcccaactcccagtcccactgcacccacgagctacaaaaccaggacaaagaaaaggatatcagtaaactctcaagtgagaaaccaaccaccaaaaacaacagtcaatggaagatatagaaaacaaacaaaattgtattttctcataacaaacgtggtacaacattcgctacctaatggtaagaagtaacgcatctagtgtgttaaatcaacaaatcactactgtatgatcatacccaggtgtagggccacctatatctgtccgcaccccaaccgctgccaccacactgcactgtagctgcctctaccactgccgtgtacgctagcacacttggggcttattcggtttggaggaatttgacccataggaataggaaaaatgaagtattatgaatgtttgcacatatcaatccatagaaattttctaagaggtttgagtggatgaaaaaattcatatgttttctctatagaacttatagtaagggaaattttcctttggttttcctatacttcaatcctagaaaccaaatgacactcatagaaattaatccttagaaatccaattcctttgtttttcctccaaaacaaacaaactgatcttaccaaaaacggcccggccttctaccgcagcaactacctccgctacaccactgcagctcgctcctttccagttgcttgaggaagaaagaaagaagggttagcggtcgccgtcatcacagccgcagtttccaccccagcggtctgcttagatgatggtgagggagggagatggaagaaggttgcggcgccggcaaaatgagtcatcaccggtggggcagttattttttagagttgtgattgtaaatttgtctaaaatacatgttttgatttttagataatgggcaacactcggcctctgtattcttagatgaatgcacacggccaaaatacaagttctgatagtcttggtttcttggtaagtctatattcaaaagaacacaaacgtacatccggtcatgagaacgaaccttctcaatatcctctatgggacaatggcccttttcttcttatccttgttcttcttctgcccttccaccatttttgcctaggtgcaatagatgtgttaagaggcgcgcgtggcaacactaaacaaagcgtggagacttggacacaagctagctagtaccttctgccgatgcacactgccgttgagctggttggggtcaggaacacccttcaccggaggagcccctctacctgcgccatgatcagccacggcttctcctccatacctcaccaccaccccctcgtactccaccacgaagtcgtcgttctcgtagacacgcacgttctccaggaacagcctgtactcctcttcgatgtcagcgttggcgtcgtacacggcgggcaccgtggacgaggcctccttctcctcttcccccacctgcgccttcttcttcttgcatcctgctgccccgccgccccaggaggaggaggcggaggcgctccgcggtcgacggcggatgccgcggcgtcccttgacgctggtcctccccgcggagcctatctcgccggcggcttcgggaacctggtggttcggcttcggcatcgctggggatagtggggaattcgttcgatcgagaaccaaggtgaaaacgaagcgggttgtgtttggcggtgcggggcgaagagaggcgacgaaattttgggtgatgcgcctgtgaccgtgcgagatggccctagctagctgtcggaaaactgggccaccgtaagttgggccgagatgagcattatcttttttgggcggaataagttcatctgaggtcccttaacttgtcaacgaatccgattttcgtcctccaaccggaaaactagatacaacggatccctcaactatcaaaaccggtgcagattaggtccctcgacggttttaagggtggttttggctgacgtggtgcttacgtggctaatttgactcggtctttatctgacgtggcaatgacatggcgcttacgtggcaattcgatcttaaaaaaataataaaccccgtgggacccacatgtcagtttcacacaaattaataaaaaatggtggggcccacgtggccccacatgtcattctcacccctattcttcttcctcctctcttcatctctctctcctctctccagacacgatcgagagttagcggtgcgcggcggccggcgggagaggagggagcggcgcgcagccgcggaggcacatctcccgcagctgtgggcggaagaggaaggggcggcgggaggtggcgggaagcggcgggaggcggctttgtcctaactcctgaagaactaagcagcagcaaaggacacgacgtgtcagagatccatgcgagcgaggaggagaggagagggaggggagaaggtgtgcgtgcttacgtcactgtcgagggctacggcggcggtggcgcggtgccccggtggcccggtcggacggctcgatggcaagcagcgtgtcgaggaggtcgagcgccggcggcgagaagtccctgaacgtctcggcgatcttccgccggtacggccactgcggcttgaacagcgtcacgtccggcagcttcgccttcacccaatactatttcgacggcgacctgcacagcttgaagatcttgtgcagctgctcgatctgtgtcgatcagcaatggcaaatcagatgccgatccatttcatccacgcatagatgatatcatgacatatagatggagagttgaggttataatatttatttatttaccttggtttggctgggcaagaatgcaagatgggcttgccggcgagaagctcggcgaggatgcaggcatgcagccggtgctgcagaggtcgacggcgacgccgtactcggtggcgccgaggaggagctccggtgggcggtaccagagcgtgacgacgcggctggtgagcggctgcggccttgcggcgtcgaagaaggtggcgaggccgaagtcggcgatcttgagcatgcccgtcgccgtcggtgagcaggttggcgcccttgatgtcccgatgcagcacgtcccgttcatggcagctgcggagcccgacgaggatctgcgccatgaagcacttgacctgcggctccgtgaagtgcagcaccggcgtggcggcgaggtcgtggtccatgtactcgaagacgaggtagaagggtgagattgaca

SEQ ID NO: 13663 - DNA, 934 bp, Oryza sativa
cccccaccattttttattaatttgtgcgaaactgatgcccatacctaatttagtaccattctggaacttccttcgctataaaaagtatattggtagcaaactaaacataaatcctatcttactgtaaagttatcccttactaactccttaagcttgacatgtaaagatgccacatcattatccactaacaagatgccacatcatcatccactaacaatcatcacatttaaacatcatgtaaacatgctatatctttatagtttttataatttaaaagctttttaaatataaacatgttaaattatcattcaacataattcacataatgttttaatgtatatctttattatgttttaagatatcctatatacttatatagttcatcctcacttagttagtacttaaatgattaatctatggttcaaattatatttctcctttttgctctaattaagtcatatcacatcaattatttttggaaaaagtacgaattacccccccgaactatcacggtcgtccgaattacccccctgaacccgaaaaccggacattcttcacccccaactatgcaaaccggacgaattacccccctcgacccaatctgcggttgttttagtctacgtggcgtacacgtgtcagtccagtcagcattctatttattaaaaaattatgggaccacttgtcatactctcatccactcttcctctccctctctcactctctctctctctcttctctctctcactcttcctctctctctcacaaacggcaggccgcaggcgggggacagagcatcggcggcggcggccgcgacggcaagtgggggacagagcggcggcggcggcgcgtcgccaacgcggtacgtgatgaccaacttcggcaacttccagctcctggcctgggacaagagctcgttggagtggatcaccttcag

SEQ ID NO: 13664 - DNA, 8903 bp, Oryza sativa
aggtggaaaggtggtgttaaggatctggatgcagtgtagtttataatactgaagttaagtaagcaagtgctgattttttttattggtcaatctgcatgtaggctatttgagccgtggcattatggatcccttaaggactcttgcagtaaggttccatttcaatctagaatttgttaacagaggtagaaagaagcagtactatgatgggagggaagcaatgcctcgtaaacagatagaggcaaacccaaataagtgcaaggaagggagcgcaagttgggaaaatgggcaacatgctttgcacatcaagtatctagacatacgttggataaatatcagtttttttttttagagtttgtgttgaatatatgtacggtattcgccttgacatgtaaagaagtggagaggatgactctatagcattgaaatacaagaaccaagcctactagaaggaggatgaatggtagggaaaaactaatctttttcgtggaattgaaaggaaccctcaaacctgatggattgcgccagtcagaccgcttagtagtcgtcggtcagatcgccactttgtaactggtcaaattgccttgaagccttcggtaagattgcctccttcctgcctacctgctgcctgcttgcctccacccgtttgaccacctacttgctatcggttggatagctcaccggttagaccatgcgcctaatgccggtctaaccatcagaatctaaaaaattgatgaaactcttgaaagtagattaactttgttcaatgtgtttacaaagtgcatccagagcactcctctatcaactcatgaaatcgaatcgaagtttcgaagcaaaccctaacttttctcccccagaaaatcgatgttctttgagtctatacccctcatctatttatacctaaaacatggatgcatacagtagcaaatccaactataactagaaatcctgatcacataggaagtaacccttatcacataggaaaccctcaaacaaggaaaacaacatccctttacaactccgaagtccaatcttcccacacttcattctaaatttgattccgcttcccatatgcacacaatcccattggatgatgtatggaaaccttcacctatacgtgcattgttctttagccttagaatcccgtatgatctccttgaccatctaaaccacaacttcacccaagcctagtcccgatccatcatcggcaattctcccgaggccgcgagcaacacctacacatgaacaatcaaagaaaccatatccgagtacaagttcgcagcaacttggctgacgtcagcacacaaaaagtatcatgcacatacttgtagaaaccatctagaagtcatacatatgaagcaataacaaacatccacggaaacaacccaaaatcgagtccctcctagaatctgtcggtttgatcatcgcgttacccaatcagaccacagttgcccgaccggtctgaccgcctaagcaccatcgttctaaccgaccttaccgtgctcctctgactgccagcaccccgacacttcaccacgaaaacacaatttgacatatatcaacacattcacttatttatcacctttgataatagttcatcactaagactaaatcaacaccttgattttatagattccagctcggagtcatgcctaggaatatgtacacgcggagaggacgagtggtaagccttgtcgaatatagaaggggagaagagaaggactcagggacgattcggactctagaccccaaatacaatcagcaagagggatttctatgggattgcaatcaaatcaaataatccaaagcaatgaagaaatcagccctgattttttgggtcacgacgatttggggcaacgaacttcgagtggcaggagcacactgcttagtgcggaaggagcgcaagtgcctgtggagttttgtgggacacctgaagcatctaggcccccattgttaattttagtaattaatgacaaatgctaattgtggactaactgttctattgagctatatattttaagttaggttcacattatgtgtgcgcatggacgattaccgatggattaaaattgacggcgcaaagcaaaaggaagagaagacggtaaactagtgcctttttttaaaattgatcgaggcattgggcgatcaaaattgtgctagtttatttatagctttgccgtactattaagaggggtaatgacctagcaaagagatgattttaattgccacttaggtcatttgcatattcacttgtgctcacatttgtattaatacttttcacacacacatgcattcattgtgttcggcctgaccagagcaggtctgaccgtgcgtctgccgccagtcagaccaccggtccctggccggtctggccggcctaacagtggcagtttggccggtgctaaaggttggtctgaccgacggcttcggggtggtctgaccggccggccatatggccgggatggagtgctcggggttggccgatgcagagccgacggagctgtattcggtcagaccgagctgagggcggtctgaccgagccgaggccggtctgaccggccactcaacgtcaatctgaccggccaggccgatggggccctctgacagggctacaacggctagttttctagccgttgcaaagtagcacggtctgaccggccacttacctccggtcggaccggcggcacatagagttgggggatttcgcccctaacggctagttttggttggtgggagtataaatactcccccaccagcagtaaggggactctcttggcacccacttcaattgcatacaccccttgcacctctctcacacacatttgagcttagtgttcatccattgtagtggttgagggttgatttagccaagagtcaagtgcattgcttccattgtagagctagtgtggcacttgatcatctccgagccgcgtcatcgcttgttactcttggagattgccgtctcctagacggcttgtggaggagttgcccggtgacctctccaagaagattgtggaggaggcccagcgccagttgtgagtggtttggagttcaccaccttcggagtgaaggaagaactaccccaagcgattgaggcttgggtagtcctctccgtgggccggctcacgccttgcccaccccttgacgaagggggcgtgcggtggcttcgtggttgagcggtggaagtggactcgcctcaacggggagtaggaaacctgcgagtttccgaacctcggtgaataatctcttttctccttatctcatttatttgtcgcatttacatttgtgcaatttacattcctagagatatacttgagatcatatcaccctaggattgctaaacattgacataggagtgtgatttactttcctagagatatatttgagccagtatcaccctaggtttgtaaaacataacttagttgttttgaaaattaacaatttacacagggaattgaagtgaagcattttaagaactatcaattaatggcagtgaagaaacaagcattagcattgtttagatgatttcatctagcatgcaacatgaaaaaggcacattcgacttagaaatgtcgagcgtaaatgcaggcacccattacatacaatgagttgccaccttcctgttaaacaaggctccagcctctgttcaaaggaccacagctcttgcaggttaatctttgtttgttagttgctgtattctcaatgaatccacatttctgtacaaagtaaagcactctgatagtatgatcaaatcaatttgttctgtaaacttttgtggatattatatgtagcagttggatttataggctggggcagcatgggcatagaacatggtgtgcaagagtggactatgctaacctatcttttctcttaacagagggatcgatactgatcatataatcattccagcaatcagcaacaccaactaactacaagaaacaatacttccaacactaatttctacaacagtatttccaaaagaatccagattcgtcgtatggtcaattttaagggtgcttacagaaggaagatacctcatacagaagctctagcatatactcatatctgagcaggcagccatagaggttcaactagaaagagaggaaaatttgaagggagcatatcttcatttgtacttacagatgctaaagccaaagaaatgccaggctttgctcaaacacagaaacatgatactgcacagttaatttacaattcttctatcactcaaaatatttagcttagctagtattttttttttttagagagaaggctcatgcccagcttttactaaaagcatacgagttcagtacagaaacaaaataaactgctggggaagccagcgaactagagaggcacaaagcaacttgcagacctactgctgctggcacagcactaacaagccagaacaaaaaagacagacagactagctcttgattgactcattttccggacagcaacagtagtcaatccagaaattcagaagtccccaccctggagacagccctctccacaacacacaggagccaaatgcaaagcaattacagtgaaaagaactctgctcggccagacgctcgatcctttggcgccagcttggaagtcatgcctttcctcccctcgcacctcttggattctggcatacagcaagagccttgtagcctccacatcttcctccatcttcgccggtactagagtcctccatgttagatggatctccctccccttgagtccaacggctcaagggggccttgacccgcgccctgatcgggggcgcccagcccaatcgctggtgggcccccgtcacactgtgccatataaagaggggtggaggacgggacgggacaatgacacaaggaacgaggttcgtcgccgccgccgccactccaccccataaaccctaaccgatcgagggggcgcagccagtgacgggaagtccaccgccgcgccacgcctcgtcgtcgacaccgtcgctgctgcaaccgcatcaccgccatcggaaccgagcacatcgtcgccgccgtccacgtcaagcccgcgacgacaacgacgatggccggccggacttcctcttcctcaacaacgactggtcacaaccctaaatcctctcactccctctttgtgcattcatctattgttgttcatccattgcaaatagaaccacccgactagatctaaacctaggtgatccaatagactaccctaacaatggtatcagagcaaccctagtgtttagattggttcgggaaagaaatccaaagagaaaagcaaacgatccaacggatcaaaaagatcgaaaccctaaccctaatcttacctcgtcgccggccgtcgatgacgccggccacggagggggggaggggcaaagaggcaccgccgaggagccactcgacggccgcgcgcgcacccgcgagtgcacgcgcgcgccggcgagggggcccgcggcggcgccgccatctccttcggccgccaccctctttctctcacttcgcggtgggggctagagacggtggggggagaagagaagagaaaagaaaagaaggcgccgccgtgtttccccatccaccgccgtcgccggccatcgccggccgtcgccgaagccggggggagacgagagggcgcctaccacaccgttgcaaggccgctcgacggcggcgcgctctgcctagggtgagcacgcgcgccagcgaggggccccgcgacggcgccgccacctcctccagccgccgccgatggtgctccggccgccgccgatggcgccgccgctccggtgtagagagaggagggagagaggagaagtgaaatgtacggctagggttcggccggtcgggaggaagggtttttgtttccccgaactcggcggctgaccgtccgatcctaaccctagcaaatggatggccggatggtgacggtcggctggtggccgcgggccggacgggccaggccggccaaaagtccactttaggtctctcggccgaaagaaagaaggaaaagaagaaaaagaagtttaataaaagtccctcggccgaaggaagcattttcaatatgtttaattattgtgattatttctaagcaatttgaaccaacgtgaaaattgtttagagaatagataaatgtgagaaatgcttctgaacatgtattttgtatattttcatgcaaattacaatagaattttaaattgtttttacatgttttacctctgtttaaatttgaaccaacgggagaattttacagagagtaaataacagagttttgttattgtttatacgaattgtatatagatcttccgctgcaaatagatgaaattgatgaaaattagtgtttctaaaattaaatttcgaaccaacgggagattttaattttaggaacataatatgtgctatgatgttgtaatttttctgaccaacgttgataattgcaatgttatagttatggctttatgtgttatgtctattttcggcccaacggtgatgtagacttaatacataataattttaatgttaattttgttctcacaatacatgattatctcaggtggctactccttgatgggttacattaaagatattccgaccctgaaaggagataactacgaagaatggaaaagagaactcgaccttgcttttatcttgggagaggtggactgggtgttgactaccccatgtcctatagaacctgctgaaattttcagaggtgaaaaagagtcagatgctgaatggcaaaagagagagagggacaatgcttccctcatcatgtcgtatgacattgagcatgcgaaatggtcttcagccaacaagaattgtttggctgcggtaaagaacacgattgagccaacaatattgggctcaatcccagagtatgacactgtctctaagtacctcgaaagtataaagagccagtttactggttcttcaaagttttatgcgacacagctgataaagcagcttgttacagagaggtaccatggaggtggtgtaaaagaccacattcttaggatgagcaacatggcttccaaattgaagcaaaaagatttgggcatctcagatgactttctggtccatctggttttgtcctcattgccaaagaactttgacaaccttgttgtcaattacaaaataagtacagagaattggaatattgaagagctcatctctaattgtgtgcaagaggaggaaagacacaaagagaccaatggtgactccattaaccttgtcaaagataacaaggaaaagagccacaggtcaccctcctcaaaagaaaaacagcctcagcatctgcctcagaaataacagtttacagttgagacaagatcagtgtctacactgcaagaagacaagacattccaagaaagatcatcctaacttcctgacagtgatcatggcaaagaaaggtgagaacattattacatttgtaaagaatctcattatgattggttattctagatccacatggtggatttattctggagcaactattcatgtgtgtaattgtttaaaggattccgttcaatgaggactacgcaaagaagtgaaagatccattagagttgccaatggagttgaagcaaaagttgaagctgttggagatcttcgcctagaactcacgaatggcttcacacttttacttccagatgtttttatgtccattctttgcaaagaaacttgataataagtgtatccaaattggattctgatagatatgaaatggcaaatgtgaactatggtataataatgaatgtattggtcttgtgttgcaagatcagctttatttgttatctctttctgagaatgtgaatgttgtgtcctcgttgacaaaagaaaagaaagcgaacttctgatgtctcatcgaaattatggcactgttgtttatgccatatttcgagggggagaattgagagactggttaagaatgtagttcttcctccattggagttctcaattttagaacgatgcatacaatgtatagaatgcatcggtgcccaaaacaccgtatgagctatggatcctccgtgtgtgggggagtcctgcaaaggataaagtatttaacccaaaacagtaagctgccattttattggctattctgaaagatcaaagggtcatcgtttctactgtccaaacagttatacaaagtttgtagaaacgagacacgtcgtcttcttggaagacgaaatgattagggggagcttggtagttcgagaaattgatcttgagaggcgggtgtctgtacccgctccgtcgactcaggaacctttcttctctctacctgctgatgttgtgcttgcaatgcatgacgttgcggtaccaacacatgttgttatctctcctgtggcaaaaatgaatgaaagtgaggaacctgttctacaggattcaacagaaattattgccacatcagaggaggagctgcaacagcctcaaacagataatgtgtcagaataggaggcccctagaaggcctgaaagagtagcatatggaggatgatcccacctcatatgcaaaggccatggaagccatgaaagatgaaatgaaatcaatgaaattaaatgatgtctgggatttagaagaaattcctaaaggagccaaaacagtaggctataaatgggtctacaaaaccaaatatgactccagagggaatatagaaaagtttaaagtgcgacttgtggcaaaagttttcacgcaaagagaaggcattgattacaatgagacttttctccagtctcttgtaaagattcctttatgattataatggcactagtggcacattatgatttggaattacatcagatggatgtaaaaacggaatttctaaatgatgatttgaagaaaaaagtatacatggcacaaccgaaaggtttcgtcatgaaaggaaacgaaaatatgggatgtcgtataaagagatccatttatggattaaagc

SEQ ID NO: 13665 - DNA, 566 bp, Oryza sativa
tcctgcagccctcgttgaatcgggtcaattgctaggatgaagaggtagggcgagaggggatcaccctgccaaaggcctcacctgtgtgtagttggttctcccactatcccattgagtaagattctagatgatgcagtcgataggagaagcacaatccaatttctccagcgctgactaaagcctctccactgcagcatttcgacaaggtattcccaagatatcgaatcaaatgcctttgttatatccaacttgaagaagagggatggtttccgttgcatgtgcaaggaccggatcatgttgcgcacatagaggaagtaaatcttgtatgcatctcttcttgatgaaagcactttgggcatgcgagaccaaatcaccaagccatgctgccagtctcattgccaaagttttggatataagcttcgccacagagtggatcagactaatgggtctgaaatcattcaccgagcgtggcgagtctttcttcggcaacagtgttatcatggccctgtttatgcttccaaagttcccccctgtgaggttgtgaaagcttgcaaaaacatccacaa

SEQ ID NO: 13666 - DNA, 8023 bp, Oryza sativa
acactctcccccacttttccccaaaaatcggcgccggtttgaccctccacgagcaccacgtcggctccggccattgcgccgattccaccttccggccacgatctccctccccgcgcccatataaaccctccccgggctcccttcccccgtttccccctctccccgaagcgccccatgcccggaaccccctcctccccgtgaaacctatgcgccgccgctcgccggcgatctccagccacacgccacggccgctcccgccaccgccgcactgcgtcgccaccaccgcccaccttgccgcacgatgccgcgccccggcctccccttcgagccctcaatccattgccggaaccccctccccccaacatcaccctaccggccgccccgttcatcgccttcagccggccaccacctccgccctagcggccgctgcgctgcgccgccgccgccgtcggcatcgccatgccgagctccaccccggcaaccgctcctcttccttcaaccaccaccgaaaaactagccccaccgcacacccgaggccgccgtcgcttttgctgcctccggccgcctactgccgccatccctgtccaccgcaagctacgccactgcctccaccacgttcgccacgtcccaatgcacctcggctgccactccaagccgccgaaatcccgccgaagctcggtatctctcggtcgccggtgagctccaccattcctctcctctccggcgtggtattctcaccgctccggtcgcctatgttcctccctaacccttctatcttcttccccagggaatcccggctgccgtccgccgcttcgtgctcgcgggtcgccatcggacctccgccaccgcccttcccgagggagcgcctccactgcccgttgcccctcgccgccccggcgcatggtgagcactcccctccatctcccctttctcctcttcggcggccacctcccatgctcgccgccgtgccgtgtcatgtcgccggtggccgcgcccggccgtgagccgtcgccgcccctctgccaccgtgtgtagccgcctgtggaccaccgtggtccgggtccacggtgccgtcccggtgcgcgcgtggacttggtccaccgtgcgcctgcctcccatgagtcaccgatgggtggggccctcttgtcggcgccacccttcctctcggctgacgccataaatggttaataattgcgtcataaatcgataattaattctagaaattcattaaaatggctcaaaacttataaaattcatatataattcatccgaactccaaattgagccattcaacttgcaaaattcatctaaaattgagctctacatgtttgtttactttttatgtactgtttccttggtttttattagagtttttcctcattttgcgtgccagcgtgtagattccgctgtttcggaagtccgcggtcacgaggaaaagagttcagaagattgttttgaagaagcaaggcaagtcacacattcccccttgagcatgttgatcctaatttataaatgttttaccgtttgcaaataaatatgcatgttttgctaattacatgggatcagggtttacctatctgctcgcttgtgccatgtttacttgatatcggtcctttgtcaaccttgggtgataaatcgactagctcgtgctacttatgtgacctagctagaactatatgcttagccatgcttaattaccactagctcagttgataggataattacagttttagacatctagtatcttgacgagctgcgtgctcgagacatctggccatggttcatggttgtaattatcaaactaaaatgcgactgaatggtgggctgtgggtgcatggttttgcgagtcgcacccatggcaattaaggaccggttcacgggaaaccctggaagactaacagtgcttaccataagcgggagtgggtaactgcttgatctgaagtatagctcgaccctttcctaggcaccggtggcgagggtggacgtgatggagttgggtcggctggggtgtccggttgtccagctgccggattcaccgcgccgcaagaggggaccgcccactgccttttgaggggtgggggtgaaaccttagcgtggtgtggatggttaggggagggttatgcgaagggtctcgtcacaatcactcgacatggtgacgtgtgcatcatgggcacatgatgacgcggtgacatgtcggtgggttgtgtcttgtgggtacagttgtgcacctctggccagagtaaaactattcgaatagccatgcctgcggttatgggcgatcaaccagattcaccgtgattagtctcacacttaataaatcgacccaatgcactgtagttcaggtgggttggttgggcctgttcaacgtggtgtagcgttgatcagtggagatttaatattaccttaattactcaactgttttactgttttgcttaataagatgttttacaactgcctttatgcaaatagccacaaaccgtccttgtatccccttgcacgtctgcatcatcggtgtggcttgctgagtacggtggttgtactcagccttgctattattccccttttcagaagtgtagtgcttctgagctgaagacgaagttagaggaccaaggctcagaccccagttgagttttgcctgtggagtggagctgaagccccgctaggatcgcctttttccgctgctgtcgttctctttcggtgtgaggactaagtgcctcttatataagtattttacgctttatttacgtttggaactgtatattacttgtcgttttgtgtaccctggctggtcctggacagggatttaatacacaaaatagtctgaaaatttagggctaaatttctgggcgtgacaatggtggagttgcgcggcgacgacagcagcggcgaccggcgcggatcttgggtttcgggattgggagttgcagcggcgggtcggcggctccctggtggagcagcggtggcttagcggatcccgatgcaatggcgtgtcagcggaggaggagctctgtcgaggagaagcgatggcctcctactcgcccctctatctcctctaatcatctcttgattccgatttgtatttgtatttgtatttgtattttatttggattgagatttttgttttttgtttggacttggatttgtgatgagatgatgtgggattgtgaagatgttgcggacgaacgaaaatcgttgtacgggtggaaaattggtgtgacaaaaggaaaaatacaaatatttatattagttaatatatgaaatacatagtttatatacttaccttttgtccaaaaatcttggtatacatctcaataccttgaatcactagtgggcctgcccctgccgctcgccgcatgcttgctacctcctcgacctcgagtcctcgtagcttacggagctggtggtcgggcgacattggggacttgggtcctggccggaggcgcgtgcggcggaaagccgtcgacgtcgacgcggcgtgcggtgcggctgcgttgggggcggctgtgcgggtgttgctgcggcgttgggggcccgggtggcatgaggagttgggagagaatgggagggagtcaatatgtgacttttgggttgaagttggccacatgggccagatttagacaagggaatcagggttttttttcctaggacgattggcttttttttttctgttcgtggtttaaatacgagaaagctaattggcggcgtgcattctaagcccataaggcgcatgcaactggtgcgtggctgattcgtccgtacttttttttccaagaaaaagctaatgtccacgcgttttttcatttctttttgccattttttcttggtttttttattttagaagttgaatctttcatcagttgaaagtttttaagatttgagttgaaagtttttaagatttgaagttgaattttttagatgaaagtttttaaatctggattgaaagttttgaattttgagatgaaagttttcaaatccgagttaaaagttttcaaatctttagttgaaagtttttaatcttgagatgaaagttttcaaatccgagttgaaagttttcagtcttgagttgaaagttttcaaatcttgacttgaatttttttcaaatctggatttgaaagttttaaaatctgagttgaatttttttaaaaattcaaattgaaagtattcaaatcttgacttgaaaattttcaagtatgagttaaatttttttaaaaaaatcttaacttgatagtattcaaatttgaacttgaaaatttttaaatatggacttaaagttttcaaatcctaaataaatgtgatttgaaagtttgtttcagtgaactgaaagaaaaagaaaaaacacgcacataaggaacttttattaaaaaataaagcgaaacaaagagaggtggatctaagcgctaagcgctattagcgtggaaaaatgcgcgccgtctccattcctggcgtgcacgcgcggattaggatcccgcgtataaatattaccgttttgttttcattttttcatgttcactagttagtgaagtcgcgcgttctcgcgaccatgagctgccacctctttttttactataacggccattggtgttaagtttactgataacatctaattaattaaatgaaccggatttttttttctctaatctgatcaacaccctcaaaattatgttgtaattgaaatgaaataattgtaggttgtctaatatctaaaaatactactccgtacgtatttaatgttgcaagatagcggtgcagatcctccccgccataagcaaactcgctgatgtagaagcagaggatagcaagaacagctcgcttagctcctctgtctgcattggttagtgttgatcagaattcaagatcgacgcagcaagtatctgaaactatcccctctctttactggatttcagaatggaggttgtaaatccatgcaaagtgtaaatgttattcaggaaaggtaaacagcagcaagcatgcatttgttaaaatataactgataatttcaacactaacaaatttagcgtaccaccaatttccagattagctgtactgtagaagtaatatgagagaataaatattacaaactttttacttgttttagtgcacctatcaacctctgatatctttaaacaattactatgtgagaggataaaaaaacattatgtcagaagtttcaaaagtttatctttgtcatattttactataggtaaagctagcagatctgtcttctactaaaactgcacgtagtatcagcatgtaaattattatttgaaggagatggattgggtgctcgacgggagggcgaggctgctgcagcctcgctgccccggagcctaggtgaggccgagcagagaagaggggagactagagataggtttaacttctttcttgattaattccaaatgactgtggtgcctctccttatatagagccggctcttaacaaacatcctaacaatcttatctaataaagcataacaaacctcctaacaaccttatctaataatgaggggctgcataacatcttcatccctccttcgagacagctcgtcctcgagctgcggtagaagccatgcctggaggttgaagggtgtcggttaaccacgtcatcctagtcccctttccctcctccttcgaaagcagctcgccctcgagctacaagctagtctgcacacgatgattgttttggcatctagactcatcccatattattaagccttttacatctgggctccgaacattatttggaaagaaaaataaatctaaaattatgttggtggtccctgccattcttccgcagccaagctcaggtgggccccacccggaagcacatagaggaaggacaccagaaccatgcagagaggaaggcgccaccagaagccacatcgcacgcgccgcacatgccgcgatcgccgcccgaaagtgcggcttgcgtggcccgcctagatcccacgccggtggcgccgcactcgattctccccgccgttgagcagcgcgtagcgtaatcgctgtcgatgctcgaggaagctgcttgaagatgcctcgctgccgtcgtggtcgtagaagggaacggtcatgacgcgacaagatagtctcccttggctgcgacggggttgatggtgccccaggaagtgccggcccaactgttgttaggcagggcagcactgccgcagccttggatgcaaacgacatctgagaagatggtgcagcaacaaggggctgcagcacctccgccgggtggggcaatggcagtggagaggacgccgtcatcaccgtttcctctactgtagccgcgaacagggacgatggcagagaaggtggcgccgtagcgagtggctgctgcacctccgccttcggcagcgtcggcattggagagggtgttgtcggcgtagtttccaccgccgccctcttggcctcaaaacccgcgcggagcgctagcaccaactctgtcaccttgtcgtgcccagccgcaatttctgtgatggaggtctgcatggccatggaggttcggcgcagtgtgtggagggcatggatggcagccatggtagatggtaaatgatgtggcttagtgggtggcaggatcgtggtcgtctgataccagatgttatgtgggtagatggattgggtgctcgatgggagggcgaggctgctgctgtcttgccgccccggagcccaaattcttcatatatgttcttgtcagtcaggatgttagatttgatatttttgagaaggccagatggatcaagtagagctcattttttttcttgtactaaatagattgaggtgacatggatattagctttaatcttagagctttttgaatgcttaggacatccataattaattatagtattatatttctaaaagttaaagtttgggtctacacacaaatttagcacctatagacgaaataggggaaaattgccaaagtttggaaagttacgggtttccttcacagggccggtcagaccacaggtgtgtgggcggtctgaccggcttgtagggccggtctgaccgcaggtatgtgggcggtcagaccggcagggtccgagtccgagtctgttttcgtcaggtctcgggtttccttgctcgggaaggtatgtttcgtgttttctttagtttctattccgagttggacgtggagaagggtttgtagagggcaagaccaacccctatttaagggacaaggccgattcattgaaaaacccccgaatacactctacttgaatcgttcttttactatgttttctattttagcctagttttagtccatctttgtcggtttgcaccgtaaaccgtccgccgccgctgcgagagtgcgacacctctttgtaggtttatcctgaaaaccttccgttttgcccacgagacgggtagttatcctcatatcgatctaaatcggcctagaggctgattttgatctctaaatcggctttgctagccggtttagcttttctttttgcaaaacccatcttgatttggccctttggctagatcgaggtggttggcgactccacatcaccgcaaggcgtttaggtgttgtgatcgtgcttgtcgacttgtcaaaaaagttgccaacacgatttttggcgactccgctggggaacgatctaatcggccatatcacggccgaatttcgtttaatctagtagttaccgtttcatcaaatccaagtttcggctaaacggccgaaattaatctagtatcgccggattaatctaatcggcggcgaggttatttggtcgtcactgaatccatctgaacacttgccgtgtgtattgaagatcatcatcagggagcagcagccgactcagcaacctcctttccttttgtttcacacggcaacagaggaaaagatcaggctactagagccgatctgctgagagacaagcagcaggagcattgtttccttttattactgtatacgtgcatagatcaaaaagatcaggctataagccgatctactactgttcacattaaaaaaaaaaagaaagacaaaaaccgattcaatttgtatcggttacactgtg

SEQ ID NO: 13667 - DNA, 3357 bp, Oryza sativa
gccccccccccgaacgcgcccttcccccgccggcggcgccactcctcctcatcggggtgccgccgccgccccggcagctctctccacatggatccgacggcggggaaggtggtggaggcgtccgccggcggtagcgaccctctcccgcaaggatcgggtggcggggagggtggttgtaacgccccgattttcgttcgggattaaaaatcattaaataatgcattttctagaaattaaataaaagttaaatcaatttaatcaagtgaaataacgggagaattaaaattttcccttataaatcattggccgggaatattttgtaatattctttgtgacctaaaatactctccagatttttccgcgaattttcggaactcaagaaataattttagaagtcacaaagttcatttaatcaattaaataaattgaaaaccaaagttaaatctccccttcctccttgggccattttcggcccaagatattttccccctccttggcccgctcgcccctctctccttccctcctccctctcgggccgacccctcccttctcggcccgatcgactttccctcgcgcaaagttgtcacgcccggaatttctatccaaaattccaaacgcttacatgtgtgttaaaccctcgtccaggaatcagccaaggcacacaataacaaattgataatagagtacaaataaataactatttaatattcgcaaataataaattattacagaggtggatagttcctctcaaagaatacattctacgcagcggaaaataaaataaactaaagcaaactacggaacagctatggcaactccactccacaggcatctcaacccggaacaagcctaatcctccagatcatcaccttcactgaagtactcctcctctgatgaatgaatattgcaagaatgagcatatgacatactcaacaagccacacagcaaatatgcaagtgcacaggataacaaaggatggcataaaatagctcatttgcataaacagcatttaataaatatttaagagaatagtaaaacagttgaataattaatcagtattaaataaacaccatataacacacccgtgttgcataggcccaacctcatctgaacaaccaaccccggttgtacaaatcaaacctccataccaggaatataccattccaaaccaggagccacattaattaacacaattaccattaatgaatagtgtgagactaatcacgaaaaatattgttcaactcacccataaccgcgggcacggctattcgaatagttttactctgatcagaggtgtaccactgtacccacaagacacaatcccacaacatgtcaccatgcgcctcagtaccaccacggtaccttagaaaggaactgtgacaatacccctcgcacaacacaactcaccacagtgcaccgttcctgatcataatctccccctcaaaaccagaggcaatggactccccagcgacccccacggacttctcgccgcttcacagtctggcacactataatgaatcatgctatacaaaagataaagccgttgcccatgctggcttatggttggcacggtaaatgtttcacaacagtagctcgcgaactagtccttaattgtcatgagcacaaccatcaaaaccacatgctcacaacccacctttaaccaggttttaattatcaattaattaacatcacacgattaaccatcgtgagctaccattaattataaccataattaataataataatataatataatatatctttaatcccctttagttagctaatatttctaagcatggttaagcaaatcgtacatatagcatttggctgaaccaatccaatatataaggttcatgctaatcaaattatagcccttaggaaaattaagtcatcttcggccattaataattcgggaaaaggttcaccacccaatgacatttgaaaataatgcataagttgaaataaaacaatagctttaaacgagttcaacatgctcaaagggttgtttgggatctgtgtgacttgccttgggcttccacaaaaacctctgaaccttcctcaactgaaacgctctcctccggaacatcagaaactaaagcaaacaaacaaaaatcaacaaaacagtacaaaaacaagcataaacagtacatgtggatatttttaacatgtagatctcgattttagaaaaatttagcaacttgaaccacttgaatcggagctatggttaattagttatgattttccgaagttttaatatatttaatctattaaaaaaaactgaaaaagaggggattatgacgtcatgatgacgtcatcgacggcagccacggcacgggcaacgacctcgccggcgctagggtggtcggccggggttttggaggacacctacacgtacaggacgacgacgcgaacccaatggtgcttaccgaagcgacaaacggcgaccgacgacggccggcgacaagaggcgcggcggcggcggctcggacttacggcggcggcgggctacggcgcacggcgacgacggggaagtggcggccgggcttcctcactcccgtgcgcacctaatggcggcgacggagggcgacggcgacggcggatgcggcggcgcggcgcggctggcggttggccggcggcggcggcgaggctacggagcacgagagaactcggggaagggggcaaacgaaagaggacgactagggggtcctatttatagccttggattgaagagatcggactcctaccgcgtggaattggcccgagaaaatctaaattcggtttttggggataaatttgaaacgaactcgattcggttgaaatacccaacggtttgctccgattgttgaggggatagatagaggaggatgaggggattaaaacccctcaatcaatcggactcggggtggccggatttgaggcggaaacggcggaggaaggcggcggctcgggcgactcggcatggcagccggccggctggaggaggaagatgggtccgacatgtgggccccacatgtcggtgacccgaggaggaggggcgggcggcgtcggcttgggccgactgggccggctcggccgcgcgggaaaaggggaaagttgggccgaaatcggcccaacaacttagggaaggatttttggaactttttcaattaaaataattcgtgaaatgttgtttcatttattaaaaatacttcccttgctcaaataattcccagaaaaatctaaaaaatagaggaacaagcaaagtatttgatgaaattttatatagctcaattttatgttgaaaatttccctagattattagagtttaacttgaaggcttttaaaataatttctaacaatgatttaaaatatgcattt

SEQ ID NO: 13668 - DNA, 6915 bp, Oryza sativa
tatatgtggatgtatcaatttccaaaatctcaagcggaagatgaatagtctagcttttaagctgagaagtttcaactttcgacgcttctggcagttccagattgcatctacttaacaatcatgagaaacaaaaactgctgattggtcaatgtggtcaccaatataggctgcaacttgatgatgcacatgatccttgaaaaatgccacaacagttacacatttgcggctttacccataaaaatagcattgtccaacacagtacagcccatctattgactgtcaaaattaatagtagatttaatttcaataagcttgccacatgacaagttcatcagtgtatcaagtcaacaaaaaggaaaaatggcacccccatgcatattaacttacagtagtattcaaatggatattaacttacagcttcttttcaagctttttttgttatctcactggccgcaagctcctttttcttctcataatccttcttagacagaccctgccatgattatcaggactgaataagtatgttggtacagaaggccttggtctctcataattcaaagtaaaattagatggcagctagaacacatccatacctctcaatcttctatccctgcagttgtaaaaatatgaagtatacaatgttcttcaggatacttacaaatatgcttccacaaggcttctccaaattagctcagtcatcctgccaattgcactcagagtcttagagttaagttattttagactcaaagctgtactcaactttgccattttccaaaataatattggtcacattagccttgaatatttcactaatttccctgaagtggctatcgcactagacctgctgttttgcccataggatagcagaagtttaaataaacaaactaaaggcaaacaaatatggagcaacctaaccttcctattcgcccttcagttctccaatcaaaattttacatataaattgcataaaacaagaagaataatacacaactataatatccataaacaagaaaacttaacggaagaataatatacaactaaaattccacagacttcacggaagaatctcagccctcaaaaactcccttctattctatacaatgttcaagcaaaactctctcaactgaccatcctaaatgaaaggggcaagcttcccaatgaacagtagacaccagacagcttctctgatattttccttgcacaaatcaacagaagcattgttaaccttcggagcatagccacacacctttattttgcagttatctcatcaagcttcagaaggatcctttcatttccaaaattttttcacctccaactgcaaactgatgaacactgccattcagctccatccaactgcaacctttcttcttccacgtcccctggacttccattactccccttacctccttaacatcattccagtttccatattctgcatatatatttgataagagcacttgtgctccaccatgattagggtccaactccaaaattttctttgcagcaaacgtgccgagctcaagatcaccatgcatccggcatgctgctaacaaagatccccaaatgaccacatttggtcttaagtgcatggactgtatcaggtcagcagcttgtccaagaagttttgctcttcccaaaagatccaccatacaaccgtagtgctcatgcatgggctcaatcctgtattgctggaccataattttgaacaataaacggccttcttcaactaaaccagcatgacagcaagcatagagcaacccaagaaatgtcactccattgggttgaatcccttcacttttcatgttctcaaaaagggttaaggcggatcttccatcaccatgcatagcagatgcagtaattatgcttgtccaggtgacaacattcttttgaggcattgcattgaagacatccaaggcaagagtttaaactcccacatttggagaacatatcaataagagcatttccgatgggtaatatcttacacatgctatgattctccacgaaggaatggatacatctagctttttcaagggcaccaacattagcacatgcagatattacactcagcatggtaatttcatcaggtttgacaccactccgttgcatatcatggaacaaattcagcgcttccataggtttgctgctttcagcatatcctgctatcatagcactccaagataccacgtccttcgctggcattccattgaatatggagtgagcaatctcaacttttccattcttggcgtatccatacaccatggtggttgataatacaatttccttttctgacaccctattgtacagcttttcagccatttccatgtctgcacaactagcatacatgttcatgagagcacagctgacttgagcatcaataagagtatctgacaccaacatgtatgagtggatagcctttccaaatctcaagtttcttgtatgagcacaagttgaaaggacagtagcaataatcacttgatcaggaacaactcttgatctcttcatgctatgaaaaagcaacagggcttcttcatagtttcgggcctgacaataactgacagggtaatgttagagaggttatcataactatagtgaaagtccaattaacatattatacagaagtataaaaaataacagtagaaaaaatattagcacaaaacaaatgtatatatgtaaaatggtttgcaaaatacttagagttgagctggattagaaagaaatgtttctccacgtgccccttgaatttcagcacgtaacacagagatctagaggaacccacatataaatgtatgtcaaaaatctcaagtagaacatgaacagtgatgttttaaaaacgagaagttccaaccttctaggcttctactggttccccatgtctactcaaaatttacaagttgcattgctgcaagctgagtaatttcataggtcgaggtgatttcagtttatatatttttccccacaaaataaatcagtatatattttaagttccacattatttctgactatgccaagactgattctgttccaatcaggatttggaaatttcactcctgctcggtgatgataagattgagtatatggttccgatggccttaggacatactagttggactcactctgacatacagccatgcaaaacgttctccgatgtaccatgcattgaactctcaactaagcacaagcaactgaataaaccattttgcaggcagccaggcatacacagaacatgatacttacgagatagatcaaacaactaggattccataggattgcgtgaagaaatggagctgttcacagtgcgttaccagtcaagcatgacgccccaggcgacgaggtcccggtcaggcatcccatcgaacaccctgcgtgcgtcctccacacgcccgcacgccgcgtaggcccggaccagcgcggtcccgacgaagccatcgacctctgccccgaccctaaacgcgagaccgtgcgcggcccctgcggtgccaagggagcgcgcgaacgcgatggcacggagcagggatgggagcgcgcggcgtcctggcgcgggcaggcccacgcggcggaggcaagcgaaggccgcgagtgcgagacgcggcgcggcggccgcgcggattacggagatgtaggcgcggtcgaggtcagggtcggggtgagccgccggcgggaaggggtggccgcggcggaggaagtgggcgtggagctctccgagttggcgggaaaggcgctctcgaggctgcattggggcttggcctgcgtgggtagccaacgggttgagtggttgtatggtctagtcgagcggtctgagcagaggcagacccaggatttaaaagttgtgtattcaaaatgtgaagggtggaaaaaactttttatagcaaaagactaatattcgacatgtataataatcacatcgttgtaaaccactaattatatactccatccgtttcacaatgtaagtcattctagcattttccatattcatattgatgttaatgaatctagacatatatatctatctagatacattaacattaatatgaatgtgggaaatgctagaatgacttgcattgtgaaacggaggaagtattatatagcagatataacataaaattgagcatgatttcagatattcatagaattgatcataaatctgacattgttattgacaactgttcaacagtggtaacatatgaaatatatagaagatagaatatgacaaatgataagaaatcttacaatgtagaggacaactttccgatgcttgttcaacatatcattggaagaaggatccagattggcctgatcccgagtttcattttgagtctttttctttgcggcaactgtttcaaaataaacacttcaaatcaatagcaggaccttctttcttttcatatttcagacctgaaatttcaacaatatgggattgatgtatctggattcctgaccaattgaaagccgccctaaatttcaacaatgtgggataaatgtatctaaatctattgattctgactaaaaaatgtaaatcacagcacataaagaattggggacgtggaacaaacctgagacaaacagtgagagcctgaaccaacgagacaccgaaacagacagacagtgagggcgctaggcgcaagcctgtggcaccaccgacgcaccgccgctcgccgcccgcccacactggggctggtggttgctggcccagccacagccaggtgcccaggcctggccacgcgggtgacgctcgcccaggggcggcccaggattttcaggttgggtatgcgaaacgtgaaggagtaattatatagtactaaactacaaattgtataacatgaattgggtataatttcatatatttatataaatggattaactactattggccatggtcacaataaaatactcactattttgatatggcaccctaaaaggcatttgaaattataaagatgaaattgtcatgttgaggcagggacttcgaatgctgattaaaaatcatgaacaaattgttcaaagagcaaagaccatttcttttctcttcatatttagacctaaaaatccaacaatatgggaatgggattatgcctctggattcttatggaagaagaatcatgcaacgcaatggtagtgtgccgaacgcccttgccaatcagtgatacggtagctctgctgcataaattgatttactttctgtagacaggggaataatagccttaagtacacatgccaaaattatcattgctgagaggagttgcaactgtacttagatctgagtagcatcatacgcaagtaaatgcatgcagaacttgcagatcgagggaacagtgctaccggatgaatcgcaggatcaaccagcattcaacactacacagacagatagatagagattaaagcttactgttgtggctcgatgacggcggatgagtgctcgacccatcggcgctccaggggaaaccacttgagcaccctcccgtccgacacgcccgtgtacgggcggtcgccgtcgccgtcgccgtcgaacgccacgctctccggcccaaccgcgccgctggagtccacggtgatcagcacgtcgtcgctccgggaccgggagtccagggacaagaacaacgccgccgccaccgccacggcggccgcgagcaccacgaggctggcgtcggcgcgtcagcgcacagcgcactgccctgccgccgccgcctgctgcccgcctcgcccccgcgtcgcgaatcgccagccgccgtttggggagggggaaggggaagaatcgaagaaaggagctggaatgggctgagagagaggagagggggagccggggaggggaataggaaatttgggaccagaagggtgaagaaaggcccaaatgagaagtttgtttacctattgggctgtttaaggctttctttttatatttttaatactccctccgtttcaaaatatttgacaccgttgattttttagcacatgtttgactgttcgtcttattcaaaaacttttgtgaaatatgtaaaattatatgcctacatgaaaatatatttaacaatgaatcaaatgacaggaaaagaattaataattacttaatttttttaataagacgaacggtcaaacatgtgctaaaaagtcaacggcatcaaacatttcgaaatggagggagtacatactagcaaaatagccgtgatttactacggtgtactaaaactaaaaatatttctttttaaccaaagttattttcacactgctttggtacttttagcttgctagaaaaagtctcaaatgacagagagaaatatagtagctcatattaaattatttttcacaaataatttcgaagaaagggagataaaaaaaaagacaaagccggcttgatttccacctttacacggtgcaagtcaatatggactctgaagatatgggtagatctactgggtggaattaattttattaaattctccataattaaatacaatctttgaaattttattggaatttgcataagctaattttgaacatcatttcaatcttcctttctctctaggccattttcagtacattttattctttagcccatagctgagccgacccactttcctcccttcttctctcctccacctcaacccgcacatttgtctgcgccagcaagaagtctagcctccccctacttctcctctcactgccattaagcgtgcggcccgacgtgaccgatctgagccgttcgttttgatgtacggctcagatcggctcttaatccatcaaaaccccgaaccaaacaaaccctaaccctaatttccttttccccttcattccctcaccgcaggccgcctctctcggtctctccccaccgccgcctctccacgcctctccctcatcggcgtcgtcttcccgcgcccctcccccaccggcgcctctcccccaccggcgccacctacgcgcccc

SEQ ID NO: 13669 - DNA, 812 bp, Oryza sativa
caacgacgatggccggccggacttccttttcctcacaacgactggtcacaaccctaaatcctctcactccctctttgttcattcatctattgttgttcatccattgcaaatagaaccacccgactagatgtaaacctaggtgatccaatagactaccctaacactccattgcttcaaaaatgaaacagctttataaggtaattgaagtacatctgacataagtttgttgttaaacacccaatcattcctaaacagccaaattgcccaggttcccgccgcaacaaggcacaacaacggggtgttgcgagcattgcctgggcaaagcagcttgtcaagcagctctgttctagtgttcggcactttagcccagcctaatgcatctctaacacaacaccaaaaaaatttagtagggggacattggaaaattagatgatcaaccccttctaactccccacaaagtttgcactccacctcaccaggccatttcattttttttaattgctcagctgtttgtatgcgcccttttatcattaaccagaggaaaatcttaactttcagcggcactgggatacttagaatttcttgggctcttctgtctcttacccctccaaaaatcatctctttataaagcgacttagtagtgtaccaccctgatttagtcagaccccagctcattttgtcatcttcttctgttaacgtcaccctctctagaatctcatgcaaattatcccactcttcaaggtcttgctcacttaatgatcttcttaattcgatattccactccccatttgtacaaatttgtttgatcgtag

SEQ ID NO: 13670 - DNA, 7110 bp, Oryza sativa
ctgcagcccatgctaatctactaacaatccaaagaccagctcgcctccaaccatctaagatgtatagtaatttgaattagaatcccatgcagtgatattgtacaaatcaaaagcgagtgtgatgtttaagaaaaagaagaaagaaagctgagtgtgttgtaccactgcatgccggtgaggttgaactttgaaggcttgaggcgaactcgtgttctgcgtccaccgaaggttggaataggcgtccctgtcaccgtcgctgtagaggtcctctgacttgctagtcggatcaatatcagatggttccctgcatgatagagagtaacagacgaagatatcctcaattagtgcatttaactctagatggattcagagtaaacaacacatggaagaggtcctaaagcgcgggccagttcaatggagggggaggacttggtgctttgctgctgaggaaaagtcataacagtttggctaagctttgctagctacgtcatcatcagattcaacaatcagccacctcttacttttaggatcagcacagtatccgtcttcggagttcgggctagctgctgctctcttttttttcaccctttgatcagttccattgatctttggaccagtagctggtttccatggggactgctgtcccatactcggagggcgagatacagttgattttcatggaaatttaaggaatgttacattataggcttattttaacaaggaaaattgtaaaaacaatgatgatagaaaaaacttaggagtatgaacaagaagatatgtattgagcaatgatatgtgttcaaaggcttttgttcggtagtaggaatctcaattccgttagagaatattttatgcatcctagccttcaattatccaaagattctttaatttcacgagatccatcttttgtaggttgcaaccttgattttatgaagtgccaagtgacatctaccccaatcaatccttgccctctcatggcagtaaatctagcgatgagtgtgctgactttggacatttctttgtctgaaggacgcttaatgagcgatgtactaactaggggaagtcctattcaagaaaagaattggggtttgagaagtagaaccacttaacatgccaatcctttggaagatttcaatggaagggaaaagtattggtgaaaggaccttaatgtcgcctagagagggggggtggtgaataggcgttcctaaaaaaattatcacacttcatagcatattagaaaaatgagaactttcggttcaaattggaactttcctgtatggtttggaaattccggtctcaaccaaaaaattcagtggataatggaataaagcactagctatgaacttgtaactcgaataaacaaaatatatatgaaccaaaaggtgacaaataaggtacctaagtaagatatacagcttgctagcctgcaccaaaataggcggtggtctcccatatagattttaggcaattttttccttgattcaatttctgatttcagttcattgttccatttttacttgcacgaccctttccaaatgcttagagaatcaaatgatatcaaaatcagattcaaaatgatttttcaaatcattgtttaggttctcactcaattgtgtacttctcattcctaatgtgatgacatccttcatatggcattcaacctaatttttcttcaacatgtatacgctatcaaaccaagtttgcttgctcatctttttcctcaaaatgtcaaagtgatgtattcttcaatgccctcatactcaaacatgcatgtactaaaaagcaatagaacatttgtgtcttcattcttcagttcatgtagatggttgatagcattctacataatttgaaaggtgcataacccatgccatgcttatgtaaacacctcttcaaccgccttttccatagtcaaatcttgatcgatatagaatgttttaggccactttccattatgagctttcagaaaagtctcaaacaatcacttgaaagactcaaatgtttcatcatacatgagtgcagaaccaaaaaccacggtttctctaaagtgattgaaccctacaaacacacaaaaaggcctgctctcgttatttgtttcaaaagtggtgtcaaagctaacaacatcaccaaaatgtggtagtccatgatcattttagcatcagcctagaatatatttgcaatttgctcttcatagtcaattcgcagtgcatattggaatgatgggttctcaacaattttgtcatgaaaatacttaagcacactaccttcttggccatatgccatctcccattggcgcttgctccgtaaatagttcttgttatcgtgaagggtgtagctaagattgagtgttccgccttgtgccgcttttagcccaattcatgcatcatccgtcgtttcaatttaaaaggcattttcctttgtgacaccattaaatatagagtttcaggcaagtgtagtgggtgattgtgttccaataccagatcagactctttgtatatatccttctttccatctactttcagattcatgtagacttgacaattggttcagtttcagctcgagggcattttgttaaatgattccttttatattgtaatcgataaccctcatttgcacaaacaaatctacattatgtgatcttgctatcggattgccttttgttttaatacatttttcttacctcgaagccttcttgcccaccgtagctaagccaaaatgcgcaagtttcatttggatttgtaaattccattccaaccttagataccagattaggaacctatgattgctgaccaaaaaattggaaaaaccatactatgattgttgtttacatatcaccacacatattgctaaagacacaatcataacattgttttacacaaacctatgtccttccatcgcatgactattagacttgctttagtggcaagtctcagattgacaagcgacagtttcttccatgagaaaagggaaagctcgatcaagctgaaagaaacatgacgatgtatgtttgattgatttagtgagccatttatgagaaagaaggtggtcgagagacagattgttgagatttacctagaggattgaaggacggagaagctcaccccatcagtgattgcctcctcagctcctcgcaccaaaactctcgtccatggtgcctcttctcgtgcctttttcttattcttgtgcctctactcgctatgcttatgggccaaaccaagcagctgggcgcctgagctaaatcaatcagctaggccaaacaagatgtatgggaaggagctgctgttggatatgaatcaagttgaaggattcaatgttatctgtgcaatttggccacttttacaacatgtccaatttaaatgattaataaagcatatcagtaaaaaccaagagcgcatcagcgccacatgctaggccagcaacacatcgtaagtataaacggcacgatagggcgcgctataacgacatgttggctatcgagagtcgatgatcgatggttgggctgcgtgagagaatggacgctatggagaataacgtccacgctagagttgggctgcgtccatactactttcatagcatctagattggatgctatgatgcagttggagggatccggctcctctgactttgagtgaaaacgtcagaggcacacagtgttttggggcttacgctacagtacaaaacagttcctctactgtagtcactgtagcaacggcagaaaacaataaaaaatattgtttatatatcatattgtagcgatcgatcttgtccgttcactgcagttcagaccgttaaaaataccacaattagaggactgtgcgcctctgacgttttttcccaacgtcagatgatctcattcccagttggatatagtgtccatagtattttcatcagtcacctcacctatccgatttattactacttatttaattcaaatgaaaatgattagaaaaattaaagagtaaatttcacaaaactacacattttgtggtctaatttgcagaaaactacacactttgacacttggtacttaagtatatatattttggtagtgtagtttcaccaaaccacactatcaatgaatgtattcacccgtgagatggcgtggttgtttcaactaggacgaggacatggcatcctattaccagccatcgcacgaaattaataggatgcaacgtcctcatcctagatggaacaactatgtcatctcacgggtgaatccattcatcaataatgtggttttgtgaaactaaactaccaaaatatatgtacttaagtgctgagtatcaaaatgtgtagaactactattaggagcgcagcgcgccaaacatgcaccagcccaggccccccccacctcacgtcccgtcatcccactcttaccattgtcggaataaacgatttactcctatcgcgcgcctcaaccacccacctttattcgagtaaacaatttacttcgataataaaaacaactccactgcttccgatcccaccccacgtctcgcatcgtgcacccaccattatcagagtaaataatttacttcgataaaaacaacttctctactggcggtatatattctatttttctcgtacccaaccaactactctcgcccccactctgttttttcctttttttttcggatctgaatcgatccaccatcccagcccacagatcagcgacacaccatggaggaggacgacgacaccgtggcggttgatggtggtggccggcgagcggtggccggcggcggttgaggcgaaggcactatttcgagcctcgctgccggacgctaggcaacaccttaaccagcaaggaggtgttcacctgggctaatagcaacaaccaacgactgctccacgtcgacgacattgatagaacaagcaagtaaggaaataacactctgatttgcatctgcatactttccttcaacttcacacatgaagccctaattttttttgcaaatcaaattaacatgcaatctccaatattacctgatctcaattgatgggctgcacaggttctacatttgcacatcgtgctccatgtggctggccgcagaggatagggtggagtccactggtgatggagattgtttgctatttttcttttgctcatcatctgtattacatgaacgagaatgtttttgcattttttttgtgcttgctagatgatggatagctgctattgcgcaacgtcgagctcatctctataccacaccgctacatccttccatgattccataatggattttcggctgaatcatttattttcttttctagtttgattcacctgtgagtaattttatagtttgtgtgtgattgagcctgtaactttttcattcatacgactattttgtgatacagatcaataatactcttagtactagtttttacatattactacacggtggctacaagatcatggctatatcgagaggaaggtggtaattgttttactcgcataccacaaaatctcagtttttactcttatactgtgtattgaacacatcagtaaacatattactacacggtggctattacatcatgggctatatcgagagaaaggtagtaattattttactcatagaccacaaaatttaaataatattggtaaaacaattactagcgttgtaagctagtagtaattcttttacgaccatctaagtatggcgttatacgatgtggaggcattcatgcgagtaaatttattactttagaatgaggcattcatgcgaataaatttgttactctagaatgagcagatgtgggaggctaggagtaaatcaaaaactccacggagtaaattcgttatttttgagacgtgaccgggcccattaatgaagcatgataagatggaaaagagaaaaaaaagaaacacacaagatgggtggtaaaaaacgaaaaaaatcaaacgagaaaaggtgcgatgcggaggaaatgtggggtggtaaaaaagaaaaaccgggaggagaaggcggtgtgcggcgctcgaattattattccgcgctgtagcacgtggaatagcactaccgtcaaaatatgtgttgttttatacaacttaaatcacaaaacaatgtatttttatgaaatttactcaaaattaaaacaatcggcatatcccctcccccgttccccacactctcctcacagtcaccaatgccgaagcccaaccatcgtgcccgctccgccgctgccggcggcggcgggggcggcgggggcccgatagacgcggattggaagtacttcctcgacaatgtccgcgaggaaggccactcctacgccgtccgcgtccctgccgacggcgccaacccttcctactacctccaatacgagaagcccctcaccaacggcgccgcctccacctcctcccggggcggggctgcacgcaagcgctgccggatggaggaggaggaggaggaggagagctcgtccggcgaacccgaacccgcacccgaccccgacattgaagaggactaccgcgtgttccttcagaacgtgcgcctcgttgggcatggcggcttcgtgctggagcatgagggcaatgtgatcaggtacgatgcttcgggcgcggcgctcagctcggatgagtcttccgatgagtccgtgatgggtgctccggagcccgatccgcgtcgacgaaaggtttgccagctcgttctactttccatcttcttgtttactgttgttgtgcgcgtctctgacatacatgtttgcttgctcttaggcgaaaattgtggaggaggatcaggaggaggaggaggatgtgaagaatgaggttgccgttccgtctagaaagaaagattttaccatggtaaaagaggatcaggagaagaaggggaagagagtggtcgaccttcctgctaggggggaagatggtgccatggtggcggaagaggatcggaagaagaagctcagaaaagagttcaactttcattcctttcattctaaggggaaagatgatacaacaccagtgaaaaatctgaaggataagaagaaagaggttaaaaatccaaaggataagaaggttcatgggaagaaagaggttgccctttctgctaaggggaaagattgtcaattagcagagggtgggtaggttctcatggcccaatgttggttatt

SEQ ID NO: 13671 - DNA, 2040 bp, Oryza sativa
tccgagtgaactgcctgttttgcaatctaatgtgttttagctccaatgtatttaaggttgccttgaagcgccccattagacgccagttcaaagcaggatgtggatagtgctagcaaggaatgcccatagaaaagaatatctccctcactattgctcagaatcctatctaatttgcttagaatcgggtttccctgctcattactccaagtgaactacctgttttgcaatctaatgtcttttagctccaatgtttttaaggttgccctgaagcgccccataagacgcctgttcaaattctggttattcttatccctagcctcatatatgatgttgaagtctcccatgaccaaccatggcgtgtctgttggtggcttggctgcgactaattcggcgaggaaattttccttgtcacagtcttctgagggtccataaactactgtgatgatgaagctgagattatcagttatggtcgttgccatcgctgaaagatggtgtgttccttgggagaaattcaccatgttaacaattgtgtcatcctagaagatggcaattcctccacaagttccattggcaggaaggaaattgaagttcgacagcttgcttcccccgatctctttgccgatccattggtctatacaacttaattttgtttcttgcaagcacaggatgcctgctctggccagctcggctgcttcgaggactgcctctcttcgtgctgggttatttagtccgcgaacattccaattgagaattctcagatgttgtaacatttgggcgaagtataacacacaattttttccaaaaggatcgaccccataatgttttccaaatgaattagttcataagcagatagagggctacatattttcttccatgacctacaactacaatccaaacatggccatgtagaagcaatttcattatcttctagcctgtctactctgctactaaccggctgaaggctggtgcctaccgggagcgctattcgcatcaatcgactaaggagctccggcttaaggccgttgcagcatgggagcgctagtcgcatcgaccatacagcgagcagcggcttaaggccgcagagaaatgtaaaggatacatgcagatgatgatggaagaccattcctgcagctctaacactgatgcggacaatcatgacagctgatgacttctctcaggccgcgacagcgcgcgcctcagaccaccatcgttgcggtggttccttcctctcctggcaccggcatgtcgtgcactccatccatgcgtgtgagcgcccgcagaccggcgatgacatgcgacggaggcggtgtgtcaaaggactttgcataagcccctaccgccgcatccccgaccggttcacccggggtgagcagccccatctcctccatgaggcgcacttctgcgcgcttggacaccggcaccgatgagaagcgcgccttatggccgctccaccgcgacggcatctgcatcaccttgcgtccgcaccccttcgtcttggccacgccgggcggcgctagctcgagcggcgcctgcaggatgatcggtggttgcagctgcgagaacagaggagataagatgaccttttcacattcaccttctcctccgtggatgggctgagtctggaccatggcctggtgttgctcctcgcagtcggcctgctgcaccagggtgggctggtctcctatggaagcttgggcctcgtcatcttgagtggactgagtgaggaggtccatcttgggggcctgctgcgcatctgggccgagatggcccatcttcttctggccaactcagctgccgatgccaccttatcctctcccagtatcgctttttccccacccgtcctcttcgtctcgttctctgcctcccgtgggaacttgggagcgatctctgccaggagcggcagcatcgggtcgtggcccccctggtcgtctgagaaggggagcaggggtgaggagcataggatctggatcagagggcaatgatgtaatgttgaaggaaaatttaaatttaagcaccattgtaccctctctttcaaacact

SEQ ID NO: 13672 - DNA, 1047 bp, Oryza sativa
tcactatatatgtagatcatccagagccactggagccaccagctgggcctgcaccaccaccgcctcagccacttaagctgactaagaaggagcagaagaaactcagaacacaaaggcgccttgctaaagagaaagacaggcaagaaatgatcaggcaaggcctcttggagccaccaaagcccaaggtcaagatgagcaatcttatgaaagtactaggagctgaagctacacaggatccaacacgtatggagttggaaatacggactgctgctgcagagcgtgagcaggctcatgtagatcgcaacattgctcgcaagctcactccatcagagcgccgtgaaaagaaagagaggaagctttttgaagatcctaacacattggagactatagtttgtgtgtacagaatcagagacctgtcacatccgcagacacgttttaaggtggatgtaaatgcacaagagaaccgtcttactggtgctgcagtcattgcggatgggatcagtgttgttgtcgttgaaggagggaagaagtcaatcaaaaggtacaataagctgatgctgaaccgtattgactgggctgctgcggttgatgatgatgatgatgctgatgaggaatcagacaagcctgtgaatagctgtgcattggtctggcaggggagtgtggcaaaaccctgctttaccaggttcagtgtacacaattgccgtagtgaggctgctgccaagaaggtgtttgcagatgcttcagttccacactactgggacctggctgtcaatttctcagaagattcatcttgagctgagcttctgttcagaacatggaggcgcctgctgttgaaacccctgcctagggattacgatgttcaattctcatgcagtaagtgatgagtagtagctaatttctcaccgtgggtaagtgtcctcttcaagttacgtacaagccttattacttgctctggaagcatttgtggactgagtaatacttcgtactgtcatgaacatacccttgtaagggactgctgatcttttcgatgcgggatttactcatgtg

SEQ ID NO: 13673 - DNA, 1473 bp, Oryza sativa
gggttaacagccaacccagtaagtaaagaaagagccaatgggtcctgatcataaccatgaaggatatcttgcaaccagactggagaacaagttgagattcctaaaaattcagaggtttcctcaggaacatgtcgagacaatgcatcagcagcagcattatgtttacccttcctgtaaacaatctgaaattgtaatcccgaaagcttggtaaatgctttctgctgccaaggggtgtggagccgctgttcagtgaggtgcatcaagctatgatggtctgtaatgatcaagaattcttgaaactgcaaatatggccgccaatgatcaactgccatcatgattgctaaacattctttctcataagtggaaagaccttgagttctaggaccaagagccttactaacaaaagcaacagggtgctgattttgagataaaacagcccctatgccaatgtcactagcatctgtttcaatggtgaaaccttgctggaagttagggagagccaatactggagttgaagtaagggcatgttttaaagcttgaaaagcttggttcacttcagctgaccaaacaaaaggggcatccttcttgagcaactgtgtcaagggtttgctgagagtaccaaaatctttaacaaatttcctataatatccggccaaccccaaaaaacccctgagtttcttgagtgtagtaggtactgcccaatcaacaatgctttgtatcttagaaggatcagttgagactccttgaccactgataatatgccccaaataagaaatctgagtttgagcaaagtcacacttactcagtttaaccttccactgatgagtgtctaacaactgcagaacttgtttgaggtggtctagatgagaattcatatcagggctatatatcaaaatatcatcaaaaaagaccagggcacatttccttaacaagggtctcaaggtatcattcatagcaccttgaaacgtagcaggggctccagtgagaccgaatgacatgactttatactcatagtgaccactgtgtgtttgaaaggcagttttaaattcttcaccctcagccattctaatttggtgatatccagctcgtaaatccaatttagaaaaaatcttagctccagctaattcatccagtaactcatcaattattggcattgggtaggttcccttcttagtaatggcattcaactgtctgtaatcgatacatactctccaagagccatccttctttttaaccaatagggcaggagaagagaagggactggaactatgttgtataatgccattctgcaacatttctttaacttgtctttcgatttcatccttttgagctggggtatgacgatatggacgaatgaacactgccttggatccaggaagtaaggaatcttgtgatcacacaacctcttaggtggtaattcagtaggttcctgaaagacagactgaaactcatccagtagtggctgcacatgtg

SEQ ID NO: 13674 - DNA, 4670 bp, Oryza sativa
ataaaaaaaagttattatctgcgcgtgtgagaaagagatagcaggcctgatctttgtcaagtagaaaaatgctaactgtctcaccattagtgcagagtgtttgatctgcaactaattcttgaagtacggtgattctcagaccttcgagctaaactactgaagaaccgaactctaattgtgagtacctgtttaatttttgtctgaagatacaaatttgttcgaaagtgactgaaagagacataaaattcaaaataaaaatgaatctaatctttttgatatattttcctctgttgcactatagcatccatcagtgccattgagttcagtttcatgttaaaattaattagtatatagtgttgttggttcagctgaattgccaaaatataggatgccatcagtattttattttttaagctctcccgctgatttggtttcatttcatttaggtcgatactgtgctaaatttattccaaatcaaaattagatcttccccatcaccaccactctccatcagtctcatcctgctctctgctctctccaaggtgagtattggaaaccttgtcccgtggttatttcagaaatggagaatttcgttcagctgatgaattatcccttgatcatggccattataaatgaaataaatgcttaattgcactatctacatgatataacttctataattggattttgcttttctgaatttccattatgacacaaaaggtatgccagtataaaggctgtctgtttcagtggaagaaacagagaatgattaggatgggtgcaatggttatgtttgctttttgctaaacgtctgaggtttgcaacaatagcaattcttggctcatacttttttccctcacaatattccaaactgttaatattgcatgacggattcatttgttttgagttctaattagtgaactgtacttgaatagtttatactactgagaaattaaggtacgggcatgaatgataagtagttgtgagttgtgaattgaagaggtgaagtggagaccatcagatttattttggtcctttatatttttaatattgtcatgcatctgtgatcagtttccggggtttagattcattatgttctatatcatggttaattattctatgggtcttccgaaacatggcacattgccacacatcctatgttgtgttctatatgttatcaatgagcactgtggatatactattttggaaactgctttgtgattttcacttctatatatgtgtgatatctatactgattcgtttagttgtctcctacatacaagggacaaggtggacggggagctgaagctgtgtcaccttctctccagttgcatcggcggataaaattgtgagggcaagaaaaatatttgtactcttttcaaattagtaaattaatgcttgcaggaataattttgaaaatttaggagtactacttgtaaataaatggaatagcaaaaaaatggtagataacccttttaaatgatagaagagtattaccacgcaggtcgtcactacgacacaattagcaatataagatcattttcggcctcttctaatttgcagaagagatgacatttagcccattcacacctttgcatttgtgaccaaataattaagaggcctgaagcataggaagatttcaatagttgcattgcgtaaaactctcctgaaactaaaagtgatgtgttgctgatctcgctttatatgccgtgcagatcctactgaatccattgatttccaagagttctgcaataagaggtaaaaagaaaagttattatcagaggcatgagtataataaataaagctcctcaacaaaactggaatgaacaatctgtgctatttatctcgtaaatttctgaacttgctatgagtagtagctgtggatgccattcatttttacatctctctttgaatatgctgtgtattttcgtggaaacataatattatagacttttgtactcctcaacttcacttcgttagtgattcatggtaaaatcttggtatcattagagctgcttatggttacagcatcaagttatgattttctccgttgtcaaattgattgcacagtgattttgactacaaccatagctgatgcaattaatgggtataacaacgtagtataatctctgaggaaaagtaatgcagtttgttgtcagtatatgcactactgaatttgggattatgcagcacgtcaacagcaggtattcttattggtcgatttaatttgttatagcaaggcaaggagtcgcggacctgaccatgaccattttttaagtacatttgcacaaaattgagaagcacatgtacccattgatgtataaataagaggttcgtagctcaatccatatgaatatactttcttgaagaagtttcataagtataacgatttttcttccaccaaggagatttataatgtaaatctaatttgcatcttctgctagagagcttcctccagtagatgagatttacagaatgtccagcacagcgagcctgtcatgggtcgacgagctgcttcagtgcttctatccttcagcatgcagcaagttagatgtcgatccttggtgagcattgaccatgcttcttttttcttgttttggttagattaattcaaattgttggtactcatatatatagcattttgttctggtggacgtgtgcaggcaagctatttgttgtagtccttgcaagataaatttattactgtgtgttttctattcctgttattgaacatggtggaatcaatggtaatttcagactcagtactatgctggtgctcagcaatcaaaatcattgccacgattaagtgcgtatgttattttctgctggagattaatatgttttaaactaggaatgtttaatatgtctaccatgattaatatgtctgccttccaaataatttactctacgagctccaaacaaataactttgcatgataaaattgctatagtcatcatttcttatattttgtttactcaagtatggaagtgcttccatatcatacttatgaaatgtttatctcatgaataacttgaaagaatcttatggcatgacagtttctaagctatttattgtattttgttatttgtccagctgagtcgaaaagcatgatcaaggaacatctacagaatcaattgtattatgcagtttaaacataatattttgtcctgtgatatagaggaacatttttctcctctaagggctctatgtatttggtcttctattttgactaattggagatccttttgcatttcctttagggcacaataaaatcacatgacataagcaccagagagatgatgacctttttggcacgggggtaccaaccaaaaagtgttgggttgattgtcgaagctgtccagtgtctctataccataggtgagaaagaaatatggatttgcccttttgcatggtttcgaaagatggaaaatttgggatgttatttttagccatgtggctatgtaattaataatgtaataactcgtgatatcattcttttctttaatattaatcatatctcattttatttttgattgttgaaacatatatattctttttattgtttactttacattattaaatgatttcgttgtgttagcacgggcaaatgattcagtttcatgcatagacggtagacctattaatttctaattttctattttgcttaatacaagttatttttaaatcagctccaaattcatagtatagtgtacaataatatgtaatattttaacttgtacttcataccatgatgtactcacgtaaataaagacactcttcctgtcgatatgaatgcagtccggtcatcaagaagttccaaatgtaagggcagtacgcagtcgtcattgcgtttcaatttatttagatctgtcaaccgcttaaccataataatttctttggataattattattttgtcatatgtaaaattatgaaaataaatgatgtgagttggcgtggaactggatgtcaatttaatttagttaattctggtcaagatttattatgcccatgcaatatcatatttttgaactttgtgtggaatatatttgatgtacgacataaattgaactaaagcttaatgacatagatcatataatttttttttgctaaaatgaaatttcaagttactaaagacaatagaattgcaccgtagcgtttagcacgggcatattactagtaaaaaaaagacaccgtttatcggttcgacaaatatccgtgaagaaaacgagcgatgaaaaagaacaccgaagccaccgatcgaaatagccattttcattagccgctccgcgtacacatacataatagagaaaagtacagtacagggcaaccaggagataatcgatacagttcgttcgtactggcagccaatttgaccacaacctgctcaagaatgcttcctctcccatttcccttctcgacgctccctgcgttctactacaacctgccttgaggttgaggttgaggttgaggacgacgacttgctgccccgagaaggagtatgcctcgtgccagcttccaaagccgccgctgattctggatctccgacgctgctggcgtcaccacttccctcagcattctcctcataataatttcctcctgtgctagtacgctcgtcactcgtagtacgctctcgaggttgctgcagtattgtgggaaggttgcctgaaaa

SEQ ID NO: 13675 - DNA, 6302 bp, Oryza sativa
tcttgtagtttagaatgaacataatgctacagtatgccttgctgctcatgaactgattgacaaaatgtctctcaaggttatatctgaaattctgagcatgttaatttgtgtctcccagtaaggttctgtcatcttctgtcatccattagtgcccaatcaaagaacttgcatataataacatatattctattcttttaaaaaagcagaagctattatctgaagttcagctctcagtttcacagtaaatttacataattaacagtgcatgtaatttgtgggtactcttatataggaaaggaagatcagcacaatactgacgggtttctcttcaagatgatcccgtggttctcagttttctgctttctacactgtctacatcttatatgtgttcattgaagctacagattgatggacatagctgtcaaacctgaacctaccaggcctcctggtcatgtttctcctcagctctcatcacatttatatgttttcttacccaattccatacaaaaaattttaccaaggcagacccgttaattttggtatggatcatgtgaattttgaagagaatacgtacaccgttaatttattcatgcattctgctttatactatagtctacccaatttattcaattattctgctttgtactgtggtctagccattttattcatttttttcgcgttgccctccgctgtcgtccaggaccgtcgcccacggcgctggcgacgattcaccgccgacgtcatcgtccaacaccgtgacttggcccttcgtcctccatgtccaccgcgccctcgccgccattcataagaacaacattgcagcacccaatctgtggcaccccatcgacacatacgaccgcgtcgccctggctcatcgtggctaaccccaccgacgaggtaactagatttaccttttgcttttgttcgattgtttgacggccgagcaacagggatcgcgaccagtcggcaagctgactgttttggttaactgataagtgataactgaggaatttaaagctgtgtgtgcttgtcatgtgctttcgggtagctgttcttaaccactgccaaaagtttcggaaggtgatagaaccaaacaggtagttccttagctgcctgtgcagtgtgcagtgtgtctctggaccaaaggttgtaaatgttgcataaatgtttttttttaaaaaaaaatccagttgaggtactcttgggtccaaagccataaatgcataaataaggtccaaaggcactaatttccattgctagctttcttgtcacttagtttcattacatttgacatatacccagatgatttttgttcttgtttgtgtacaggttcagagttttttatgtaataattactctctttccatatatgcagtacatttttattacacgataacatcagtgttaatgttctatatggcattactatcattatttttcaacttatgtcatgcatatcattccatatcttttacttctcttttattatgaaaatgacatctttctgattcgttgagggcatgcggggtagtatatctgttattttaatatattcagtgttttcatcaatatattgaccaaatattcggtttatatcagtaaagggccatgttcttttcacaagatctgtttctgaatatacagactgtgttgcaacatttatagaattcaagttgtccgtagtcctgctttgcatgagtaaatgccaatcttatgtgtctgaactcttttcttctgtgtctgaactctcaagtgatgatctatgtttcccaaaaaatcttatgtctagcaaacttagtttctgtttccaaatgaaaaatcaagtagtgaataatgtacctgtattaaatgcactggtctcttatttagtaatgtatctagatacatatgctgaatttttatatatagaagcatatgttgcttttacacatgaaggtgtatatgctatcaggtttctataatatggttcataagtgaacagcatcaaatgtctacgttactttagtttgaatgtacacgctgatataaaatttagagagcattcttggaatgtacatactgttaagaaaatttagatgaattaaatccttatgccttatatgttttttctcacacagttgtaagtttgtttggagaaggggacattcacaaactgcttgaaagaggtgttttggtatctcaatatatggtggaatatttactactgcttttagtaactcctagataatctttttttacatacatgcataactaaatttgcatatatcttcatgtgcaattgcgctctctgatattacaatggtaggatttgtctttgaattggtatagtgacgtatttctgattcattaagggcaaactggggagtagaactgttatgtgcgagatattcagtttatatttctaaacttgggtgcactttgaatcaggacgaataggctcagttgaatctgtttttaggatgatgcttactggattgccaattttgaagttccattcagatcaaatattaatgatttatagattcaggtttgtctgaaaacgatataaaacaatatgctttgctgaacttaatactgggagatcactagggtggggtagacggccttcatggcgtctaggttctattgtggtccaacacatactctttttaccgatcctaatagatttggcataggtttatctacatctgactatgactactgtatattcctcaaaaatcctattagtatatgttttctgttctgactcgtctggttgtctcttatattaaaggtaaggaaattgaaggagttgtagctatccaaatacatcagcttctcaaaatagaagagctaaatatactagtaatatgcccgtgctaacgctacgtgtatgtttagtaatagaaatcatgacacatagtaaagaaaagataaagattaggaaaggagatgaaaattagattgaatacaaaaatttagggacggaatattcagtttttgttagcaataaataaataaattatgggccgtacgtgtggcttcagattgggccgctccaaaacccagactctggacggctccgtcacaagtcacgccgccgccgccgccgccgccgccgccgccctgcagctccgctcccccggtctctgcgcgtctgccccgacgctccgctggcccttccctcgcttgctcgacgccattgccttccggccactgcctcgtgccttggcctgttgcggctcgtcggcgccctccgccgtccgccacctccgtgcctgcggctccaacgccttcttcttgcgtgcggacgcctggagggcaggtaataacaaagctcttccttctcccagctcctctccaactccagtggtgctggtgctggtgctgtggcggtggctctcccacatgtgctccatttgatcttcttctcctctttttttttttttttgtcattgaaacatatagcttactgtatttaaagaaaatctctatacattgtagtgggacgggttcagcatcggcaattaatcgtgtctgatagaaattgaaggatgatgaagtttcatggttactttcctttattcatgttttcttctttggcaattatacattgccgactcccactgcttccagtgttgatagttacgccatataccgcttaagcccaacaaaaaaatgaaatcattatttatgttgtcaattaattttgaaaaactgttactatgaattattatgccagatttagattttattgctcaaaataaatgcttatggttaatcaatagtacagaccacagatagagagtagtacaagcaaatccaattatcaaaggtttccttaaaaagtggatttcagttgttctaaattgaaacaaggggacttgtaccaggacttcaagatttagatcgtaagaagtggaaccattcatgtttttatcttctttttttttccattgtgttctggttgttgtaaggttttcaaagaattgaatcaaaatggatgggacatggtatagtgagaaaagttgacacccttcaatggcttcgatttgtcttattagttgtagtattgaacttcgaattttttccacatactcctcatagatttaggaggcgttgatatgatataaagaacaatttagtttgcattcctggttgatttgaaatcattccactgttgcttctcatggttgatttgaactgcagtgtttgtgaatacaaaaggtacaaacagttgctcctttgttattattcttcctttctcattctctcgtgcgttctgacaatttggtaaacctatagtcatgtctatgtgtgcatctgttgcagctcaaactattttcatgttatacccccttatcacacataaatagtcaaaattttcctactagggctagtatttccgctgttgtcctgagattgacatttgaagtgaaatgatgaaatggacattcacagtcacatgctcaggtggataatttgtaagcatcgcaatgctttagtgctacatagaacaagctttgggcatgaatattgtcactgggagttgacaattgatcttgcatgatgttaggttgttaaaaccccaataatccagataagaaggattttacaggatggtaggatactacaaactacctttgattctgcaaccctgatggatagcatgcctattcccctttgtgatctttgacttattcttcctttacattacattggtttgcatgagattgatgtaatatgtatgatggcttttgctaattcagttatttttggtcatacagtgatgcaatggctgtttctttgaggattcattatgcataatggtattctactgcagctatgcttttgaacttgcctaaggcggtaaaaccaattggagaatggttcctttcaggtgcaagggcagcatgcattggtgtagatgtttatcctagtcactttgcatccctattgaaggaatgcaagtctgcaaatacagttcatcaaattcaccaacagataattgcttctggtcttctttctttgcccacaccattattgtcagtctcactaccagcattgccatccgaaccatttatatctccaagatctctgggtactggtgtcgtagcttcttatcttgcttgtggtgctaccgactatgctctcttggtgttggaacgtgttacaccgtcaccagctgtgtggtggaatctacttatccgagaacacatcaaacaaggccgccttgacagtgcaattaatgtctcttgccgcatgctgcgtgctggaactaggccggaccattttactctaccacatgtattaaaagcatgtggagagctaccttcataccgttgtggtagtgcattccatggattgatatgctgcaatggctttgagtccaatgtcttcatatgcaatgcgttggtggcaatgtattcccgttgtggttctttggaggaagccagcatgatctttgatgaaataactcagaggggtattgatgatgttatctcatggaactctattgtttcagcccatgttaaaagtagtaatgcttggactgcattggatctgttttcaaagatgacattgattgtccatgagaagcctacaaatgaaaggtcagacatcattagcattgtcaacatactccctgcatgtggttctctaaaggcagtacctcaaactaaagaagtccatggtaatgctattcgtaatggcacatttccagatgtttttgttggtaatgccctgattgatgcttacgctaagtgtggtttgatggaaaacgcggtaaaggttttcaacatgatggaattcaaagatgtggtttcttggaacgcaatggtggctgggtactcccaaagtggcaactttgaggcagcctttgagcttttcaagaacatgcgcaaggaaaatatcccattagatgtggtaacatggactgctgtaattgcaggctattctcagaggggatgcagccatgaagcactcaatttattccgtcaaatgatattttctgggtccttgccaaattgtgtcacaatcatctctgtgttgtctgcctgcgcttctttgggagcattttctcagggtacggaaattcatgcctactctctaaagaactgtcttctaaccttggataatgattttggtggtgaggatgaggatcttatggtgtacaacgcgctaatagatatgtactcaaagtgcagaagcttcaaagctgcacgctccatatttgatgatatacctctagaggaacgcaatgttgtcacctggactgtcatgatcggggggcatgcacaatatggggactcaaatgatgccct

SEQ ID NO: 13676 - DNA, 1340 bp, Oryza sativa
ttccttgaacttaaagtggaagcaactggaggaccatttccatgggcttgagcagtcgctcaagaaaaagtttgatgatctgaaaaggcaggaagaggagttcgaggagacggttgcaaagtcagagcagatgctggagcaacaagaggctgttgtcgtggcaaaggaactgacttctcttgaaaaactgcagcagaaaagggatgccgcgttggctgtgatctttggcaagtccaagctgaacttgtctacgcctcttatcaacccaatcagcaaatccgtgaataacaatgctgtgtttaatggaaacatcggtggtagtctttctgttaagtggcccaaacctgcaactgcgcatggtgcatacctgcaagatgaaaacactgctgtgaagcctcgttctcaacttgttgtcctctgtgaagagatgaatgttaacgggcttcataagttcatatcagacaatcgcaaagacttaacatccatccgtgaggaaatccccgttgcacttaggggagcaactgatccatatggcttggtgttagcttctctagaagacttctattttggagacaatcttatattggatggcaaaaaggatggaaaccttctgggtgtacgcaggacgtgcctcatgttgatggaatcaaaagctcagctgcaaactgatgctactactggtttcatatcggaaggtcaagtgcttactgcaagtatcaagaagcgtgcaaaaaagattgctcttgagtggaaatccaagttggatagccttgactttgatgctagcaatgggaactgcctggaagcacatgcgtttcttcaactcctggctacctttggtatatttgctgaatttgcacaagatgagctgtgtaagctacttccctcagtcagtcgtcgtcgtcagacacctgagctttgtagaatacttggattgtcccagaacatgccaggtcagtgctatcatcgattaataatgcagcttgttccattgagcatcaataataaatggaattttctatttctctttgtcactcagatgtttagagaacacattctgaccacttcaataattgttcatatatctatatatctataccatgggatttattttctagttagtggctgcagcaagagatgcctacaagtaatcagaattgtagcattgctgtttagataatttgtatggaaaatctgcaggctgctacttataatttggcagccgcacaccgaacctcactatctagtatctgtattgtacttagtggcagcaaagtttccacagcttctaagctatgttatatgctcagttgaggtcttaatttaactgaatgtattta

SEQ ID NO: 13677 - DNA, 1460 bp, Oryza sativa
  unsure (1)..(1460): unsure at all n locations
ggttcggaagaaacattcgtcacaaggtacctcacctgtgacggtccgacgtttgcgagtccgtcacaggtgaggttacctgtgacgaatgtttcttccgaaccgtcactgatgagttaattccagaaaaaaaataaatgctaaatatggctagcccaggaattgcagccatgcgtttgnctttgaaaaaacaagaaacatcacaggtgccagtcacccccctccatatcacatattccccaactgcccaacatcacagatgcatcacatatcacagatccatcacaaagcaacaatttacaacatcacatatgcaacaatttaatttattatagcacacaattcataccccatgaaagtcctcaaatgattaccaaaatttcttgtattctgttcgttgtgaacctacacaacctgtcaataagggaaaaaaaaaaggagaaaacagatgaatagtacaacataaatcgtagttgatcaaatgtgatgacaatttagtaaagtaccataaatattgcacatatgaaagtaaattacattgcactctataaaaacataattttttacatcgccagaaattataaaaacatcttttttacatcacaataaattatctagccaagttcatgagtctatttggcatgaaaacgtcctttcttattcattatttctgcaagaataaaggcgcacacttcgcctctgatagcgggggggttgatgggtgagatcttgaagccagctctacctttctgtttaataaataagaggttaattagcacgttttgaatagcaatgtagatattgaaatgagcttattcgccattagcaacaacctcagggtcgaaatctttcacctctcttagaagtgttgacatgttgtggcacacgtggaaaccacattggtctccgatctgttgtgcgcatgcaaacttggtgtcatgataaagttcgttcttgccctccttgtgcctaccacccttttccacatatgggccccaagccatatttaaggccttggtgatttcactgaaatcataatcaaaggacttattggaattaaggtaggtaaccctactccacttaggtacgatgactaggagaatccaatgtcgcctgcgtagtggttatgtagcgttagtactaagaaccttaacttcaaaaacaatatacacgaagggtattgtcctcttactcttggttgtgtgcgcacatgatgtactccttgtcttgatgggcccataaacaccggttgacatagtcaaccacctcagtgaagctctgtcgtaaattaacctcattcaccatggatggatcaaggaacccaacctgattaccatggcgacgactctcgatccaacacaaccttaaaatatttacgtattagaactaatttaattaggagatatagtccagtcatatcacaagtataaaggtatgcacttacaaggagtagcatttta

SEQ ID NO: 13678 - DNA, 10035 bp, Oryza sativa
tgtggtcaccacctcactacttcactgtctctctcggtctaccctttgatttttggcccatcaagggctagatcgggcatgacgctgatgctgctgtgctcctcggcctgcaccaccatggagagaaagggaaagtagagcggaactgaaataatctgatccaattgggccagtgccatttctaacatttcaaattatttccataaacctaaataaatattttattagatgtggtgtctagcagcaaattgacaaattttgatagtgttttcctccaaaaattaacttttgtcgtgcccacgaactaagatcctcaggacaataaattttgccatttttctgatgtcttcatttgggttcatttggttagatttattgggctatttattaattagatcaggatcaacgatagttgacgtattcaccgtacattcaatttgatactaaccaaagatctagatcaaggagatgatatctgtaatttgtatttgcaactaattgttgttccaagctatttgcattttgttatgaccatattttcctctctttatctataaatataaccaaataattcagtactttgtcatcataaatttaagacttagttgttcgacaatatttgcagagctcctggtctcataataaatgcagctcagagcgctaatttgatttattagtcttgattatacttatattacttttcaataagttcaattcctcgctcaccaggatgcatgtgacttttaatgttatatttgttgagacttgagaaccctcctttatatctatcccttctctcttcttatctaacctagtagttatctctggcacctttgtaatatacctcattctatttagtctgttttgctccatgtgtgtttctgtttcaatttaaatccactagacactagtgtttgtttaatgggaatagtcccacatgaagagtttagattagtctggagctgcttgtatacccacctcactccaaccataatacatgcgggttaacccttttatatgaactgaggatgaaagtgtaagtggagtgctatatgaacatggacccacgtaacgtgtagagaagactaatgtaattattatttggggctaggatgtaccatggtgcttgggaagtacatataattttctcaagttatttgcatacatgtttaatcagggagactggaataagtgagatgtatatactccctccaatcccaaatgatacttcctccgtccttaaaaaaaactctacttctagagtttgaattttgtcccataaaaaccaacttctaccatcctacctaccctcacaaataaaacaagaacttttatcccctttacctacctatcattacttttttaaataatgagggacattttggtcatttttctctccattaattttaccttggcatgttaggaatgctctttttgtgggatagagggagtacttgtcacctgacatcatttataactaaatcacttctgtttcttttgaaaaaaaataagctgttgcattctataaataaacattaagattccgttaatcataatctaaccataccatttaaaatatattaatattcaaagattaaataaacaatgacaaatatttggaataacaagtatgaaacagagggagtatattttaggatgaattccgatttacctctaaactattgcgtttgtccaatttacacccctaaactacaataccagatacttttaatcgtgatctatccaaaccggacgaattacccccctaagtccatccgagggggttttagtcgtaagtgcacacatggcatcggccccgcttgtcagcctccacttcatttgccctcccctatcaggctagtgggaccctcctatcagcgtcgactcatctcatcttcttcctttggccatgagggcaataaaagggcagggcaggtagtcgggctagagcttgagccctcccatcccctccgctctgcaatcctccttgtgaccttttcaccgctcgatgccgctctccttcctccgtacttacttccctcatttctccgtcaggtctgatcacggtgagccaggcaagcctagatctatctggtcaagctaatatggtcccatggagtggtgtgcccctagtgatgccggtgcccggtggtgcgaagaggagggacaatggggctgatggagaggagggggaaagggccctcgtgcaaaaactggaggcttgctgccggtggagttcctacttcctagaagggtttcatggtagacctgcagcgaagctgatggcgagacaattctctggaacatgcagctagtggtagatcaaagattgagacgaccagcccgagaggagatggcaacaggcatggtgatggctgtggtggtgggagaccaggacagattaaagtacgcgagcagttgtacccacctagcgtgggtgaggttttcggtatggccgacggcagcgcctgcatctgtgcctcctgcttgcaggagaagctcgggatgctcgactcttcgtcccagtcaaacccttcccacccactgtctgtgtgtcgtccaccttctcttcctattctttgaccagcaacctcaccgctgagaatggttgttggtgagctcactgagagaaaagcaggttgaatggtgaggaatagggatgaagatatatttttatctcagaatggttgttggtgagccgacgccgctcttccccctcgtaggcttgccgttagcgccgtgcgtcctcgtctgccatctaggagggcaagtgtagagtcccggagcaaatacacaagcacgccgtcctcgtcggcagcggcagcagcacgaacaagcagggccctgctgcaggagcttgcgactccactgctggcgccaggagatccaaatcaagagcaaaagttcaagcttgttgtcctcgtcgccgtcggcagttcgtcagttcggcaagttgatctgcttaattttggttggcctaggattcactaggaagaatataggatgtctgcttggttttttgtttggttccaatataacgaagctttcagatctataagctcggttctgttgatgggtgcaatattccaaattgatgtgtacaaaaattttgtggcaagactttgtgatttgtcggttgtttgatctattatgcaattacaaaaaatattgttcgcagccacaatcttcgatattttctttgaagcaaaagatttttgttgagtcactggtgtctattgactcgcaagctaaacgagctagctcgagctaccaaccgagccgagccgagctaggattttagcacgttaggataacgagctgagccgatcctaacgagctagaccgagctaagccgacccgagccgagtcagctcagtatccacctctaattatgtaggaccattaatgtctcgaaatatattagagggtaatttgtctgctttaaaaagtttgagacttgaaacgtccggtattgaaaatgagggggtaaaacaaactatgtcagaggttgagggggataattaagactttttcctatattttattgacaaatactggctagatatatcacacctaattcttttttattctgttttattatttagagcaaagatatttcaatctagctttataaaaatgctacatacggtacatacattcatgtctataatgtgaaagtgttgcatgacaagtatacgctataacataacatagggtgttaaaagcaaaatatattaatgaccggggtgagtataggttataagcactacccagaaaaaaaaacatggaaaccgacaggagtcttttccgccttggaagaaattttaaatatgaatgaaaaattgcaggtctatgagtaaatttcaagaaagggaataatcaagggggaacaaaattgccacagaatgacagaaacttcagcaacaatgaaatcaatacagttttgtaaaatttctttcagctagcgtagatatgatgctgtaaaacagtagtaaaattggtaccttgagttgtagatcaagatagctaactcaaactagctcatgcatggaagaacagccggttgatgttggtagcaaggaaaatatggacccgaacttcagatcgtgatgcaacaagccttctaaatatatctacttttctcgttttgccccctctcaattattatgaaatattcgttgaaggcttcaggcctacggctgtgttgtatctagtgggcaagtttcattgagaataataaacgcataatcaacattattggtacactttgggtcatcaacattctattcttcatcatattcttctctatcagattcatccttactagctagcatccacttttgttttagtgtgtaataggtccccacttcccaggatgcatgacatgcatgccttcattgaattgatggcattttctacattactataaatatctacatctatatattgcttaaaaaaccagtggggtgagttctgtcactaggggcggatcagaaaggactaacaggaggggctgaacaaactatacaaaactatagcctcatcttctaatggatgcatgacagaaaattttagtggtgacttcatggggactcccgtggttacaacgtacgccggtagtgggggctcaagaccccatagctcccgttgtagatcggctcctgtctgcactcctaccaccaactcccctaaactgaaatgtgagagtgagacctgattgaaaggcctttttcattcaaatatcttgtacctctaacctctacctttaatagtacaaaagtaatgctttttatgctggtggtagtgagtttgtcactcccaccataactttctctaaactgattttgtgggactgcttgaaaggcatttttcattcaaatattttataccttaacatctacctttaatggtccaaaagcaatggttgaaaactgaaaaaaaaagataaaacctaattaattttaaaaataagttctcgctctctcagtcagatctagatccgcccacctctctctctctctcccctcatcgtcgacgccgagtgccgcctccccgctgttgactactggttaccgtctccttgccctcgacaactaccgccgccttctccttggcctcgacgacgatggctgcctccttggtctccacgacaatggccgcctccccgatgctgagcacctcctgtccgccccctatgaccgccggctacctcctccttggcctccacgaggacggccgcctccccgccctccttgataccgagcgcctcctcccctccctcaacgacaactgccgccaactcctcggtctccacgacgacggccgcctccttgccctcctcgatgctgagcacctcctccttgccctctacgaccgttggccaccgccgacccgccatccactaccaccggccgccgcctccaccaggttttcggcgaaatttttcaataatgtcttaggaatttgtaggaaatgttttagaaatttatagataatgctttaggaatgtgtaggaattcgtaggaaatgttttagaaatttttaggaaatgctttagaaatgtgtaggaatttgtaggaaatgttttagtaatttttaggaaatgctttaggaatttgtaggaaatgttttaggaattttttatgaaattatttgggaaatttttggaacttttaggaaattatttgggaatttttaggattttgtaggaaatgctttaggaatgtgtaggaatttgtaggagatgcgtaggattgttttggaaaatgtttaggaaatgctataggaaattttaggacatgccataggaaatgatatgggacatgttagaaaatgcgtaggaaatttcagtagtttcttcgctgcagaaatgtctaagcaacatgatatgtccatatcgggcggtacaagtggagctacatctgggcagaaccctcggacgcaaaaccacctaccgaccacccggcaagttatcaccgttgtggatgaaagtggtaagcctacagcgtcgaggagtgtcatctccaaatggtcgaacagttgcaggcgtgtagcacttgatcattttggtatccttcataaaggtattaacaaggtgcagctggtcgagaaagagcgagctttgacaacattagtcacatggttcaactatcctgctgaagcagaaactagacggcactacagaagatgggcaaagcatggaagaattttaagtggaagcttttctccgaatatttcatcccgcccagtaatcggaccccttcaacgattacctacaaataatagagaaggtgtgggaggagttcttcgggctcaaaagcattcaagagttcgggaatgagcacccacaccgacccggcacaacggggtacatcgagaaggaggaaatatgggctcaagaggatgatgctactgctgcagcaaatgtccctatccctttcactgacatctctgaagtactagctcgaaactgggctagacccagtggtaaggtcaaccaggacgacaccattacatttccaaaacaaaatgatgccactgtctatcagcaactagtgagttcccttttaacttaagtaatgctgtactcgcaagctcctttcatacttcctacatgtcattaacgattgacccttataatatatagatggggttgattgctgaagaaacttcacaatgcgaggttgagtctgcatcgaggaggccgaagatgacgttttcacgagggcgctcggaaatccagaacatcctagacgaactcggggaataggctgcgacgtgccatggaggcatggcttgccccaatatgttgcgcattgtcagaaaaggaaaatctcaatagaagagatggatgcttgcatgaaggagccgttcaaggaggtcattcaagagctgaagcaggacatggacgctagggtggaataaagggtggcaaaggtcctcggcgatatgaacataactcgagggcatgaacaagcgacacaccatctcctcatccacacgttgacgtgggaaaatcacaacgaaggagtagttgtgtgtccatagagttgcatcatcttccggtccaactactggctatggtggacagcatagaggtagctgattttttatgcctcatctcatttcaaatgcctcacccttgacacgtttaattaagaaattttcattgcaatgcaggacgtagcactgtgtatcctagtggttagggtcacaccaacctttttgtctgaagtcgcaagggcatggcttacataccctctagcatagaaagggtgcccacggtagacctcatggctggatatgcgaagctggtaatcaattcggttatgcccaaccagctttcatatccaatacctgcgccatcaaatgatggaattctaactttgggcgatgcacgtcaaacgtacatacaatggttcaaggcagatattatcataaaaggtggttcctcgtccaaaacacccggtagaatctgaacctcctatggctcaactatcaattaaggcttgtcatgaacctgatttgacgaaaccacattcaccccgggaaaccatgcatgggtttgactgatgtagcagccaccatgactccagttaagaccacatggaaggccgatagctctccaccacctgtcaagagaccaaaaggtgactggagtcattagtgaccactaatatctgatcagggccaaatccatcaaaggtgagggttagggtccgttagagatggcctgattcgggtatccggcgtagtgcgggctacagagcacatattcgatccatacattttttagataatagattcgatccaacattcgatccatacatgaaagcatggacagctgcgcctgcgacagcgagcatcagaatgttgaggaggttttcttcttaggtaatggaactagagtatatatggagaagatatgttgatatgggtatatgatccataattgataattattttgaaccgtgaattgcattgcatatgattaactggttcaatcgttcggattactactattaattaataaccccccttcctttgtgtagcttttaattgatgtgtgaaacacaagtgtatgcagactttacactcttgaaattggctgaaatttcggttgttttggaacctctttatggaattatttcaaaatttaacaaatattgactgaatttgaataatttttaccaaattcacaaaaaatcgataatttcaaaccgaaatttcaattcccgatcagagcaagccaattggagacgagcatcgattggacacttgccatgatctagggtcgtttttatgataatagggttttcatgaagcatataaaatgaaagcatccgtctttaacatgaaagtgcactagctccattagatgggcctagttggccggggtctacaagggtcctcacttatattcttttcattacacgggaaactctattcattgctcgaggaaatgttcacttgtttttatgtcactcagaaggtcatcaattttttttcaaaaaaataataagatatatcaatatgtgataagtcgctacacaaatatataggtttaacttcaatttatataagtagaaacaaaatttacaaatctaacactaaatagaacgtgtaattcgcaatcaaatttgtttatttagtttctaattatataagatgaattcgaacttgcatataatgagatatcacatatcgatcaattttgctaaatggttttaaattattttgtaactttctaagcgccatgcataaaataaagggatgtctctcaggggaaaaaaaaactcccattatattgctctgcactccacctgaaggacgtacgcgcacagctgttcatacgactatacgaagccctgtctagctaaaagtctcctcggtctcgatcctcaccttgcccctgcagctgcatacccggccctttcgatctggttatcaatcgatccggtcgccatgaacgacggtcaaggtcctctcttttctagcttcatgctgtctatacttccctttctcagagatattgcaacgatagcacagtctgttaattactaacattttcttggcgatatcatatcggcagctcgattgatcgctctgtaataatttggctgtcgttactgctttgcttaattagtgcgtgagtagcatgtaacaccgtaccacttcatggtcactactagggtactttgctggcaaaccagcgaaacccaacgacaaagaacaacaggccggtgatgaggagacgcaagctgttgatgcacaaacacctggcggtacgtaacgcttaattaatcatatatgcgtgtattgcttcactacttcttaatttgagttactaattatcagccaaagcatttgtttttctcttttcaaagggtttaagaccgaaagtgcaaattttacattgttttccttgttcgcaattgtgttagtgaatttgtgtatgaagacacttaatttctgatgcttttttatctcaaccgatcacaacttctcgaatcatttccgtatgcgctcttaatacgcgtgtctacctaaaagatgcttacattctgggacagaggaagtagcagatttttagtattatgatttgtcatatctgctaatatgttgctatatttttgagatttagctagtagtatgtattacattcctcaccaatcttagtttgcatatgagagcacgtacgggacagtagattttaatctcatatatcttaatttcttgagaaataaactaatcaattttggtggcatacaagattacttcttgggccctccagcaaaccttcaacagcagccagcagcgaagcaatccgccgatcagaacagatcaagcactacactggtcaaggtcacctgtgacgggcccaaaccctcacctttgacggttttgggcttggtcagtgatcagtggtcactggtaagtccagtcacctttgacgggtggccggccgtcagtggtgacatccacctctgacgggcaagttaataaaaggccgtcagaggtgttggtctaagctag

SEQ ID NO: 13679 - DNA, 19435 bp, Oryza sativa
catcggcgtcagcctccttgttcttcttcttcctcctcgggctcctccttcgcgtcaggcgcaatgagggcgcggtggagagcgatgggcggccagtgacgatggtgggcgctggcgcggcgttttttcgcggtagggagaggcgcgcggcacgatggtggtgcggactgcggaggaggagcgcgtcgattctgtgaaaaatccggcgcacgagtgcacgacggtgagggggcgagagagcgcgaggaggaaatgcgtgggagatgcgggagaaagaggagggaagagcgagacacaggacggtggatgcggcgtgatttcaccatttcaggtgcggggaggagaggagggggagaggtggggtaatctgaggcgttggattggatgattttagaccattggatatgtgatatgatgaatgatgaatgagtaaaaggatttgttgaactatagggtagatccatgatggcatgatggcatatgtgtataacatgacatatgtgtgggtgcacatgacaatcaaattctcaaattggcatagaaggttctccactataagttattttatgagacaactacaaatgataaaaaaaatactgaacgtacataaaaatgatatgatgataatgaggtttattttaatcaccgatatcttcttatatagttttaataatctactgaaatgctcacatttgctgaaaaaagggaattactaatgaaaaataaattaaaaatatattaaagagcttttacaaacacatggtcggtgggttgtaaatattccatccagatcaagcattttaagtgaaatatggtttgtgattttaaaaaaatgtaacatgcatctatactacacaacagacttaaatcatagtatacattaagtgttatctccaaacaagatggttagcggtctcagtggcagagtaagatgcagagcaaggttatagctccttcaaaaagactatctatacaaaaaagaatcacaaatttcagatgtgcatattcatattgtccactaaattttttgcttacaactatgattcttccgtcaccatcgcattggagcagaaaagaaagtgcagcatatgcctaaaaccttgttgtactacttcatcaaaagttattgttggtgacttcgataattcagagttcccatcttctccccttcttgtattgcattgcataatctcgcatatactatagtagatatgttccgtcttcttccattcttgtgccaactcctaaattttcaacaaaccttgctgtaacactttgctctagaagtccttctaaagactcatcttttttgtcactgggaacccacaacagctctttgattggcacacttttctattatcactttctacctgcatacttacaacacccaactaagtaccacttatcagaacagctggtaatagcagtgtactgttagtttattaaccaattatttttctgcaaatggtagcacagtgcttaaaatactgaaaatttagcatattgtgtatataggattaattagaagcacattagatttaatagacaatactgaaacctgtagcaaaaaggagttaatttgacaaacccttttctttttatgtgcataaaagatatctgtgaaagacaatttgttctggtttgtcctcttactttatatcagattattactaatttgtctctgcaataatatagtagccagattttagagatatacaggcagggtgctgaaatggcacaaatctctaaatagagcaatcatattgtatacacctgataaatttgtcctcaatattctttacataaattttattcagtttcagggacatgttcaagttcagagaatcattaagagcttgttttcagccgtaaattcagatttcagacacatccaaaatgatctgattttattcttttacttaaaaattcactttggaagcatattttgtgctataaaaatcaattaaaaggttgaaggacaacgagcgaggacagctagcaaacctcagctcaattgaccctacttcatgcatcaacggccaagcaattaactctgtacatgaacctgcttgttctgatgaggagtaggctccatgaaagctgaacttgatgcccacctatctgagacctatccagcacatggatggtatcttgatcttcaccagatgacctgaaaaaacaataatacaaccaaagcaacaaaagatcaggacaaatatgtattaggtaaagatggttagcaaagaaaccatgaaggatttattaaccagctgttcaagcacaacttcatacaaaattgtaatataaaaagcatgaacttcctaaatactcttctttgtaccaagcagtcctgaaagttccaaattgactggtctctatctaagagatggaagggcagagcttttttatggttttcatcttttcataagatcagctaaaaaagctcagtgttgcatagatatataaagataacctaaagagatacaaataattcttggtcatgagggcacgagtctaccatcataggcagtagtccatagagatgatcatttagataaataattcattggaataaataaaaatacaaaatcataaatcaagcctgctctccagggacaaataatctggtaaatttataagacgtaaagaagcatgtgcattgcacaaacttattgtgccatgcaaaccatatacttcctccgtcccaaaatgtagctacctagtacaggatgtgacattatctagtactacgaatctagacagcccccaaaaataggaagtgcatttcatatcaaccaagaaaatagttcgcctataataatgactcaactcatatattctatttatatacaaatcaaaaagagaatttaaagaaaaagtatatatacaactcatgtactctctaaatttctacatctcttctatgacaggacctgataggttaggggaaaaatgcaacatgctggataaataattacatgctggattgaaaccatttaaaatcaagcaacttgttgatttttatcttattgcagcagctacattttacaactcgcgaatggaaaacctcgaaatcattagaaaaactatttttattgagaaaatgattacctaaacaaccaacagaaatcaggaaatggacctaataaagtggatacccaggcagaatgtttccattcaaataaaaaaagaaatatcttgtacttatagagcataaaaaaacccaactattaccgagcaagcacctgaacagctccccttccatcagtcccagcacctcctttgctcccctcctagcttctgtaaaaaacaattttgccaatcagaactgatgttagaacagcaaaagaaaaaaaaactgagagaaggtcatggacccatccaaaaataataataatatatgatttgatgcttccaaatggttagccttggatcaatcataaggttgaaaccgtaatggtatggttgaaagcacaacaataggatcaaattattttaccgtatccctacgaaatctggaagggaacgcaaattagctggtggactaacagaggtagatcaggctcgctaacatctaatagtttgctcttgcatcgtagtcaaaatcaaataggcacaagaaaaataatgaactgggatggagaagaatcaaacttgccgtagagctctagacaccggacgtcagggcccggagaggatcggtgttggcgtgaaggcgagttgacgtgatggagaccgagcgcgctacagagactggcggggatagttgtcaggcggcacggcggcgatttgatgaagtcccgatggagagcggtcggcgatgggatcggcgaccacttgatgcggtgcaccggcgaccggcagagatggcgcgaggcggcgagacggcgctagggcgagttggcgcgatgggcagaggggccagatagggtggcgatgaatgcgcgagggcgagcatcgggtcggcggcggtgtcgatctgtgcaacggcgagggcgagcgtggactggcggctgctggggataggcggcgacctggcggaggtgaatcggcgacggcgcgacggcaggggagagatgagggcgtcctgtgtcggggcgatggagagcgtggcgagccggcgcccttgacgatggaggattgaaggcctcggtggcggcggcggcgcacttgacgacggagcgggaggggagagagaggcgcggatgcggtatgggagggaggtgcgggggagtcgcggcgaatgcggaagagagggagatgcgggagaggatgcgcggtcgcgccgatgcggcgtcgattgcggcagagagagacgggggtgcgggagaggaggaggagcgacacgcgcgcatctgggacgtctgatctaactcatcagacgattttacaccattggatgtgtgatatgatgaatgatgaatgagtaaaaccatttgttcaactatagggtgtactcacaaactagaggtaaggaaattgtttttattctaaattccagcacatgcaaaaaaacaggaaaaataatatcttctaatatcaatcaatcaaggaaaataggaaaaaaagagagaagaaactgcttttaccttcaattgaggtatgaaccaaggatgtctactggaaacaacaggatatgggcacaggagagctctgatcggcggggttacgcatggcaatctgctaaacttgttcaaattagcgaaatttctgagaattgaaaagaagctaagacatctattttcagttatttacttagagggtagagaagggcaatgcaaataaaaaactatatgtgcctaaaacatttcatcccaaaatacaccactgaatcttgtctagtaatttgttttctcatccttctccaattcatggcattactaaatgaagtttatcttccaaaaaaaatattgatcagtggttaattgggttagcttgttaacatgaaatcaacaataaaatgatatgattgggccagccctactattgaaaccaagaataaaatgatatgattggtgaaatggtctatttcctatgacatttctcaataatactaatctacaatttggctgccattccatgaaagattggaagtgagaaagcacctggaaagagaaaaaccaaatcatgcgaactcttagttccaaaaatgcatggttgtacctttctgatagtgtttttattttctggcagggctcttaataggatttgaacaattgaaaatggccatgcgtgtgcaacaggaaatgtaaattcagtatgaaccccacaatagatacaaaggaagaatctgtacagcaacacttctgaacatttttgaagatacaaacaaaaatataaattcagtacgaacccaataatagatcataggttagctcttgcaaagtacaagtacaaagaaaatcaaaggaacaaagatccctcttggaattcagaagatctactccaatattcagaatgaccaataataattcaaacagtagatctcagaatcagcttttgtacaatacataatatcattaggtttcaataataaattatcagaagaacattttttttcaaactaaacagtagaccaccatatttttatcctaactgaacagtagaccacaatatttccatttcatctttccccgggacagcacatgctttctctgatacggcatgaaaagaagaggactaatggtaaaatctaaaatttgcactggaaaatagaagtgaatttgacaattggcatcacacggaaacactttattcaatcatccagatccatttcaccccaaatccaatcattttacttttctatcaaccaacaaaacggtcgcagtgcacggcttcatatggcacaactacattatctagaaacatcataactcaaggaaacgtctatcaccttgagaagaggttgacggtgctgcataaatcaaaatatacatgtcacatttcagttaaaaaaagtgttctttcagtccaagttgcataaacacaaagtcaggaattgtaggattttgtaggtacagtttaatgtttcttaaagatgaacttacattcatctactcaaatcgtaggtaaaatctgaccccgacgcaagcacaattcacatgctatcttgcgtgcaaaatggaaaccttggcatggtagtgctcacatgctgttgacatcaataggaggaatagagagcaggagatagagtaggtagtgttttacctgtttagtaaatagtcttagggaggtgagtgcgccatggacgaggttgccggtggtgtagtctgtgccacgtgaaggattatcccgtgccagggcaaggcacagagtatcttggcaacagatgcagtttcagagtcttgacggcaaatgcagttacaaatcgcggatcaacagatgcagtttatatagtcaccttgatatgccttaggagatctttcttcaaagcctaaatcccagtgacgctgacctatttttaacatttacctcatgaggaaaacaggaatccacaaatcaatgcatacataaagcgaaagtcaagaccaaggacaacactttaggttttacatcaacttattaactcgcaaataactacaaaaggtgcatgcatgcatgtagattttactctaatctagataccaaagtgttgcatctgcattttctgtcttaaaatgctttctttttcgctgaaatagtagccactgatgcaatacaaggatcatagtggctccctggttctcacttcctagtggggccctgcatttcaacaacgtcatgtcctaactcctgatcttaacaattgtctaaaccatcttatcttgactgctgggatcttacattgtgacacaaaagagagatatcattatattttctttaaatagcaaatatggggtaaataaatgaataaagttcagaagtgacactgccatggcacaacccacagcagacggtcgcccgctcgagggccgcctcgcactccatgacgaggaaccactactacggaaatcagtataggtgccggttaggaaccggctatagatgacggtttccccgccggcaccaattggtgggcacctatgccggttttagaatcggcacctacagagattatagatgccggttattacccccaaccggcatctatgggttagggattttttttttaaaaaaaagcgtctccaaggaatataggaactgaagcatcccggtgatctcaccacaatcagaagcaaaaacttactccaaggaagcagaaacttgtaccatctcacaacaatctcgaacccaaccatacatacgaagtagaaacataccactaatcatcaatctgatgagctgctgctcctcatgaacatcccgcgcttacgagacgaagccctcctcgcctaccagggaaccccacctccagatcgatcgacagggcgtctagacgtctgtcgctagcggcacgcaccctgaatgaaaagaaaccaaatcagagaaaaatgaatccgcacctccgccgctagcagcacaaaccatgaacgaacaaaaaccaaatcagaaaaaaaaaagaagaaatcccttgatcataagggtgcacgcaccttcgtccctggaagcacacctccaccaattcgcctcgcccatgcatcaatcgatcagcctcgccctgagcgaatcccacgagtcaagagatgcggcagaggagggattgctacgaggaaaataggagtaccttcgattcgactcgaactgagacggagggcagaggcgggaggggctcgtcgctggccgtgcgtgggcgtgcatgacgcgggaaatttaactatttgccactcttgtgacatggcaattaacgatttgcctcaccctgtcaatgacatgtgggccctcatgtgtctatgacatgtgggcctagtggcaaatcgttaagcaacatccgtaagagtggcaaatagttaaaagccccgcgtgacgcgaggaggccgcacagatgggaggagaggagtccgtcgaacacctcgcccgcgaagggagaagggaatggggccgcctcgccggcgacgagcgcgaggggaggaggccggaaggggaggggagccggagggggaggaggaggggagggcggtgacggaggaggcgagggggagggagccggaggggaggggagggtgcggcggaggagacgaggggcgaagcgaggaagagtggaggtgcggcctggcggtgatctgacgacgggaggagccagaatgggcggcgtggcttcggcggcggtggcgacctggcgacgggaggaacgagaatggcgagtttttttttccgggataatcgcgagatttagggcgaccgtggggacgggagttgcggggagaggagcgcatgggtgggtgcgggagggaggagagggatctggttcgttggattccgcgcgcgacgggaagacgacggaggacaggctcgcccttaacgggcgtttaccccatcgccagctaccggcgaggcgttcctcctcgcaggcggattattttcctcccgcaggcacagaccggcgacgtggaggcgagggattcgggtggagggcgcggtgggaggggaggcggcgctcgatcgtgacgcggaggggagggatgcggaggaggtgcggcgaatgcggaagagagggagatgcgggagaggatgcgcgatcgcgccgatgcggaggaggcgcggcgattgcgtcgattgcggcagagagagagagagaggggggtgtgcgggagaggatgaggagcgacacgcgcgcatctgggacgtccgatcttaactcatcagatgatttttgcaccgttagatgtgtgatatgatgaatgatgaatgagtaaaaccatttgttcaactatagggtagctttaaatggttttactcattcattatgctttaaatggttttactcattcatcattcatcattcatcatgtcacacatccaacgatccaaatccatcatatcctatagttgtcaaattaatgagtaatgagtaaaactaagatataatgagtaaaactaagatatataataaattaactataaattagatataatatgcccgtgctaacgctacgtgtatgtttagtaatagaaatcatgacacatggtttggtatcaagtatctaatatgataaatttaatatttaggaaaaaagaactacggagagagtttttatattgttgctaattatatagcctccaaaatataaaatcacaacttttgtatcttaggaatacaaacaaaacatattgcctacaaataatacaaaccaaacttcattttacaaggagaagtgttttgattattttataaattatattaatcaccgagacaaatttcacctaaatggaaggatataatcatacagaaatgaccttccaaagtttgaggagtcattgtctagctcaagtataatcataagtaacaagaaccctatctgaaccaatccacgtgccttcgcaaagcatgttagatagtgcaaaagcattttttgtcattctgcataataaattgaaatttgtcatttatgaattagtttatagaacatgctgtaaatttgaaccgcaaatgtatagagtataaggatataccaactatcctgaattctttcaagtgcatgcaatcctataataaaccagatattaagagagttagtatttcatcaagtatttgctactatgattatcttttaaaaaataaattgttataaaatggcagcaaacctttagcagtactacttcatgctttgtaaaattagaatatacttgaatcaattcagatgcttcaatggctgatgaatttttcatgcaaaattctacttactttcggttatgaagaatatagatagcacttaccatcaccaactggcttgccatcccatttgacaatgggcagaaaaggatctgactgctgcatcccagcacacttccttgctcgctggtcatattaaacacaccggcatccaccatcctgggcaccggtgctgcagccacttagccatttacctagtcacccacagcgttgaacgccagcaccaccagatcaccatcgcccgtgtcgaacaccacgttcatcatcggtccctcgtccatatccctggcctcgatgaaccacaccaacacgcacacaccgtggacctctaccaaatgtgattctacctgaccaaatcaagaacccacttcgagtctaaattcagtaccaacaagctcatgcagttgtatggcatccacaaatgattggctcccttccatcgatgtcaacacggttgttcccctcctagcttctgtaaaaaagataagaaccaatgttgaaattcaatcatcagaacaacaaaaaccatggagtacaatataacagtggaagtacagtaaatatatatatgcttaattctctgatcccatacttcccctgttgtcacatcaataaagtacacttgatgatttgaaattcaaatcgtcatatactgctatacatgtggcaaatgtgaaaaaatcactgaaagatcaaaaatctgtttttggagatcttaacaaatgtataatcacacataaatgttgaattgtctcaaataccctagaaagaaaaagatgctcccacaatcacaggcaacttgtccaatctgaaatctacttaaatcggtcaccaaaaagaacatggcaatatgttcagatcaacctaactttaaatgttccacttaatatgttcagatcgaacatcacagtcagtatgaaatgttctattgtgggagtgagaagattctgaaaccggacagcagaagaagcgagcttgccatagagctttggaaaccggcagaagaaaggtaatattacaaacttgccttcgccgtcaacctttccacaggcaccaagctccctgaacccaccatacacacctgtctccaatctgtttcagaacagagaagatggaaaacacataatcccgttctctctcatgagtgcatttaaattcttattagtgcaggaccaataggctcacaaaaaaagagggatcccacaattcgagctggattgcaagaaggaaggaagaggattgcgtcggatcggatcgaaccagaatttgaactccgggaggcgacggacgaaagggcggaactcgtcagatgtgctgatggggagcacgggccccccctcgccgagctcctcggcgacctcggggtcgtcctggggcgagaggaaggcgatgaggaggttgaggatgtagatgccgagggcgtaggtcacgatgtagcaccctcccgcgaaccaggcacgcagcacgtacgcggtcgccaagccagcgaaggccagccaccgtcgcgcccgcggaggagatggcggccagcacggcggcggcggaggaggaggggtccatcatggcgtcgggcggggcagaggcggcggcgtcgggtgagtgcgacagagatgcgggaagagcgagagagagagagagagagagagaggagggcggaggcggcggcgtctgcgcgtgaggggatggatgcggccgtgcagggagggaggggagggtgagggggagacatgggccgatcggaaccggcatattcaagggatttggaccgtcggatgtgtgacatgatgaatgatgaatgagtaaaaccatttgttcaactatagggtagataaccattattccatcgtgacagtgacataatcccaacggaacgggatcacggagtctaactggtctacatccgcaatgtttgtttggaggaaatgcaagtagtagttgtttcccatccttagtgctatatatttaacgtataatgtgtttatgtggttatgcaaatgtatgacaatattttgcgatatttaaaggtgcatgggaatggttttcgataccaatgacggttcaatgaggaggatcacacatttgtgtttaatgtgtaactttcatgtttgatggaatggttatagattggcttgagtatattttatatgcgacatgaattgaattataaatcatttggattgattatgcaaaaattacttttgctaagagcctatgatggaattttattactttataaatataatggcgctgtagcgttagcacgggcttattactagttataggtaggtagatagatattattgcaaaaggaaggtaaaattgttgctcctagatgcggcaaacctcttgtccacacaccatcttctcgtgcattccatttctcttcgagtaagtgttgaagtccttatgtagattcagcaaccatagcttctttaaggagcgaagaaactcgatgccttccgatacttttttcacaatgtgcaaaccttcaatgtgtggaagggcttcagcttcgacctccaccttgttgacatccgacatatgcatcagcacgagtgtcttcagcactggaaaacaccctgcagaaagaatcaatgtctttgcagtattcgccttgtttagttttagaaaagtgaggtatggcacatgttatgctagcagcaatagtagatcttcccaagccgacaccggcctagagctaaatatttgagatttctccgacaaccctttagaaaaattcaatgtcttcctacaatagagagaactgttcccatggaatatattatcgattagttgtctctgatatgctaaaaaggttttgaattgacagtatttcataaacaacatcgttagtcgacatgatttagaattttagggatgtatcggagtatgtgacaggaagagagttgatcatgtcgacattgcttcaaacatatacatggtttatccattttgagaaacaaaaagatagtaataaaccctctagaaagctaaacaatatgatgagatggtatgtcagtactgattcttatattgaaaggtacatgcatgtatggattatagcatgtagtttacagccttatacaattcaattggtagatccagcatattacatgaaaatattatatatcttccaatatactcccaagagggactttctcagaggagaaagccaatgtttcaggattatttaaaaaataaaaaaatagcatagcacattaccaaatactccacaaatctattgatagcacattagctaaggattaattgggcaggacaagatgcgttatttagtactgtgcagaggcatcttggcacgagtacgtgttatgcagaaggaagagtaaaatatgtcactcctagatgcggtagagctcctgtacatgcgccattttctcgtgcattccattgctctcccagtaagtgttgaagtccttatgtagatgcagcagccatagcttcttcaaggagcgaagaaactcgatgccttcaggtacctttttcacattgtacaaagacacaatgtgcaaaccttcaatccgtggaagggcacggtcttcgatctccaccttgttgacatccggcatgtgtttcaaaacgagtgtctttagctctggaaaacaccctgcagaaagaactaatgtctttgtagtatacaccctgtttagtcttagaaaggtgaggtatggcacatgtgatgctaacagtgacaggggatcttccccaagatgacaccagcttagagctaagtacttgagatttctcccacagtcctgaaatattgggcattgcagtgtcccattggcccagtgccctctgacaattagcttgtggagcctccctgaaataggctcgagggttttgaaacaaagcgtctcagttttactacttgcggaaagaagcagggttgaaagaagtggcatatttgatagtgtagaaaaaagaactgcacaatcaacatcagttatgttgtcaatccacacgcttcacagttgcgtaagtttcttcagctgctcggccaaatctttgctggcttccacagtttcgagtgtctgcaactcttctaagttggatagctctttcggaggttgaactccagtgaagtaccggaaatctgaatgcttctcatcagcacatttgtcagctaaaaggtgtcgtagcttcctgaccttgacaatccctcgtggtagcttctctatttttgtctgcttgatgtctagagtgtggagattatagagtttctcaattgtctctggaaatgacttgactttggtgcgccttaagccgatatatcttaggttaaacagattccctatacttgttggcacttcagtgatttcagaatcttgcagctcaaggacagtgaggtaggtggattcagagaaaattgaggacaacatgttagaggaggatgaaattgtttgaactgatattaatgttcgaaggcgaggaaatttagctttatagacacctttgtcctcccaacgacacattgacaagcggcggacttcattatccatcagcatcattgtgccagaatcatttgctgaaccaaatctctcatctttagccacaaaaagagctagatcacgcataatgtcatgcatcttacaggtactaaccctaccaagttcatctgtctctaccacttccagcatattccggttgatcagttcattgagatttccttcagccacgtcttctggcgtgttgttttcttttcttgcagcaaatccttcagcaacccaaagtcgtacaaggttgtctcgtggcatggggcaatcctcagggaacatgctgcaatacaaaaagcagttactgaggtctcctggtaagtcatagtagcttaggttcagaattgcttgtacatgatcactctttgctagctcgctctgtagctgattgtatgtttgcttccaagcatgctgtatcggctgctttgaggacaacaggctcccaatagatacgatagctagaggtaggccttgacacctatcgacgattgaattagccaactctagaagttctgaggggcaatcgtagtccttcctgctataaaaagcccttctgcagaagagactgaatgcatcgaccttgtccaaaggttggagtttaaggtgacgtgttggtagagctagtgctgccacatgcttactccgtgtagtgatgatgatgcggcttgcctggagattttggaaggcatcatgtatttggttgtatgcttctctatcccagacatcatccaacactatcaaacaccttctatcacttatgttttctttgaacttctcttttaagtcatgaacatccataccatccaagtgtgcttgatctgcatatccaatcttcctgagtaccttcctcagcaattcttctacgtcataggtctgtgacacgacaatccaagcatgagcatggaacctgatcttcccacgctcatacacattggcaacaatggtagtttttcctaatccacccatgccagatactattatcactgtgctatctagttcatttgagtacaaccatccagtcaataacatcctgttgccttcgatccccacaagatcttcatcctttacgagctctggcaagcagccttgtgaccgctttctttcaaaatcagaatgtttattacggataagctgggatggttgcagccatttatctttcagctttataactctttggatttcctgctcaatctggactatctcagcaacaattccatcgaaaacaatggcataatgtgatcctttgacaacgtactttttcaggaacccttcttcctccatttgaagagcatgatatgagtatttgtccattacatcctcaacatggtaggccagctttcgtacctccgcaatccaacccttgataactttgtcagtgagatgtgctgtatctagttgttctatgacattttccattgttgttagttccattcttatttcttcaaccttccccggtaactccgccaaactctttcctttctgatatagcttggatactgcagatttggcaatatttgtgggatccaatccaaaagtactattaatctttgatagagcaagaataattgcttctgccatttgtgctgaggaaaaaaaaagttcatgttacacagtgcaggaacaagattcaggactcagtaaaactccatccagccttcttgcgttacctaattattaatttcaataagtagaaaatcaaaccatcatatagcaaatcaaatatatatatatatatatatatatatatatatatatatatatatatatatatatattaaaggaaaatatccgatctaatgcgaattaaaaaaaatcaatttggtaatttgttgtgtttcagacaagaaacagaccaaatttgcagtttcggcgaatgaaagctaattaacaagccagataatatctttaatacaacatttagattacaaatatgaaataataattttggatttgaaatccaatagaacccaactgcaatgaaggtgtcagctttatgtttacaaaacaacaattttcccaccaatcaaagtaacataggagatcaatctttctccagtaccttttcttttgttataaagctttaaatctgtttggaaatttattattttcctgcatgttcgataaatcaattggacattggacttttgatactcctaaggacgttattagagatactgatagtatgcttccaaagttattttatttgccagatgacgtgcaggctatctattttgcatttctagcaggctgtggaaacaatggaataaatgatgcaaattagaaatgggttttcattttcttggatgtctcaacaactagagttgcattttttataaggaattgtataaagaagttgtacttgctatgggcctatgggtcttacgtctaagatcagctactgtagcactactagttatactcatccgccatactaagcaccagggaattagcctaagaaattaggtcagattggttaatgttatagtatcgtttgtttccatgatgttagggcatacattgttatactcactacaacaaaaacctcgtatagaggcacttttgtagaggcattttgtaaattgcttctacaatcagaagttttatagtgtagagacactttaaaaattgcctagaaaacttttactctagagacatttttatatcagtttgttagattttatcttgtagaggcattctttcggcactatgaaatgcgtctaatatgtaaaggcattttgttgagacattttaaactatgtagagacactttttagaatgataatgtgtactaaacgactaaatataagtaattaaaggaacaagtatacaagtaatgacatggagttgagttggttagtgtatcgaagattaaaatgatttaaccaaaagatcatgagttcaagacttatcaaaagcaaggaaactattttattctcttttttggactggttttatatgtttgcggtacaatttagtgtctctaaaaaatgcctctaccatcttatagacattttataaaatgtctcttcgtttgtagagacaattcaccataagacacttattagacattttttaaaatgcctctacattgttgtaaaggcatttgataagtgcctctacagtactagaaaaatgtctatacagagtatttttcttgtagtgtactatttattagttgggcgtgctaagtagagcccatggtgctacgtccttacatggggccccatcctcacacaaccatatattgtcttgtcatgccccagcaaacaataaggctgtaaatgactaaatacccatctatgtaaataagaatagttgaatgcatcacacaagtgtaaatcctcattgcttttcgaagggcaattattggtcctgaattggtagcttggcaagatctactgcccaaagtagctacgataaatcttcaacaacatggacggtttaaactattcaacgcgttgagctttgatgtactgcaaaaattccatattacatcgaacaactttgtgatactttatgaaacttgcaaagtagagttgttttttatggtacttgtgaaaaggtgttactccaaccaaggatagttgagtgaaaaggagatgacgaggtagtaaaatatgttgttttcatggtgctgatgaggctacacaacactctttcattgactgtaacagtttgctactagttttatttggcagactattcatatagtttatggtttacagccacccaaaaacattgatcatattttaggaactggattttgggtttggataaaaaaaacaagatctaaggtttcagcatgtgctaatgatatgttgggtaatctggttaagttgtaatcgcaacgattcaatcttgtatgcaggatatctatagtggacatattggctttgttattggtcattgctaaaaaatgaggatgagaaagcagaaatcaacatgggcttgtggggacatatatttgctaattaacactctaccggaagattaaaacaaaactttgaataagaaaaaaatttcgctgcatccaagagcaataccccgaatgaagctggtgccagaggaaggaaaaggacgaatgagttaggtatctgcagccattggcgccaggtgcggcggacgctcatccggctaaccccgaactccaataccccgccactgcaccgagagtgtgcataagaaacatcgccgcgagccaggagggctcggcacttgctacggctgggccgagaggaaggggggcacagctgattcaccgtgggggacggcagcagcaccaacgcgtgatggggtgtccaggtgagcgccgccggtaggcgctattttagctcgaggagaggagacgacgatgcggaacatggtttttgactaatttccaccaaataactgatatttttttatgagtggatgactacggggaccccaagaactgaactagtggaagtttctgaaattgcagggtgaaatttgaaatcaattatgaggtgcatctcaatactgctgcaaagtttagaatcctaaagctttggattttttttttaattttcactgaaaaaggagagcaggaaacgtcaaatgctagaaatgtcctggccacactagttatattatcctcttcctcatgcttgctttccattttcttgtgagcaatgatttgatattccgtggagtcttgtcgcgtgcccgtggtgccaacgttacagcgatgaaggccggtggctgacgaggagggtggaaaaggatgcagttgcatggcacagtcaccgtggggaagctgggttggtagcggtggctaggtagggtaacgaggatgtgggtgctgtggctgcttaactgttactcaggtgtaccgagacgatatccatggaccaactaccataggtgcaggacctgcttctggagattgcctaggtgtcccggtttaggtcatcatctgagaatgtcacagcctacttggggatgaattgtgcgcacgtgggctaaactcatgctaggggcctactcgccgattgcgctccaactgcttgccgtcatgcacagccactgcacctccggagcacattccatgcatacaacgcactctcgccgcttgtcaagttatagtatgctt

SEQ ID NO: 13680 - DNA, 1009 bp, Oryza sativa
aaaaagaaaataactttaatgaatgtgtcaacgggggatacccgtagaccggatatagagggtattggggtctgttggtacgaggatctacgtagtatgacatcaagcagacaaaagacaaggattatactagttcaggccccttagcaggtaatagccctaatccagttggtatgggattatatggtggaaaccacagattacaaagggaataaaagaactcggtgatatcgacgagaccgtagtcgagttggcccgactagatctcccggtgacttggctcctgtaagctccggcttcgtaggctgtggtgggtgtgttggcggtgagatttgatgccttagatcctgccagggggtcccttttataccgcgggtcagtcgatctccaagtagaactcggagatatcggacccctcacaatatggtaaagatccagtttcgtccgagtaggactctttccatccatagattctgttcctatcacgggatagatttccttaatgtatacggaaactattcgtacacgcacgggtatactatatcggtacgcatcgtatatccaaggatagagggcataccttatgcgtaaccctgacagaatgtctttttaattggatgtgactacacagctagtggtagctactttgtactccatctagtatctcctttcaacttaaaaaatacaacagtatcttcttttctcattctacatgaaaacaaaaatgaaagggaaaaaaacaatcgatgattaaacagatttatagagagttacttttgaaccatgcaaaagttactaccaattaacattgaagttacttttaaaaattgttaaacttatgtgtgttgatccgtgctgattaaatttaatttttagataaagtcatatttttatccgtacaacgaatttacttctattatcgtgacaaaattacttccgttttgttttatgttacttttataatatatgtaaattacttttagactctattaaatttacttttatatat

SEQ ID NO: 13681 - DNA, 562 bp, Oryza sativa
gttaaaagctagtacatagttaggaaagagcacattacgctctctccatcagtggatatatggtacctggtactgaacctgatagccattaccataatatgttgtgtgggcaggtgagatgccatagggagctgagcttatcattgtgggatggtgatgggcctcagcaccatacacatactgcctctcgtaagggtaggaatgcctctgcggcggagcagcctggtagaagcttttgtcaggaaagctagtatgtggcgcatatacggatccattggcacgaggcctcttagactgtggctttgcagcttcaacagccctcctcttgtctgccttagctttctctagctggataactcttttctgaagcaggtcaatcggatatttctcatcaagtttgtgctcctcgatacacttaatagcagctttcaaggcagacagctctcgttcattcatttcattctgaataatatggtaattcatcagatatactacaatcacaattaattaggaatgcacgcagatatgcttaaaaatgtacagaccagcaagaagagaaaat

SEQ ID NO: 13682 - DNA, 2262 bp, Oryza sativa
  unsure (1)..(2262): unsure at all n locations
ggagcccagggatcgagcccacgacgacgggaaaaactcgggaaagtttaggatttcgccggaaaaaggaaagattgaaccacgaaattggaaaggatttccatagaaacttttggggatttcttggggaaaaggaagaggagattgagaggattccattcccgcaactaatttggaaaaaggagcaacgaggtggccggatttcggaaggggatcggcgacactgtgcacggcacgggagacagtcggctggaggaggaagatggagtactgtagcgccaggaaggtcaaacagacttttttgcgggctgagaggaagggagggaatgggctgaattcggcccaactgatgaggaggacttttattacttttccaaataaattaaccaatgagatgatctttcaattattaaaaatacttccaatgctcaaataattccaagaaaaatcttgaacatacttggacactcaaagtatttaatataataatatccagatcatttaatgattaatttattatttaaataattgctaaactgttctttgtattattaaaattaagaattgagctctgaaaaatccgagaaaattccaaagagtatagttaatcatggagaatttaataaaaattaaatccaaccatgctttatatttaggaaattttatttcccacatttaacttcacttgtaaattaatgaacttttaatataaattctattaataatttattaaataatttataaatcctgaaacggaaattcaggctatggcagtaattaagagttcccgaatttaccaagtttagtggtgaagatggtaggaccacatgggagcatgtaggtcaatttttagcgcaatgtggtgaggctaatagtgatacttttanattgcgcttgttttctttatctttgtccggtaccgcttttacatggtttacttctttactggcaaattctattcatacttgggctcaattagaggagagatttcatgattatttttatactggagaagccgatcttaggttatgtgatttatcatcggttaagcaaaaatataatgagcctgtcgttgattatattaacagatttagggatgttggaaaccgatgttatagcttaaatatagctgatagagatttggttggtcttgcttttaatggtttaattgctcctcttagagaaagagtagatggccaacaatttcttgatgttagtcaacttatgcaaagggctctggctcaagaaagccgggttaaggataataaatatattgttagaccatatgagaaaaagccttatgttaatgtgattgattaccctcaggctagtgatagtgtaagatcagggtgatcatgatatgtatgctgctgaatggtcatggactaccaaaaaaaagccttttgtttgttctaacttaatgccgactcctcgcaaagatcggcaaagtgaggttaaatatagttttgatgtggccaagtgtgataagatatttgattatcttttacaagaaaaaaaattagattacctaaaggccatatcgtaccatctcaagaagaattgaaacgtcgacgttttttttaattggtaaatggcatgattctcattctcattccactaataattgcaatgtgtttcaacgacaggttcaatcggccatagatgaaggacgattgaagttcaccgatggctccaagatgaagcttgatcatgatccttttccggtgaatacaattaatttcaatgcaagaaggtgttgatttggccggagcaagccgaatctactaaaggaaaaggagtaatcattggtgaaccaaggccaaagatgatagtaccaaagaagccgtaggttggtgtttggaaagagaataaaagtgaagcttcaacttctaaagctcctaggaagactaaagtgacccttgatatgcttttggagaaatatgaaaagcagggtggtgagagagctcacaacaaggggaaaagaccaagatcacctctttgggagcgatttgttcactcgctaagacggtcgcattcacctccatatcatcatccacaagacatgtcatggggttcttattcaatgccgccgccgagttatacttatccttattatatgccatggggggcaacatcgccaatgttcaaccatatgcctccaatgcaattcaaccaagggtggggaggaccaagaaggccaattcatgagcgtttttcttcaccaaacaatggccagttttatggtaggaaccgggccaatga

SEQ ID NO: 13683 - DNA, 1462 bp, Oryza sativa
  unsure (1)..(1462): unsure at all n locations
aagcagtgtaccgttcctggatcataatcacccccttataaaacaaggcatggactccccagcgacccccgtgagcttatctccgccacttcttagtctagtgctccgcaatgaaccatgctatacaaaaggtaaagccgttgcccatgctggcttgtggttggcacggttaatgtttcacaaccgaaactcgtgaaccggtccttaattgtcatgcgcacgaccatcaaaactatgtgttcacaacccaccattatcaagttttagttggcacattaattaattaaccaatcacgattgaccatcgtgagcttccattaaatatccataagtgatagtgaagcatgatttatcccattagtgagctattgtttctaagcatggctaagcatctattataagtatctagctgaaccaaactaatatataaggttctagctaatcaaattataacccataaaaaaataaagtcatcttcggccataattaaatgggaaaggctcaccacccggtgacattcgaacataaatgcacagttgaaataaatagagaatttaaatataggattaacatgctcaaaggaattgtgtttgggatctgtgtgacttgccttgcaatattcggtcttcaataagtcttctggaacacttccgacgcactttcgaaccttcgaaacgacggaaacgacaagctaacacgccanannaaaanaaacgaggagaaagactaataaaaaccaaataaacagtacataaaagtaaacaaacatgtagatcatgattttacataaatttagagacttgaacggtctcattccgatttcatatgaattaattacaaattttacaagatttaattccaattaaacctattaaagaaaagactattccaaattaattaaaccatttacaaatgatttataactgagacaaaagattaaagcaacctccagaaaagattagatcatatttggtagatgacatatattaaaaaggaataatatgccattgaaaagaggagaggatttatatcgattttggacgactgagattaatcttgaccgagagttgaccaagatcagatggcttggattgatctggcaagcgagcctcacgagataccgactcaacgagtcaattctacatgacacgggatcgcctaaatgattagccgaaaccggcgaacggagccggcagctctgacggctctaaactaaaggacgactccacacggatgaatgaacgaaacacggggaacacctcgttcgaacgaacgagcgaacaactcaacaacggctgtggctaaaccggtggactagaaacgattcacggtaaagccccggtacggcaaacgataggccggtaggaacctagggatgtacctacggctagacaactcgactaccgagcaacgagctaaagcggtggctaggtttaaacggcacacagctgcgacacgacac

SEQ ID NO: 13684 - DNA, 591 bp, Oryza sativa
tgagttttagtataagattatttgagttttaatataagattattagatttgtaattagacttactatataatttattgactagctagggtcctataatatacgtcacctagacttagcatatgattgttagcatataagattgttaaaacataaatgtctcatgacttagcagatgtttcctgtatgaacagatggctgatcacgatgaggaacagatattgtacgatacaatcgcggagggaagcagccagtactggaacgaagaagaggggaacgaggacccaaaccagtatttgaatgaggaagggaacgtggagagggatgcggaggggaaccaggaggggcacgtggaaagggatgtggaggggaaccaggaggaggaggctagtggaagtcaaccctccgttggacagaagagggcacgtgggcaacgaggtgccacgaagaagcttgagggtcggcacatcataacggaagtggaagaagatggacgacctagtgccccggcagaagccaccaagaactatgtacgtcacagcggttgggttgtgcgggataacgtgcctgtcattacggtgtattggcgaaga

SEQ ID NO: 13685 - DNA, 3185 bp, Oryza sativa
ttccacctcagctgctccttcttcctctgctgcacctcagcgttctgagtcttcttctcccataaagaaggctcttagggctatcttttgcatgtgtgccaagacagctaagaaggtaaagaagatagagaggcgtcaaaaggatagattggacttgcagcaggcaagggatgtcttctgacatttctgatgatgaggagtttgttgatccttttgctgcttatgagactgctcgagacattgctagtggtgagggtccctctggcacttctcgtttcttcaatgaggagtcctctcactccgaggagagcagtgatgatgaggagtcaaatgcccctaccgagaatgttcttacagatcccgatgaggcagtggacgccgccgggcaagacatcgactctcctcactccggcgacaccgagatcattccttctgatggcgatgatgatgaggcttgatcctcttcttcccttgtgattttgtctctttttggtgccttgatgccaaagggggagaaaattgcaaacgaaggggggtcaaaattttgtttttgatgcttactgcctgctatctgtataatccggaagttccggatcctcttatctggaagttccggacctgacagctccctctccttattgtcatgtcagcttatccggaagttcctggtattttatccggaagttccggacctggcaatcctttgacccctattcttaagaactcatggacatgttctaattctctatttgtgtgaatgtaatgtctattagatgctcttagccgccctttatttatactgctcttcatttatgctatgagtgtcttatttgttgtttgtgttatgatgttgattttatcctcttgagtgctcaccatgtcgtatcttttgcatataatatctattcttactgctttttgcatcccatgaatgagtagggatgaaggaaactctcctcggttgctcccttatatatatgcatatgagcttctctcatatcttccatatgcatacattaagggggagtttcatttacctttaaccattcaaaacaaaatttaattcaatcttttgtaagctttaaccatgttgtcatcaatcaccaaaacgggggagattgaaagtgcattaatccccctagtgggttttggtgattaatgacaaatgtggttaagggactaatgagttcattgagtgactttcaggtgcattagtccaaggtgtggaagatggatgcttggagacccccaaaaaagtacaaaatcaaagcggaccggaactcgagaagggcataggatagtttatcttttgaaatcgagtttttaggaaaaactgtactattaagaggggttccaggtgatgctctgagatatatcaagtgctcttagtgtgaaccaagtgtcaagtttccctaggagtcatttttgcaaatactccatctgtccaaaaatgcaagtccggaacttcctgtcttccaggtccggaagttccggtcttgtgaaaaagattttcctaagtgtagtccggaagttccggtctttcaggtccggaacttcctgtctagtttccagttcaaatttgtgagtaacggctagatgacgttacctagccgtcatacatatacagctcgattccagctcgttccttggccattccactttcatttttcaaacctagagctattgctagcctctcccaagtgtttcttgtcttctccactcaatctagagcctaattcttgtgagaaagagagattgagagggagagaagaagatttggagatgtgtgaagactaggatcttgggtgagcacttggaatatctcgtgggctgtcatctcggtgcttattactcttggagatgatctcctagatggttaggtgtcgcccgcgagaatccgttgcatattgtggatgtcccgggtaagtttgtgaaggatttcctctcctccgaaagggaacgaggtaagttggtgaagttcttgtgctgagattctagaggctttccaagtagagcaacccacacttgtggtggatttctagaagtaggttgagttggatcttggtggtcactcaattctagaaatttgcctaggggtgtttggggttgaaggctgtggatttcctcaggggtttttgcacaagtgaggcaaggggttaattgagacccagctctttggagctcctcaacggagagtaggatcgcaagattcgaacttcgggaaaaaatcgctcttgtctctttctgtgatgtttctgtgaatgattctatgatatatcctctgcttagaatacctgtgcaccatcttgtgaagattggcttagtctcctgtttcaaaatttgaatttcatctctgttttgttacccggaagttcctgtcttagcacaccggaagttccgggcctagcaggccggaagttccggagttccttactaggaagttccaggtctgtttgaaattttaccgctgcgatttgtttttaagatttcaggggacagcctattcaccccccctatagacttcatcagcgagttcaattggtatcagagcaaggtgctcttgattcaagcttcactgctttgagtgatccacgatgtcggatttagggggaaagaacggggaaaatggaaatgaagatggaacgagcagcaaggaaactccatcacccaagggagctactataccttttgattacagcaaacttaccattccccctcacaactttgtctccgtgccttctaggcgtgctcctcaatttgatgggacacattacgccgcttggaagcacaagatgaagttgcatctaatctttttgcatccaagtatttggaaagttgtttgtataggtattgatgtaccccatgatgacatggagctcacttcggagcaagagcaactcatccaccgcaatgcttaagcttccaatccaattctctccgccttgagtccggaggagttcaacaaggttgatgggcttgaggaggccaaggagatatgggatactttgcaattggctcatgagggatcacccgccgttcgtgaggccaagattgaattattggaagaaaggcttggaagatttgtgatggatgacaaggagacaccacaagagatgtatgataggatgatgatccttgtcacaagattaaaggacttgggagtgaggacatgacaaatcactttg

SEQ ID NO: 13686 - DNA, 1643 bp, Oryza sativa
ttgttgctcaagcatctgctccgatttcgcgactgtctccttgaactccttttcctgctctttcagctcatcaaactttttcttaagcgactgctcaaggccatggaaatggtcctcaagttgcttccactttaagttcaatgaaacagcactctggctctcaagctcggcaaatgcacgctgaagcagctgcagcttggagcctgtagactccataagggctgtcatggactccatgtcggacatggcggcagctcctgcaaatgagtaaacaacggaagctgttggttcgcgcaacccaaatagcactgcaaacaaatccccgcacagtacagcaaaaacttcatcgaaactacgcaatatctcactaaaatggttcggttaatttcttcctgcgcatggatgaaggaacattgaagggaattttatacgctattgcacacaaatcggagaacatagcaacatcatctacccatggacggatctaacgtgggacatggtatactgtgatgtaaatttttttgggggaacaaacaaactgttatttgtaaggtgatcaaaattgagagaaaagaagcttccagatctggaagagaagctagaattaacgcagggaaattcaaggaaaaaagtgggtgggtagagatgaacgagaaagaggatggatactcaccaggatgcggcggaagcagcaggacaaccgacggggatggagatcggcgcagggcagcggcggccgaactcgcgacacgggactccacctccacgcccagccgacgggatgggatggggacaccctcaggcgaggacacaatgattttggccagcagatatttcctcttttcttttttttttcactactgttcaatcgcctaatccctactacgtctctgtttctttccttatccctaagttataaaaaaataaaaacatttccgtccgaaatttccatacattttccgtatttgatttgattattggtcgacatttctgattcgaggtgagtctagaataaatattataccagcccaacctaaccagtccacaccatctcgtcacctcatcctcatcctcacccccacttggcgccgcactagcccctccctcgatcggcatctttttctctttccatttttcttttttctcccaatcatcctaattctcttccgatcctttcaatctcgtctattttctcatttttcttttctcttccgaatttctcttctcataaatatttttcttttgaaattataattgttaaggtgtgtatgcggcaagtttattactttgcaaatactttccatttacagtaaaataatttcactaattgaataatcaaaattacaatcttcggtcaatgaggtatagcaaaatacacgtgtcaaataatagaatagccacccgatcaatttgtgaggccttaaaatttgcggaaagtgtacatgaaggatccttcatatgatgatgcatgaagctagtgtgctcaatacttatatatgatttctgactttgttttgccatggttttgtttgtcttgtttcggtttgtcgtttaaattggtagagtttttatcaatcgtgaaattgtctttacctgttgtaacgcacatgcatctttgttgctccctccgtataagatgtttt

SEQ ID NO: 13687 - DNA, 1345 bp, Oryza sativa
agtacctgttcagtgtctctgctgatttactgataagaacatgctcaattgtttcagtattgtttgagatgtataagaagttaatatccttcctgtatattctcattggatgcaccttctgtgtttttcaggctggtgctcagcaaccgctcaatgctgcacctgttgtggtgccatcatctgttcctatgccttcaaaggtatcttcgattactaccaccaatgaaaatgagggagttagtattagatctgatgaggttactggaaaatctagtacagatggaagtacaagttcagccgctggcaaaagtagtaatctatctcttgatgctttagccaaagctaaaaaagcattgcaactgaagaaggaactatcagaaaaactcaagaagctacctgtggtaagaaatcacagttgttggtagtcccttgcttctatatttctattttacctttctaacttattgtgttttttggcacagcttaataataaacttggtgttactagtactgatacacaaattcctaagaaagaaacacagcctgtttctagctctggtgcatctgaaatggctgtgggtgcagctcttactgagaagatggcagctacagcaggtgcagttggtattccaggccttgctaacattcccaatttggatgctgtgaagcgagcacaggaacttgctgctaagatgggattcagacaggatccacaatttgcgcctctcatcaatttgtttcctggtacatcctctgaactaactgtgcctcaaaaacctgcgaaggcacctgttctccgtcttgatgctcagggtagggaaattgatgaacatgggaatgttatcaacatgaccaagccaaccaatttgagcactctaaaagtaaatctcttattttactagcatgaatactatgaaatgttatcagtaactcttctgtgcaatgactgtcacttttggttataccttgtaggttaacataaataagcaaaagaaggaagctttccaaataatcaaaccagacttggattcccttgcaaaatcaagtgcacactttgatgaaaggatgggcatcaaccaaaacaagctcctccgccctagaaggcctggatttcagtttattgaggagggaaaactttcaaggcaagctgagctgcagagaattaaggtctgtaaggatcaacttttaagattagttttcaaaatgtatttacttatcatatttccttttacttaccctaataatttgaccttctagaatcaatttggtgaagcacaagctaaagaacttaaagtaaaacaagctcaacttgcaaaggcaaaggcagaagtagtcatgaacccga

SEQ ID NO: 13688 - DNA, 654 bp, Oryza sativa
tatgcagcaagacctggtatactaccaccatttaggggtgttcgataccacctgaaagagtacgaaggcgggaaatcaccagaaacacctcaagaattattcaatcttcgacattcctcccttcgcacatctgttgagagagcatttggaaccttaaaaaaccgtttcaaagttcttgctagcaagcctttctttccatataaagtccaagtgaagatagtaatagcgtgttgtgtactgcataattggatccttgataatggtcctgataacatcatatatgatgaagctcgttggtatagtaagctacctagatcagctagagtagcgacagattatggcgaggagcaccaacagtgggtagaatttcgagaaaatctagctaatattatgtgggaggaacattaacagtggtgttgtatggcatggatattgttctatgactgttagctatttctaatgaattcttctttcagctcttcatattatagcattttctactttatgtttttttgttggatgccattattacctactgtgcattgctttgtagttcataacatggatataggaggaagcaacaaacatggcaagggaaaaagtaaggcacgcaaaggagttgggggatcaggtgtgaggtcaaaacccataaat

SEQ ID NO: 13689 - DNA, 532 bp, Oryza sativa
agaagttatcaatttacattcctcaacatcattagcaatgtgaacaacatgcttaaaatcagcacacaatgaaacactagaaatagcatgttcattcactagttgtggtagggatataagtgaagcattatcacacaactcttctttatcacaaggaacagcaagtaaatcaacttgtgacaaatgcaaatcagaagtagtttccacccaaatttgctctatattagcatggatagtggacaaatgtgactcatcagaagcacactcaccttgagtaatatcagcaccatttaatttaccttttatgccctctttagataatataggtgcatcagtcttctcttcttccttcgtgagtgatggagatgacatctcgagcatattgctcttctcctcatggtgaatgttctgaactccctacaaaatatcagtaatcggaggcacaagcataacctgtttctcccttgggttctttaaaatattgctctcaacactgcaagcaagtatgaaaacacaaaatttttcctcatca

SEQ ID NO: 13690 - DNA, 2031 bp, Oryza sativa
tgttcatgctttaaagatttggcggcactatctcatcggtaaccgttgtgaggtatatacagatcacaaaagtctaaagtacatcttcacccaacctgatctgaatctcagacagcgaagatggttggagctgatcaaggattatgatatgggaatacattatcatcccggcaaggctaatgtggttgcagatgccttgagcaggaagagctagtgcaatgttgcatgggtagagcaactatgttgtgaggttcaacgtgatttggaacatctgaaccttggtatagttgagcacggattcgtggctgccctagaggcacagcccacactggtggagcaggttcgcatagctcaagcaagtgatcctgaaatagcagagctcaaaaagaacatgagggttggaaaagcccgaggttttgttgaggacgaacaaggaacaatctggatgggataaagattgtgtgtacccgaaaacaaggaattaaaagacctgatactaaccgaggctcatcaaactcaatattccattcatcccggcagtaccaaaatgtaccaagacctcaaagaaaagttctggtgggtcagcatgagaagggaaatagctgaattcgtagcactctgtgacgtctgtcaacgagtaaaggcagaacaccaaaggccagcaggtttgctacagacacttcagattccagaatggaagtgggaagaaatcggaatggatttcatcaccggtttgcccaggacgtcatcggggcatgattctatttgggtagtcgttgaccgactcaccaaagtggctcacttcattccggtgcacactacctactcagggaagaaattagcagaactctatctggcaagaattatgtgtttacatggtgtacctaagaagatcgtgtctgatcgaggaagccaattcacttcaaagttctggcagaaattacaagaagaattgggaacccggttgaatttcagcactgcttaccatccacaaacagacggccagaccgagcgagtcaatcaaatcctagaggatatgttgagagcctgtgcgcttgactttggtggagcatgggacaaaagcttaccgtatgctgagttctcgtacaacaacagttaccaagctagtttgcagatggcaccatttgaagcactgtatggacgaaggtgtcgtactccgctcttctgggatcagacaggggaacgccagttgtttggtacagaagttttaaatgaggcagaagagaaagtcagagctgttagggaaagattgagaatcgcgcaatctcggcagaaaagctatgcagacaaccgccgaagggagctcgttttccaagcaggggattatgtgtatctccgtgtcactccgctcaggggagtacaccgcttccaaaccaaaggaaagttggcaccacgctttgtgggaccatatcgaattttggaacgcaggggtgaagttgcttaccagcttgagcttccctccaacatgcttggcatccataatgtgttccacgtctcccagttgaagaaatgtttgagagttcctgaggaacaggcaagtccggatcaaatcgaaatccaggaagacttgacgtatgtggagaagccgactcgtatccttgaaaccagcgagagaaggaccagaaacaaagcaatcagattctgcaaggttcagtggagccatcactcagaagaagaggccacttgggaaagagaagatgagttgaaggccacccacccgcacctcttcgccagctcttccgaatctcggggttgagattccgtttaaggggggtaggtttgtcacaccctgaagttttcccccttttgcttgctttaaaaattggttaaataaattgcccgaagaaattatcttaattaacctagagctaaatccctagttaataaatgcacttaataatcagaaatagtgtggtggaatttttcttgagttccccatgctccaatgcattaacaggatttttagtgaaattttcagagccttggaaataattttaaccaattaaaaat

SEQ ID NO: 13691 - DNA, 20774 bp, Oryza sativa
  unsure (1)..(20774): unsure at all n locations
ccgggactaaagatcccgggggggcctgacagggcctgacagcattcgaaccgatgatctttagtcccggttggtaacacaaaccgggactaaagatcaaatatgcccgttacccttttgaaccgggactaaagatcatctttagccccggtttttattgcatccgggactattgtggaaatcggccgaccgacgaaagatggtttctccaccagtgtgatattaccaaatttggttgttaacacaaccaaacagaataattaatagcatcatccctctaaactctcaatctctcctaaaaactcccccaaccaaatgacccgagaggggttgctgaatttttttatatataatagtccctccgtcacagaatatagacagttttagagttggacacggttattaaaaaaatagatagcattaaatagaaagagattgtgattggttgagcagtggaggtaggtgggaaaagtgaagggttgtgattggttaggaaggaaatgctgatgaagaagttatattttgggacaaatcctaagagcatgtacaatagcaggctataagtcaactataaacatattttaaagagataaaggaagagagagaaaagtagcgggctacagatctgtagccagctgcagcacggactacaagacataatgtgtgtatgacaggtgggaccaggtattaatagtatagtaagcaactattgtatgaattggctgttacattggctatagatgattttgagctaacggtgggctatactattaaaattgctctaagtgctaaaaattgttatattttgggacgaggagtaattaactagcataatgcctgtgggttgcaacggtttctaaataatatttattgacataaattaaaatccaaaatcatatattatagttgggataaacgacgaaggaaatacaaacatacaaataacttttgtccggaacgataattcaatatcatgaaaattacataacttaatccctattttttcatttacctataaagaattcaatacaaagaaaaatataaattatgataatttttaatggatcaaatagtgctaaaactaatactgtgaaaaaacaacttaaattagttagaaattgaaaaaacttattttagcccacaaatgaaaaatccaatacattaattctaaaacggtgcatgtttcattgacataaattagaattttattgttctattcatagtcctatggtctgtgagtgttccatgagcatctttgggctagaccaagaaggaattgtgtcaaaaaaaaacattgttcattgccttccctagctgaagacgagaaacaaaagaggaggggaaatgggtgtcggtgctcctatgaccaaacagtggcgaggaagatggtaggatgtgtctcacgatgtgactcgtccatagatggtggtggtcggcaatgaagaaaaccaaaacagcaggaattgggcaagcaatgtcatggtcttggtagagggagaaacgataatgacgagctctggtggcgaacacgaccggataagtgcgtcaaaacacattcctgaacgagaggattctgttttccttgaactcgcggaaagaatgaaagatggagatgtgtattggtcgctaaggtacaacgtaacgtcttgtacggttgtagtcgggtcatcaacgtttcttctaaatcgtagttatctaaactcatcgaaagattgggccaacaacagtcttgagtgtcgagtggaactcagggttcatcagtgccatgagggagagagggaggcgggagaggagaggcgcaagggagaagagggccgcgagggtgggggagcgtgcagcaacgaagagatgggggcgtcggaaggaagggagagaggcggaagcggagatgcatgggagggctggcggcgtgggggcagggggggtggggggacggactaaagcggagggaggaagccttccgtattttttaattaggtatatagataaccatgaaattgtttcctatatataataattaataaccatgaaattaaatcattagtaattcattggcattatttagcaaaatagtaaggacgctatttggaagatcgtccaggtgtggtcactgttacgagcagcgtctgggtatagacgtagcaaaacggcgtccaccaggcaaatgctgcccgataagctcccgcccaacttagaaggtttctaggtttctcgacaaaaggataccagcgctgctctgctttcttttcctcaattgttgcagcggtgtagccgcgattgcctgttgtagcggcgaagcttgatgtcgtcttggttgcttgttagctgcgctgcggcggagtagcctcctccagagtttgtaaactccacaccacctcttctatttgcggcgcgcaccatccaccccggtcgatgtttgactccaaaccacgaggcgaggtgacgtcgtctagctccacgactccacacgcaggtagacaaggtcgcctttgaccggccgcctccacagaatttgcaccacagcccacaaggctatggccaaagcctctgcctactatggatccttttttttttgggaaaattggaactatgccattataattttgcaaaatttgagatatgccatcctgacccacatgtcattgactcatgtgggtcctacatgttattgagataccgatggcatatctcaaacttgcaaaattataatggcatggttctaaattacccgttttttttctagttctatgggtccacatgtcaaagaatttaatgtcatctgacttaaggaagaggatctcaatccaaaagagagtggccccagaccatgcacgcggcatgattccttcacttattttttagataatggaatagataacatcccggcctttgctaaacagagctgcagccaattattacaatctaacactcgaacaagagtgtagttcaaatagaattaaacacacctaaacattataaaagtgaccagaccaagataaggaatacacaattattcaagtctatttttaaacctccatccatggttggtaaaaagttgcataaccgtcgtctcaatccaaaagagagtggccccacaccatacatgcggcctgattccttcacacgtgacgagtaggggttgggcacaaatttccccaaaaatcagccatagaaccaaacaagcattcactcctggggaagggagctttactcccggttgccaacccttcgtagtcctagttgaaataagcgggactaaagatgcataccacgtcaaaaaaacgcgtcggatgtgggattcaaactcaagatctctccctcaaccctcacgcgtgttacgaaaacggtatgaaaatttcccgacggtattgataccgtttccacaaaactaatataataatactatttttaccgatggttaccgttttcaaaatttagttttttttaatttctgtcagcatggcattgaagttgacactaaggccttgtttgtttcagcttaaagattattgtaatctagattattaaattagattactctaagctgaattataataatgacataaaataagctacgagttgtttatttctctggattattagagccatccaagggtagtaggtctttagccactcaatatttgaaaaaaagctctctagagaggattaatggattatagtaatccgggcttatagattataatattctagcataataatctacttgtttgtttcagcttactcntataatctagattataataatcctaagctgaatcaaacagggtctaaatagatgaattcataaatatggaaatttttcgaccgtttccgttcgttttcgaaaaataataaaataatgataccgtttccgaccgttttcatctctagtatacacatctgacttggatagagatgctttatttttaaactaaccctggaggcatctttactccgggttggtaacaccaagtggagctaaaaatatctttagtctgggttggtttatgaaccgggactaatgatcaatgtttagtccggattggtgttaccagccaggatgaaagatcctcctattttagtctgggttggtaacagcaactgggactaaagtgatgatctttagtccttgttgggggcctgacacggcctgacaattattgaaccgtggctaaaaatgatcttaaatcccagttagtgttcgaaccgggataactgtgatttttgtcgtggctaaagatattctttagtctcggatcctattcgaacttgggcaactgtgatttttgccgtccaagcaaagattagtgttgatatttcttaaacggcattactagaaatataattcccagcaatgacgaagaaatattcatggtatatttatggtcacaaatatgatccgtaagcgcacggatataccattttagcatttcaccccggagtattccaagtatcatatttgtttaatcccaagggaagatatgataagagagtactatgctaatagtttatatattacttgtatacatcaaggtctatgttggggttaagtaatttaaagggtaggtgacacacagaagaaagaactatgatactctcgctaaatataatctaagctaagtggaggaagaataagaaaagaattcattcttgtacttctaatatacaaacatctttagtctaccacttgttagtatacagtcgtacaaccaatactccctaatagtgccctcctggtgtttcgagagaccaccctgtattgtcgagttccttacgacaacctgtcatggccgtctaaccggggctaaatacggaggagtatcctccccaggaatttgtcttaggaatatatactaacatggaggaatacatgtactgagttgtcaccatcagcggcccacctctactgtcccgcagcatatatgcccagatagtgatacttaataatttagacaccacatctacattattaaatactactatatatcccccgagatgacatagatcaactgagtaatcggacactaaacccacaccattgcacctctctggtaggctagctacacaactatattgatacaagtataaaatgaagccggcactcagataatataaatggaataaaataccgaagatgtataaagaagaatattctattaattccataagtcttacaaaagaagagaggaaagctactagagacataccaaaattctcctgaagacccgaggactaagaatacttttataatttctactccactagcactaggatactactaaacttgagagagggagagagctcttcttcttgagtgtgtgcagagagtgaggatgtgaggtccttacatagggcagttatgacggttaggtgatgcaaaatgttcattctgccctccaactgtcgttgagggaggcatcctggacatccacaccccaaaacctgggatcaacggcggagatggggaggctggcccaaacagcccaattttcggcaggccgtctccctgttgtctcgtcagtccagaaggcctagtggatcgtgtgaattctgtgttctttgcgcattcatccataagtctggatctcgacagcgtatgattgattgaccatttactttctgtcgattcttctccatttatatgtgcttctcctacatctatgttagtagtatagtatatagtggaagttgatattttatttgcaaattatgcattgcaagcatagctagtctttattaattgagtaatattgatggtcgaaattggtcgataacgaccgtcaacaatcagttctctagtagtgattcttttcggtgttcgcctgcacgcagtaagctcgggttatcttttgggtattactttctccgtccaagaaaaatattaatcctatctatcaatccgaatgcatgcgtatctaggtcggtagttaggattaagtttttttttataggatggaaggtgtagatcagtgtttggcaatcagctcggtttttgtttcttgttgttttaacactttttctgttactagctaattaaatgaggatagtgttggagacctaatgaaggccgacgggttaggggtgaagaagggatactgtcacataagatttatccgtgtactccctccatgctaaaataagttaatgtaggtgtgttaacttattttgcacagaaaattccctgtgtacccctgaaagttcgcccaatcccttctatgcctctgagatttgctcattctctttcatacccctaaatttcagtttgaatcccttctataccccttttgttagttgaccattaaattcctatcataaagttcattttgccctttggtattattggtatttcttaacgacattactagaaatattcattcctagcaatgacgcagaaatggtcctggtatattttctggttacagatgttatccacaagcgcaccgatataccattgtagtatttcacccaaaaatattccaaggtatcgtatttttgatcccaagggaagataatatgagtagactatgctaatactctttatacatatattacttgtatttatcaaagtctaagcaggggttaagtttaatatacgggcacagtgacacgaagctaagctatagtttaacatctaccctatagttgaacaaatggttttactcattacacattcatcatgtcacacatccaacagcctaaaatcatctgagttacatccaacgtctcccagatcgcgccctccctcccagatccctccctctctcgcgcacctccctctcccttctacaactgccgcatccccccaacgcatcgccccacaaatcacgccgccgtcgccaccccttcctttccaatagcattccctttgcctcgccatcctgctgctcgtgcccctccgcccatcacactgatccgcaccggagtcgcagtcgccacccccgagcctctgcccatcgcatcgatccccgccgtccctccacccattgcacctatccgtgccgccaccgatgacgatctcgtccgcaccgcccctccgcccatcgcaccgatccgcgctgccaggccagtttgccctcgccgcccccgatgtacgccagggcgcccgcctccacgcccccatatcaccgtcggccggagtcgccgggctcgtcctcaccaagccgatcccctccgccaccgatagaaggtacaaaaatcctcctcccctaccagatgatttgtcttgctttgtattaatgggtgcatggactggtggtggtgcggctgtcaggctcttctattagttgcttgcaaatcagctattaagtttgaagatgtacacattttgtgattagtctcttgtgattaagagaaaattatggtgatttgccactgacactttaacagaaaattatggaggggattcttttgcagtaccagtgacatgagaaacttcagttggttcatgagatggagctgcctgactcccttctgctgggctggttttgaccctgaacctgttgtttctctgaaaaatgtgtcattttatttttagaatgaggggttgccatatttgcttgttatgccgatgtggacaagcttgtcctgttttatgcacaggaattattggtttatatactaagagcaaaattaaaatattttctacaattatatatacatagagaggctcgatttatgggcacaaacgtcctaataggtcaatttaatctctttttgggttaagcaagaactttgtattgatgggtgcatggactggtggtggtgcagccgtcagctcgctctgaactctgaggtggtttgtttttttttctcaggcgcttgcaacactacatcatttccagaacgccttcaccaaaattcactgcatgcaatcaggcgcaagggttgtgttagtgatatgccctaggggcaatcatagagatgattgtattacatactatgtttacatatttatccaactttgttccttgaaatagataactcattattagttaatgaatatgtgattctttcatgagactctttatgttgtttgttactatttctaaaagatccctgatcaaacatcatatatggaacaaatatggttaaatgatcagcacatatattaattgatgatcatgtctcatagatcatagtatctttactacttaaaaaatacgtggtggtgttggtgagtcctgtataatccaagggccgatattcctcgcaggatcctcccacagatcgaagggatcaaataacctcctgctgtcccgcaccacccccacctccgtatcgcactgtcctcacactgccccctccatcgcacgcccccgtcactcctccttcgtaccgccttcgccgctttcccagcgccgccgtcgcgccctcggcggctcctccgccgcgctgccgccacatcagtcgcgaccccggcagctcctccgccgcactgccgccacctcggtcgtgaaccccggcgcctcatccgccgcgctgctgccacctccgtcgtgaaccccggcgcctactccattgcctcatagcccctctcctcctccaaccctacggctttctcctccgtccggtgcaccgcctcttccatccccatatcctattcctacttcatctctccctaccgctgtcactgctcaaaccctaagatccgaagggagggaagagaacctaagatcggaaggggagggaagagaagagcgcataggcggtggcaacggcaacctcagcaggcatgctgtcgacttccatcatccctgtcatcctccaggtaattgattctatttttatttgatttgttggattgtctgtagaagatcgagctgctgctaactcaggatacatacacaaaaaaaacttatgccccaatcaagcatttgggtgcttggctgctattgtgctattgacggaattgaccattcttttttctcgctttgctgttcaaggatccaaacatatgttgatgaaaccggcatcacaggccaagcccaaggcaacagtggggtttgaacttcgaagacgatttaatccctgtctttggtgaaaacacaaatcatcatgattcaccatggtattaggaggtcttgattctgaaatttccaattttgcttttgttactactttatttacatagtttctgtgtagcttaccttatcgttgttaagtatggttgaactagccattttagatgctaaaattctagaagttggaggcttatccatgcagttttagatttggttggatggaatttggattcttcgaacattcttaaactatggctctttttccattaaaactttacattttccatattgtcttcgactgcttgtagacgaacaactacaggggaatatctcatgcttttatggaaccagctaatgtgagagtatcaaggggagtcttggccgaatccgttgctcatggctggtaggagtgaggagtacataggattccacactacgaggtaatctacatgcatgattcatgtgcctgttggtctctttgtctaaaatgatagttcattttggtataccacctgttggaataaatgggctaagcccaatttaattcaattaaaatctcaagaacccacaagtaatgttagagagaataatactaccttgaaaaattaggtgaaagaacctcaacttaaatatggtgatattggagattccctgttgaccggttgaggtgatggttggactgccacacacatgcgcgcgcgccgagtcggcctcggccgtaggcgtagcgaggcgaggcggccgaccgagccgagcctgcctgctgctcttccgttttgtaacagatgagaataaagtcaccattaacaaatgaaattcattgtgttgtagcctccacaacaaatgagagattcattgtgttgtaacctccacaacaaatgagagattcattgtgttgtaacatccacaacaaatgagatttatttgtgtggtaatggagatctctctctctatatatataaggatgtgactacacagctagtggtagctgtattgtctaaaccagctgagaccctatccacctatgcttcaaataaaaatttatcttaaactacttatccgatctacgatccgattacaccgttgtgttcgtaacaattaaatctttataacaagatctcacatgattatattttgatgaaaaaacataaattacttttatagtatatctaaattacttttaaatttcactaaattacttcttagacatataaaaataaattcaataaaacctaaaattaatttgcatatattatagaagtaacttataacaaaaaagagtgtaactttaatgtatgtcttttttcattggacgtgactacacagctagtggtagctggtttgtactccatctagtctctcctttgaacttgaaaaatgcaatagtatgtatccttttttaatctctttaataacttatatcttttaaaaaaggtacactgtgggcaaatgtctggtagtattcatttcaaaaaaaagcttatatcttttagatcacatattacttctaatgtcgtgacaaagttacttccattttgttttaagttacttttataatatatgtaaattacttttagaccttattgaatttacttttatatgactaagaaataatttagtcatatctaaaagtaacttatatatatatgataaaagtaacttacatatataataaaagtaatttataaatataaatattttttcatcgtaatataatcatgtaagatcttgttgtgaagatttaattgtaacgaacacaatggtgtaatcggattatagatcggataagtaatttaagagaaaactttatttgaataggaaaaagatatacatgtctattgagaaacaaggcacacactgtgtcaatccttctcattgtgccattacagcgcggccacgtggatggacgataggcgcgatcgatcggctatgagatgcgtcgcgtgatacgactaaagcgagaagcctctcagtttagattttacgtatatataacgcaaggcagaggctctcaaagtgtgtgtcttcctcctgcattgttccttggcgatactctccttctgttcctgcgctgtctctctgtttccccggttctgttcatcccgcgcacatgggtgattggaacgagcaggtgcctccgaaactccgtccgcttgagaacctgcacgggtaggcgggcgatcaagtttttgagtagcgcttcaagcgcgactactctgcatcatcttcaccaacatgtcgacaaccggcgacaacaacaacactagagacaaggaggagcctcccgtcaacaccaacggaggcaatactgtctcaaactccagcggagggccattttcggggtataacgtttcactcttaccgttcgttcttcgtttcctacaactgtcggtcgcaatattattgcgttctcttgtctatgttgatgcttattctatattaagcacactcaagttgtatacatctagcactgtcactagatctactcatattgcaaatgtcatgtttattgtcttaatattttggattaaaatatgtcgaattatgaccaaatttccaacaatccaaaaacttgataggtctttttcggtagttggctttgctgcatcactaaaaccacatgctttcgatggttcaaattataaaagatggaaagcacgtgcacttttgtggttgacggcgatgcaatgtttctttgcttcacgaggcaaaccgagtgaaccgcctctctccctgaggaggaggctaagttcgaggctgcggattgcttgttccgtggagcattgatcagtgtgcacgccgacagtattgtggacgtttatatgcacatgccttcagggaaggacatgtgggattctcttgaggccaagttcggggtttccgacgccgacagcgagctgtatgtcatggagcagttctatgactacaacatggtcgatgaccgttctgtagtggaacatgctcatgaaattcagatgctggcaaaggaacttgagaacaacaactgcgagttgccggacaagtttgtggcgggtggcattattgccaaattgccaccttcttggtcagactttggtacttctctaaaacacaagaggcaagagttcagcgttactgatctcattggctctttgggtgttgaggagaagacgagggcaaaggacaaccgggacaaaaagatcgagggaggttctagcgctaatttggtacagaagaagaaccctcacgcatcccacaacaagaacaagaaagtcaaacctgacgtcaaacccaaggctacaatcaattttaagaataaagacaagggaaaggcaaaaggagattgctttgtgtgtggcaagcctaggcattgggccaaggactgtcctgagtgcatggacaagaagtctgcaaacatggttattagtgagggcggaggaacatcggggtatggtaaattttatctacagttctctctgtctgtcactcccctgattggtgggttgatactggtgctaatattcatgtgtgtgctgacatttccctgttttcttcttatcaggtcgggagaggttcctccttgttgatgggaaacggatcgtttgcggttgttcatggtgtaggtacgatcgatctgaagtttacttcgggaaagatcgtgcagctgaagaacgtgcagcatgtcccttcaataaagaagaatctagttagcggctctctactgtgtagagatggttttagacttgtgtttgaatccaataaatgtgtcgtatctaaatatggcacgtttattggaaaaggttatgacagcggaggcttgttccgctttatcttggatgatatgtgtaataaagttgtgaaccatgtaagcgatgatgatgatgagtccaatgtgtggcattcgcgactttgtcatgtgaactttggttgtatgacacgcttagccaacatgagtttaattccaaaattcactttagtcaaaggctctaagtgccatacttgtgttcaatcgaaacaacctcgcaagcctcacaaggcatctgaggtgaggaatttggtaccactagaacttgttcattccgatctgtgcgaaatgaacaacgtgttgactaagggggaaagaaatatttcatgacactgatatatgattgcactagattctgctatgtgtacctattgaaaacaaaggacgaagcattacattactttaagatctataaggctgaggtagaaaaccaactagaaaggaaaatcaaacggttgaggtctggtaggggtggagagtatttttccaatgagtttacttctttatgcgaagagtatggaattattcatgagaggacgcctccctattcaccccagtcaaacggggtagccgaaaagaagaaccgcactctaactgaaatggtgaatgccatgttagacactgcaagactttccaaggaatggtggggtgaggcaatattgactgcgtgtcatgtcctgaatagaattcctactatgcataaagaactaacaccattcgaggaatgggaaaggaagaaattaaatctccctcacctgcgcacatggggctgtttggccaaggtaaatgtatctatagccaaaaagcgtaaacttggaccaaagaccgtagattgtgtgttccttggttatgctatccatagtgtgggatataggttcttaacagtaaattctggagtacccgacatgcgtgttggtataattactgagtccagagatgccacattttttgagaatgaatttcctatgaaaaatgcacctagcacttctagtcaagaacctattttatcccctgagcactttgtgccgatagaacacattgatcaaatgcttgaggaaaattctgaggaggataacattgtagcaactcaaaagagtaagagacaaaggactgcaaagtcttttggagatgactacgttgtatatcttgtggatgatactccaagaaccattgaagaggcatattcatctcctgacactgactattggaaggaagcggtatgaagtgagatggactcaattatgtctaatggtacttgggaagtcatcgagcattcatatcggtgcaagcctgtaggatgcaaatgagttttcaagaaaaagcttaggcctgatggtacaattgaaaagtacaaggcaaggcttgtggccaagggttgttgtcacaccctgaagttttcccccttttgcttgctttaaaaattggttaaataaattgcttgaagaaattatcttaattaacctagagctaaatccctagttaataaatgcacttaataatcggaaatagtgtggtggaatttttcttgagttccccatgctccaatgcattaacaggatttttagtggaattttcagagccttggaaataattttaaccaattaaaaatcactaaagtgcaattttaaatcccaggaaaaatcctttcttctttttcttttttttcttttccctccttttcctttcttgggccgtcggcccatccctctcccgctcggccttcctcttgttgggccggcccatgcgcccctccctcctctctctgggatgccgacaggtgggccccacctgtcggtcgtctcccacctccagccgttggagctggagctctaactgctgccgtcgaaaccgcccatgccgccgccgccgtttcccgccgttctccacgccccactccgcccgtgccgcgcgcccacgtcgccgccccactcctccgcccttcccgcccgcgcgcatgcacgaagtgggcgggattcattttgaatcccacctcaccgtctctctctcctccccatgtcgccggcggtttcggccatctccccggccacgtccgcccctctctcgcccataaaaaccctcccccgagtcccctccctcgtttcccccatttgccgtcctctcccacgccccctaccgcgcccgcgccgtcacacccgagctccgccgcttgccgccgccttcggccatgagccgccgccgctagagtcgccgccgcgccaaaccgccgccgccgttagcttcgccgccgcaagagctttcccggccgccgcctcgcgtcgccggaatcccactggagcgcctctcccctcgcgagccggtgagtttttccctcccctccatctccggccggcaattcaagctgccgtggtcgtcgtctcctctcctaacgcctctccatcttctcctagggtgtcgccgccgcccgtccgtgcctccgcgtcgccggtcatcgccgccgtcttcatccttcgcgccggccgccgtgctcacagtgaggagctcctctcctccctccttccctctgtcccgcacgcgctgccgctccctgcgctcgccatcgccttcgtccgccgccgccggtctgtgcgccgcccgccgccgcctcccacgccgctggttgccgtcaccggcgaccgcatgccgccgccgttcgccatgcttgccggccggcttgaagccgaggccgagcccggtggctgctcccttcaccgtccgatcggcttgggccgatccggacccttggtcccgtggaccggccgccttgagccgctgacatgcgggccccgcttgccggcgcccccttcctctcccctttaagccgctgacccgtgggccccacctgtcggcgccgccccccccttcgctgacgtcagccctgggctttattgcgcaataattaattaaggactttttctttattagtaaaaacacagtttatcttctaaaattcataagtaattcatccgagctccgtttaagtccattcaagtctcagtaaatcaagaaaaatgcaaagaatccattaaaaatggttttgtttcctgtttctgtagtcttatagcatgttttgcttgcgtgctttgtttgtcgcgtaggtttcggccgtttcgtcgatccgcggtctctcgaagacgttgctgaggtctcatcagttcgagagcaaggcaagtcatgcaatacgtttgatcatattgtacccaatttacaaatatcccgcatttctatgtaatgttgcattcttttacaatgtaatgtgggatgggtcctattcctcagccacatattggttaccctatgccattaataacttgggtatcaaaatgactagatgttggctaaggaaatgcttagccatgcttagttcaactagtacacaaatggggatcacattattacatagactttgtcttttggcatagctttagattggtgccaccgcaatggtattagttaattaaaatacactgaatggtgggctgtgggtgcatggttttgctggtcgcacccatggcagttaaggaccggttcacgggaaaccctgggagacttaccgtgcttaccacaagcgggagtgggtaactgcttgatctgaagtatagctcgaccctttcctaggcaccggtggcgagggtgggcgtgatggagttgggtcggccggggtgtccggttgtccagctgccggattcaccgtggcgcaagaggggaccgcccactgccttttgaggggtgggggtgaaaccttagcgtggtgtggatggttaggggagggttatgcggagggtcttgtcacgatttccccctttgcagtatcatggtgatacttcggggcatggcgacatgtgtggaatcgtgtcttgtgggtacagttgtacacctctggccagagtaaaactattcgaatagccgtgcccgcggttatgggcgatcaaccagattcaccgtgattagtctcacccctagtttagcttaatgaactggtgtagttcaggtggttggttcggcctgttgcaacgtggtgtagcgttggacagtgattggttaatattgattaattactacaactgttttactgccttcaactactacttttgaatgctagctttatgcaaaagaacctctagcctcctttggttatatcctgcatcatacctcctcttccggtatgacttgctgagtacagtgggtagtactcagtcttgctctcttttcccccacaccagagttgaagttcttctcagttggagccgtctcagagaggttggtttcgtcgctgccgtcaagggttgcctgtggaatggaatcgcccgctgcaggagtcaagtcttcaggcttagctcgcttttaccttttccgctgcatttgtaatcctttatgtttttgtaagacgtggatctgtatgtcaacaattatcgtttgtgtaccctggctggtcctggacaggggtttaatacacattcagcttagaaattctggttcgtgaatttctgggcgtgacaagttggtatcagagccgaccttgaccgtaggacaagccaactggaaacctaagagccctctgaacccctttttttttcatatgcatatgcccttttgcgcttggatttgtttcaggaaaatttggggttttgcctctttggcttgtgggaaaaatcttggtcgttcattcggatcggttttttttagctcagtgtagggttttagaaaaaaaaatctatttggggtttattcgacggtcagtcgggaatttgtcaggtgatatgcactaagtcgtgtctaggttgatgggggcaatttcatgcgtatcattatagctatgcatttattttatgcattaatttattgattagccagttgcatcagtatcctcatttgagttcatgaaaaatgttctatgcataaaaatcatcatgctcgagtatttatttgagtcatttgttgctttgtttaatttggatttgagcatgaattggttcctatcccttgtctactttagatgtcagtcctattcctcgatcgcaagcgccgctccgagcttcagagtcgccgcccttagctttattgccttcttagtctgtttgcttgctagttttctgtttaggtttgttgcttgtgggttagtcggcggtcgatatcatgtgtcagtggtatgactgcctcaattaggagttgcgtgcctctttttcagtgttttaatcaagattaagataattgcacttaaattcataagcaagattagtttctgagcccctgttttcttccttttctcatatttctacctatccccttcagatggagacaaggaatggttcacgcgactccaacaatgccagtggcagcgaagagccgatcgatggagcacgtgccaacggtgcatctgacaacaatccgtccccaccgcctaagaacccaacaattgctcaggtgttggacaatcagactcagatgatgacaatgatgatgcaacagatgcagcaacagtaccatcaggtgttgcaacaggtgcagcagcaagcacagcagcagcaacagaacctgcagtttggtcctccacctcctcagtccaaactattagaatttcttcgtgtcaagccgcccactttctcaagcaccaccaacccaatcgaggcccatgactggcttcatgccattgagaagaagctgaatcttttgcaatgcaatgagcaggagaaggttgcttttgctacacaccagctacaaggtcccgcttctatttggtgggacaactacatggtgacccgtccaactggggcagaagttacttggacagagttttgtcatagtttcaataaagcacaggttcccgagggaattgtggcacaaaagaagagagagttccgttccctgcaacaaggaaccagaacagttatagagtatttgcatgagttcaaccgcctcgcgcgctacgcccctgaggacgtgcgtaccgatgccaagaggcaggagaagtttctgtctggtcttgatgatgaattgattaaccagttgatctctagagattatgaggactttgagaagctggtggataaggctatccgtcaggaggagcactgtaacaaagtaaaccgtaagaggaaggcagctcagttcaggactccccaggggaagagtcagaagcctcgttccacgatgggacatcacggtggaccttccaccatgattatccggcagtaccgtccctaccacccgggtagcttcaacaagaaccaccatagtggcagtcacaacaaccgtgagcagcacagcctcaaccctactccgagttcactaaagattccagctcaatcagttcagccagctctgccagaacagcccaagaggttgggagaaaaacccgaactctgcttcaattgtaacaaacccggacacacggttggaaagtgctcgaagccaagacgtgctggacccaagttcgttcaggcccgtgttaatcatgcatctgcagaggaggcgcagtcagcaccagaggttatattgggcacattccccgtcaactcgacaccggcagtaatattgtttgattctggtgcaacccattccttcatttccaagcgttttgctggtgcacatgggttatctttagtgaagcttaagataccaatgcgagttcatactcctggaggtggcatgaccacaactcactactgcccatctgtgacagttgaaattcaagggttgatttttccagccaacctcattcttctcgaatccaaggacctagatgtcatacttggaatggattggttgacaagacacagaggagtgattgattgcgccagccgcaccatcaagttgaccaatgcaaaaggagaggtggtaaccttccagtctccagtgccgcagaagtcagggatcagtttaaaccaggctgctggtgaagaacaagaggtagcagtggagaaaaccactaagaagctggaggatattcccatagtcagagagtatccagaggtttttccggacgatctgacaacaatgccaccaaaaagggatatcgagttccggattgacttggtacctggaactgcaccgatccacaagaggccttacagaatgggagccaacgagttggcggaagtcaagaagcaagtcgatgaacagttacagaagggatacatccgcccgagcacatcgccttggggtgctccggttatctttgtggagaagaaagacaaaaccaagaggatgtgcgttgactaccgcgcactcaatgaggtcaccatcaagaacaaatatcctttgccaaggattgatgatctgtttgatcagttgaaaggagctactgtgttctctaagatagacctgcgatcagactatcaccagttgaggatccgcgaggaggatattccaaagacagcattcatcactcggtacgggttgttcgaatgcacagttatgtctttcggactcactaatgcacctgccttcttcatgaatttgatgaacaaggtgtttatggaatttctagacaagtttgtcgtggttttcatcgatgacatacttatctactccaagtccgaggaagaacatgagcagcatcttcggctggtacttgaaaagttaaaagagcaccagctatatgccaagttcagcaagtgcgacttctggcttaaggaagttcagtttctcggtcacatcgtgaatgctcaaggagtagctgtggatccagcaaatgtggagtcagttaccaaatggaccccaccaaggacagtcactcaagttcggagtttcttaggacttgcgggctattaccgccggttcattgagaacttctctaaaattgctaagccaatgacacagctattgaagaaggaagaaaagtttatctggtctgctgaatgcaataggagttttgaagaactcaaacgacggttggtgtccgcaccagtcttaatcctgcctgatcagacgaaagatttccaggtctattgtgatgcatctcgccaggggct

SEQ ID NO: 13692 - DNA, 3352 bp, Oryza sativa
tgttgcagaacagtgaaatgggctttacggaataaattgttgtctaccgtcgttattgctttccttccgagagttccctttccccgtagtctcccttcatggcgtgattcaggtaccccgattgggcgaaggtcttcgataaattctacgcaaaattcgatgacctcctctgttccataacccttggcgatgcttgcctctggacgagcacggttacgaacatacttcttcagaacgcccatgtacctctcgaaaggaaacatgttgtgtaggtacataggcccgagaatacggatctctttcacaaggtgacaaagcagatgcgtcattatattgaaaaatgaaggtggaaatatcaactcaaaactgacgagacattgcaccacttcattctgaagggcttctaatctatccggatcgatgaccttctgcgaaattgcgttcatgaatgcacatatctttgttattgttgcccggacattgtctggaaggataccccttattacaactggtagcagttgtatcatcaacacgtgacagtcatgagactttaggtttgtgaacttcttctccttcgtgcttattattcgcttgatattcgtggagtatccagacggtacctttatgctctccaagcattcaaacatactttccttctctgccttgctaagagtgtagctggctggactcaagtaatggcttcctttctcctttggttccgagtgaaggtcgccgcgttgttccatatgcttcagatcattacgtgcttccagtgtatctttcgactttccgtatacacctaggaagccaagaaggtttacgcaaaggttcttagtgaggtgcatcacgtcgattgcgtggcgtacgtccaagaattcccaatatggtaactcccaaaatatggagttctttttccacatcgccgcgtgaccatcttcgctctctatatgctggcttccaggcccctttccgaacactactttaagatctttaaccatatcaaacactgttttcccgctgcgatgtttaggcttcgtacggtggtcggccttatgttcgaagtgcttgcctttcttccgtaccgggtggtttgctgcaaggaatcgacgatgacccatgtatacaaccttcctacagtgcttaagatacgtactttctgtttcatccatacagtgagtgcaagccttgtaccccttgttggactgtccggataggttgctaagtgcaggccaatcgttgatggttacgaacagcagcgctcgtaggttaaactcctcctgtttgtcctcgtcccacatggggacaccttccttcttccacaactgtttaagatcttcgaccagtggtcttaggtacacgtcgatgtcgttaccaggttgcttggggccttgaataataatcggcatcattatgtacttcctcttcatgcatagccagggggggaggttgtagatacacatcgtaacgggccaagtgctatggccgctgctcatctctccaaaaggattcatgccatccgtactcaaaccaaaccgtatgtttcgtgcgtcctttccaaattctttaaattttctgtcgatgtttcgccactgcgaaccatcggcggggtgtctcagcatcccgtcctgttgacgctcttcagcgtgccatcgcaacattctagcattccccttgttcctgaacaaacgccttagccgtggtattatagggaaataccacatcaccttagcaggaattctcttctttgttagctgcccgtcaacttctcctggatcgtcccgtctaatcttgtatcgtagtgctttgcaaacagggcatgcttctaggttctcatactcctcaccgcgatataggatacaatcgttcggacatgcgtgaatcttatgaacttctagtcctaacgggcagactatcttcttagcctcgtacgttgtctcgggcaatttgtttccccccggaagaatgttcttgacgagtttcaataaatcgccaaatgccttgtcactaaccccattttttgccttccattgcaccaactccagagtggtatccaactttttgtgcccccgctcgcaacctgggtacaacgaagttctgtggtcctccaacatcctgaccaatttatgggcctccttttcactttcgcagtcttccctggcgtcctgcaacatctgaccaagatcatccgcaacgtcgttaccatcagcagctatttcctcctcgcccgtttgatttccttcaaatccaacatactgagcaaagtccggaatattgtcgtcttccactttatcttcttccatttcaacaccttgctctccgtgggatgtccaacaattatagcttggcatgaaccccgactcaaacaagtggaaatgaatagtcctggatgcagaatactccttctgattcttacacttattgcatggacaacaaataaaacccctttgcctgttagcttcggccactctcaaaaaatagtgcacgccgtcaataaactctttggaccgctggtcagcgtacatccattgccgatccatctacatgagtcaaaaaaaccgcacacaaataattattcttacaataatgacagtcatacaataattataagatatctttattcatacaaaaatcataaaatattacaccaaataattcttaaaaactatttgtaaagttttaaactaattttaatgtgttttacttcttttaattttcattttagtttgttttctattatttaagattaactttcactagagttttccttctcaactattttataaaaccttgtttagcaaatgaactaaatttctatatattctttcttccccacatacattttctctctcatcaacttacaactaaattttggagacaaaaaaagtgtgcaaaacataggtgcaaatgtagtatgacaaaaaaaaacattggaggatgaagttgcaaaccttttaggcacctcgatttgtatgtaatcaccaaaataaattcaatagaaattttggcatgacctcccctcttttttgaagaaattttgaagcttgctcgggcagctggaggaggaagaagacatatatataggggtgggactttagtcccggttggtagcaccaaccggggctaaagatcaccgagatcattagtcccggttggtattaccaaccgggactaaagttaagatctttagtcccggttggtgctaccaaccgggactaatgatcccggtgagccttagccccggctggcgctaccagccgggactatcgtcccacccctatgtatatgtcttcttcctctaccagctgcccgagcacgcttcaatatttcttcaaaacagaggggaggtcatgcc

SEQ ID NO: 13693 - DNA, 7939 bp, Oryza sativa
agcccccttatccgatgatgtgaagaaaattcttgaagatatctcatcggctagaggcatcatcgttagacagcttagtggttgattgtggctcaattaggactcggctacatgaggttcaagctctgatcccagatgagctagccgatatccttactccggccgtatatctcgagcaacatcaattcaagctagagaaagccaagctgagactagctgaacgtcgggagcgcaaagatatcgaggctacaattcaagccaatcgacagcttgttcatgaagagaaggccaaacttgatcagctatctgagggcccgatcaaatctaatattgatcggctcgaaactcgtaagactgagctcttggcacaacttgaagaatgcaacgccgagctggacatggaacataaaaagctagccgatctcccaaattctgttgaagagcagaaggcaagactaaaatcggctatcaaaaatgttgctgatctgaccaagtttttaaaagtcatccctgtaaccgatgctcaaggtgcccatgccattgaagaagtagaaaaaatcaggcaaagagctatttcagctttccagcaatatttgtcttagtgatatcttatgtaataggtcttagaaatttttttgcaatcggctaagaaactctgactctttatgtaactcatctcaacaatctttaagccgatttaatatgaccccatatttggctcaaaaatatgcaatttttcatatatatatgtgccccccctaattttacaatgtcacaagcattgataaaattataaaagcggctaagggcgatacaacaatatcggccattatacatcggcaaaccataaccgattacaatatgaaaaacaactaagggcgatataacaaaggaggaactgattaaacggcttgctgattatcagtgatcaagggccgataattcgggaaagtacctccttgaagataaaccggtcccgtagtctgatagtcagctattgaaccatcaaccatcgacttcaccatgtttgacaaagtattgactaatatcccagattgattgatcaaagcatgatgtacggcatagtctacctgatcttggaagttattaaactgtagctgtgctgcgttactaacttggttaagattagcacctttaaatccctgagaaccatcaccttgaactccttgagagccaataccttgaactccttgagagccatcaccttggtctcattgaaaaccatctgcagcacctttatcagtcggttgagccgagccatctagagcttgtttcacttctccatccttagaagaaccggtcccaggaacatcagcaactacctttactttgtacttctgaactaatgttcccttgcgagtctccgtgaatgagctcaagaactgattccgtgcttactgcatcattgtatcaagatctttttgctgctcaagtgtcaatttatcaaaagtgatgggcacaatgttggcttcatcaatctcagatagacccagcttcaggatcttttctttaacagagccaggaccagccgaggacggcgatgctactagtttctcggccatgaggaaagctgctgttgtgattctgacttctgataggtcccaccaggcgtgccaaaagcgtgttgacgtaaaacacgaggcctgggagatctgcttaactctagtgcaggtccaaaactcgccttcgggtatgctagcgtaccagttgatttgatcctgcaatcaacaagaaacaaggacaaagaaaccgtggttaaatccataaacgatagccgatcggctaggtgccgatgacatattatttatctttgagccgatgtcatatatgcatcgatcggcaagtatcaataaataaaacagaactaaatctactcgatcggctgtagatattaacgatatatgatccttatatcgatatatacttaaaaccaagtgattgggatagatcggtcgccatgccgagacagtataaatcacttagatcgaaatatatattaataatgagattatatatattcatagcatagccgatcagatagatctagcatgtatcgactaatactccgatacaactctatactaagatatcaaagcaaatagaatatatcaaacaaaagcctaatatacctaaatgcaacaagatcttaacataaagggcagatataacatatcaacgaagcatatagagtaaaactagttaaatcaggtaagatcggctgaaaccccgatgctaccctaatcgtcaaccagaaggcaggctagagattgatattctaagcacgacttaatagatcaaactcaactgatgcagcattaagtatgaaaaaaagaacaatatctagacaatcaagccactggatgcttcatagagtggtaaatatcctatataatctaagccaacgtcactatttaacctaatcggctgccttctaccaacagatgttagccgattgtaggttagataacaatattactgaagattatataagatatatgataactcgacaaattacataaacaagattagagtatcataaagatggaagcactaatcccgagaacgcaagctgccataacaagtttacctcttgttgaagatcgaaatcgatgcagctcaacccgaaagtaagaacttgtcgaaacaaaacgaaagtaaaaagagtggcgatgcgccgagattgtattgaacgtgtgttaaattgattacatggggctcggggtctatttatacccgagaattacaaaacatgtccgtatcggacacgactcttatctctaacaaactctaagataccataagtctttgcggcagacttttgcccgaatatatctctaaggaaattacataaaatatcctaattaatatatacaattgccttctcaagactctatccatgtgtggcaatcatcacgaagcacattaactcaacccgatgatgtataccgagtcgtattgtcggaatcggctgtatcagcttacccaatctgactcggactcagccgatcctgattgtagctgatttggattccagccgattcttactctgttcccgaatcgatcttcgtctttgattccgcttcgatctaatcttcatcttcgatactgacactggtggagaaaccctttgtagtcccggttcgtaacccccctttagtcccggtttccaaaccgggagtaccaatccgggactaaagatcgctatctttagtcccgggtgaaataaccgggagtaaaaatcgatctttagtcccggttggtaacaccaaccgggactaaagatcgagctaaccttttttttttgcatggccctgttgctgcatggtttatatatatatatatatatatatatatatatatatatatatatatatatatatatataaaccatgcatatatatgtttcaatacatatatatgcatacatatatatatatatgtatatatatatatattatattatattatatgtatatacatgcataatatatatgtatttatacatatatatgttatgcaaatgcatatgtatatagatatatatatgaacaaaatatatttacattatagaaaatgtgtacacatgcatatagaaacatatgtagtcatgtattaattacaatccattatatgtcctagctagctacgatttcgacgtagtagtactcgctgctagctcagaagctaaggaccggtgaattgtgtttccgtcgtagtagaattcacccttgggatcaaggatttcttcgttgatgaatcccatgagttgttcttgaatcgccgcgataaattccttgtgtgtggtcaggttatccctcatgcgaataaactatatgaatgtatgaaattgattagtaattaaacaagaaatcgctacgtaatgaaattttgaatttatttgtacatacatcgagctctcttgtggtgatgatttggtctgcaaggcagtggcaatactcgcacacgtaatagccgcacaagttagttccctgcttttgctttgcgcactacaaataaatgacaaacaacgagagatctaattaatatacacttgtatgtatttgaatcggagaaatataaatgtagagcatgtgtactcacaggaaatttgaacttccgcctaagtctttctctccatttgccgcggaccaaatgacggaaccgataccaagccctacatggagtttaaagctatgattcgtagtagcaattaacataacaagattttcttaattaacaaaggaacttatgacggtacctgtctataagttcgaaaaccttgtcaaacgtagactcttttttatccattgagtcatatacgttgacggtgtaggcctccaggtcgatgagtaaaagcacccagtggaatctgcaatgtgcgtgggatgcattacatatgaaacacttagcaagttcgtacgggaatgaaatttggtatgtaggaagacagtaaaattaaactaactctgtgttgtatggcaacagtatgaacgtcttgtaatgctgcgccttcaggagatggacgagattgtcctctgtttcttgtggatattggtcgagcattgcgacgtttactttccgagggtcgatgaatccagtatcgaaaaccctccgccgtcgggccctttgaatctccattctacaacgataaaagggagtatattattttctatggtctacttatatacaaggacctaattaattaaaggagacatatagtaagaaatctaactgaacgatatacttacaaaatccagcaactcataatagagacgtcgagggcgtccagctggtatagttcgtagattcccctgaaattgatccagagaatgtcatctccttgcaagaagtccgtgtccctgatcctcgctccgatcatctctctaccggtggcgctcatctccatgtacagctgatggaacttgtacatttgtgtgggtagggactgcagcagctcaggcttgacaagaggtttaccgagttcgtacatgtatttcacttccgccttttcgattggtgcgactcctagcaattgatccgtagttagaccggtgtcagtaataaattgttctatcgtcatttctttaccggtcaccaacggctcgatctcctggtttggttgctctccaagctgagggactagtttggactttccagaagatgctttcttcagcgttcgctcatagtccgatagcttgatggtctccttgacagatgcagacatacccctgaagaagttcctgacactggggtctataggaatcttcttttctggacttcgaggcttgaattgtctcttgacttctgatgcaacgtaagcgtcaagctcctcttgcgtgcaatcgtaccccgggtccttgttcttggcggcgtcaactttcgccttcttcgttgcccttgtgtgggcaggcggtggagctgggggggcccttgactttgaaggtgccggaagtggagcttgcgggggagtaggtgtaggagcacgaggaggagtcggtgcaggatcctgaggaggagtcgatgctggagcctgaggtggagacggtgctggcggagcatgaggaggagacggtgtaggatcctgaggaggagatggcggagccggaggagatggtgcacgagacgccgcttgtcgcccagggaggatgatgtaccgcctgcgccatagaataatggcatggcatgtgtctcgtagatgcgtctcaccgtctcctccagggtaatccagctcgaggtcctcgtacgcgccttcgaccaactcaacttcgaccttcgagtatcctgctggaatcggcctgcagtggtaagtacctgaagggtccgttgggatggccatgcccgacgccaccttcatgttgtgagagattatttattagtaatcaacatatataagcagcaactagcagaatggctaaatcttacctttattgataagttcttgaaaggaatatgcagctcacatggtgtccgctgagtgatgtcatcaacgggacaggtcgattcgtcctgtgtttgcatatggcgtccatgctctgtgatcctacctgccccgttgaggcgcagctgctacggtttcctgacgggctcaccattgcaggaggaatggtcggctggggatcatgggaccgatgtgcggccatgcgttcatcaaccttccttgccacctcctcttgcatgttgagttcgtagctcgatacccggaactctaggtctgcaatcttcgcctcggtatctctcttgctcctcatccgactcctgtacgtgtggatgtcctccttgaaaccaatcttccaaggaatcacccatttccctcgagttcgtcctggatgctctggagtctgcagggcgagtgtcagctcgtccctatctctgtctggtcggaacgtgccctgagaggaggcttccactgcatctgttagtcgtcgcgcagcctctcgtatctgatagccgaagaccagtgagccatcagctgggttgagcgttccaccgtgagcatagtaccagaacttcgatcgttccggccaattggctgttgccggttcgatacccctctcaatcaagctagcctccatctgctcccacttcggcatcgcgacgctatagcctcctgaccccaagtggtgatggtacttcttcttggcggcattttctttgtttctttccatcatcgcctgcccttgttcacctgtcttatatgcaacgaactcgtcccagtgatcccttagctttgggaatgtgtcgaagttcggtgtctgccccttcagtatatacttctggtacagatctcccttgaagctctgaaactgttctgccattttcttcagagtccaccttttcactttgtcctctgtacccgcaggaagggtgaatgtctcgagcattgtggtccacagcatctctttctccgaatctgggacaaagctctcatgatctccgcgtgcccttgttcttcgccagtacaccgtactgacaggcacgttatcccgcacaacccaaccgctgtgacgtacatagttcttggcggcttcggccggggcactggacgtccatcttcttccacttccgttatgatgtgccgaccctcaagcttcttcgctgcacctcgttgcccgggcctcttcgtccacgagggttgactatcactagcctcctcgtcgtggttcccttccacatccctttccacgtgcccttgttggttcccctccgcatccctctccacgttcccttcttggttcaagtactggtttggatcctcgtttccctcttcttcattccagtactggctgcttccctccgcgattgtatcgtacaatatctgttcctcatcgcggtcagccatctgttgatacaagaaacatctgctaagtcacgagacatttatgttttaacaatctaagtcatgtatgctaagtgtaaatgtcgtacattagaaccctacacaaccttacgtgctaagtctaattacaaatcgtgacataagctaagtctaggtgacgtatattatacaaccctagctagtaaataattatatactaagtctaattacaaataaaataatcttatattaaaactcaaataatattacatgctaagactaaaatagtcatgtatatgctaagtgtttcgtgcgtatatgctaagtctaattaagactacaatagtcaattgctacttgtcgcaccaattccgtagtcaataattacataccaagtctaattacaaataaagtaatattatattaaaactcaaataatattacatgctaagactaaaatagtcatgtatgctaagtgtttcgggcgtatatgctaagtctaattaagactacaatagtcaattgctaggagtcgcaccaattccgtagtcaataatgtcatactaagtctaatttgcaataaaataatcttatattaaaact

SEQ ID NO: 13694 - DNA, 1120 bp, Oryza sativa
tggatgggctttagatttcatcggccggataaatccttgttcttccaaaggtcatcgatttgttttagtagctacagattattttacaaagtggacagaggctgttcctctaaaaaatatgacccataaagaagtgattgattttattttagagcatattattcatagattcggcataccacaaaccttgacaactgatcaaggatcatcatttatgtcacatcaagttcgtgaatttacggaatcttttaaaattaagttgctttgttcatcaccatactatgctcaggccaatggacagaccgagtcaagcaataaaactttaattaggctgataaaaaagaaaatagaggaacatcctaaaagatggcacgaggttttgtctgaggcactgtgggctcatcgtatatctaagcatggtgcaacaaaggtaacaccatttgaattagtatatgggcaagaggccattttgcatgttgaggtgaatctggacgcccttagattggccagacaaaataatttgtcggcagtagattatcacaacttaatgatggacggaatagatgaggttagtgatgaaagattgaaagctttgagagagattgagaaagataaattgagagtagctaaagcttacaataaaaaggtgaaggaaaaatcgtttcaaattggagatttagtgtggaaaacaattctgcctgttggttcaaaagataataaatttgggaaatggtctccaaattgggaagggccatatagaattgtagaaatagtccccgggaattcttattttgtgcaaagtctacgaggatataagttgcctagagcttttaatgggagatatttaaaaaggtactatccaagtgtttggcaagatgcttaaaaaatgataatactaccgatgcatggttttcatcgtgctgagaagtgtgtagtttgtttatcatcgtcccgaggaatatgtcgattatggctaattatagtatggccggtgtttaattatttaccatcgtcctgaggagtatgttaattatagctactgcaataattatgttggggcagcttagttttatttttcggacaataaattttacccaaaaattgacagccgatgatttta

SEQ ID NO: 13695 - DNA, 2033 bp, Oryza sativa
acagatcagtcgtgccatacaatcttgaattgcttaaaaaatacgaagcacacattaatgttgagtggtgtaacaagtcaaatctgattaaatatttattcaaatacattacaaaagggcatgatcatgcaaagatatactttgagactacttctaagacaggaaatatgtcactaaatcatgatctagctcctcggatgagatattagaatacatggatgctagatttctttccacgtgtgaggcacttcatcgcatatttgaatttgacatacattatagagtgccacctgttgagcgtctaacagtccatttagctggcaaaaattatgttagatatgagaaatgttcagatttgcgggcggtgctcgatagccctgctgcgaaacgatcaatgctgactgaatggttcgaagctaatagaaaatattctaaggcacggttgttaacatattgtgagtttccaaaggaatggtcatgggaatcatcatctagaacatggcgcgagcgaacaccaactgcaaaaataggtcgaatctattatgtgcacccaacctgtggcgaactctattacctcagaatgctcttgatgatagttaaaggcacacagaattatgctgatgtacgcacatacaatggcattgtttataacacattcagagaagcatgtgaggcgagaggtcttcttgaaggagataatgaatgataccttctatttgatgaggccatactatctgcatcttcgcgacaacttagacaactatttgtgaccgttattctttattgctctgttagtaatgtgcgatcattatttgataagtattggctttatatgactgatgacatccatagtagattaaagaatgcattagataatccacgatgcattattccacatgagcacttgcttagtctcctcctgcatgagcttacaattgtttttgcaaacaatggtggtaatataaaagattttgatttgccgattccaacatctgcttcacacattcctggtagtaatagattgattgacgaggagcttgcacctgatccccttatgatgtccttgcgcgcagattctttaatagcacagctaaatatcgaccagaaaaagatttttgacaccataacctcctcaatcagtgcaaacaaacctggatttttctttgtgagtggacatggtgggactaggaaaacatttctatggaacgctatgattgcaaaacttagatcacaaaataagattgtgctcgctgttgcctcatcaggtgtagcatctctcctactacctagaggtagaacagctcactcccgatttaaaattccaattgacattgatgaaactagcatttgcaatataaaacgaggaactatgttgcctgacctcctcattgaaagtgcacttattatatgggatgaggctccgatgacacgtaggcactgttttgaagcattggatcgcacattacgtaacattctttctgaaacttgtcctacaaattcaatcataccttttggaggaaaacctgttgttttgggtggtgactttagacaaatcttacctgttgttcctaaaggttcacgcctcgctgttattaatgcatcaattacaaatttagacctatggaaacatgtgacgttgttatccatgaatataaacatgagactgttaaatccaaccctaccagaaaacacaataattgaattgcatgaattcagtacatgggttctagctgttggtaacggaacattgcctatgattgcaaaagaaggtgaagctcaaccctcatggattataattcccgatgatcttcttgttgtaacagatggtgacaaaatcgttgctattgtcaacgaagtgtatccagactttcttgcatcatataaaaaccctacatatctatcttctcgtgccattgtttgccctgcgaatgcagtagttgatgaaataaacaattatactattgatttactcccaggagaatcaagaatatatcttagctgtgatacaatctcaaaatgctcagagcaaattc

SEQ ID NO: 13696 - DNA, 14814 bp, Oryza sativa
acagggctcaaaatactgattgaaaacgatgacggatcatgtggaaaccaaacaagaaatgttgtttataccgagatactttctgctacaatggaagcggtgtgccctcactgccatattgcatatattttatctctatatttacctacattcttggtgtcacattgggcatcatttcctattgcaggcttggccgctccatgcgtagctttccctcctcagctaattgcaatggcttttgtatataaattttggagtaaatatattgtactcacatgtagtatatgctgtatcactgctgcaccaataggctactagatttctatgtgctgttttctcacttgcttagttcattacagtgatgcttcatatttacataaactaaatatcttcaatatttatttgcagccttccaatggcgtacgtgcttatttcagaccttatgtatggggacactgataaacggatcaaagcgagggtatctaggcaatgggactaccatgatctgaatgatgaaacaaagatctaccacactgatcttgtcttgctggatgaaaaggttatagtctaattaacactcatttcttctttattaatacttacatacaaacatggtactaacaaggtgctttatatacacaatatgcagggcaatagcatccatgttcaaatctatccacctgccatgattaagcttaggactcttctacaggaagggaaggtttactactttgactccttctctgtcagatatgcaaacagaacatataggccagttacgaaccctttgatgatctcattcactaaatggacaaccttagaagaatgcattgatgcttttgatgattttcctgccataactttttcattgacaccttttcaagacgccccgtctcttgtggacagaaatgctttctatgttggtataacctctttatcccttttttgtcttcctacgtttacttcttatacattagtggtttattgtttacatatatcttctctttaaccagatattatgggtgtcataactgaaattggtgcaacagacactctacgcccaaaatcaagaaacacagaaactttgaaaagaacaatgcagatttgggatgcaaggtaagctacaatatagactgaaatttccctttgttataaacttcctttaccttatattatccacactaactattgaatcatttgtttggctctttgaaacctttctaatagcaatgtcaggcaagcatccgagcacaattttcactgatcaagacgcagccattgcagcagcaattgcttttgtactcccggatataagtcattgtctttgtttgtggcacatttatctaaatggttgtaaaaatcttggtcatgtaattcataagcatcctaacaagtttctaactgattttaagagatgtgtctatcaggacagatcagagtatcatttcaacaagatgtagcatgaattgttgagtgaatacaagtttgaggataacgtatggatgtcaaatctgtatgctttgaggaagaagtgggctattgtgttccgtgactcttttacaactgatatgacctcgactcaaagttgcgaaagtatgaataacgtcttcaagaaaagatttcataggaaacttggtctttcggagctccttgtagaatgtgataaggttgctgctagccttcgtgaaattgagttgcatgcatattttaagtcacgaaacttgaaccccgtaacttgcatcccaaatttacctatgttgaagaccgtagctgactcattgttgacggtcgtaagcgattagtttcaaccgtcaatattaccaaaatagaggagaactagttatgcttgcaatgcatattcatgttagaataataatattccactagtattaggtttactaaccttttacagagaataaccataaagtggaggagaatcgacatcgaatcagacgataaatcaatcggacgatgtcaaggatatacttatcaatgaatgggccaagaacttagaattttcacgatcaattgggccaaaattcacaagtctgcaaagagtagaagtctaggaggccgccattcgaaaatgggctggattggaccagcccatggctcagccgaacccccatttgctccgttggatgcagggtttggcgtggacgtccaagattgctccaatgacggttagagggcatttccgaccattccaactgccataaccgtcattgggaggctataaaaggagctctcatcctcactttctatacacactacaagcaaagctctagccaaattcatgaccgttccacactacacctacatgatgatgaagatgcctggtcctcgaggtgtcatatcactacggagcgacatcaagcaagccgtcacatgtgacaaagaaagttgcgagatggcccagacccgcgagatcactctcgctcgcaaagacatccgactggctgcgaccatggcaagcgaaggagaagtgcctgcgaccaagctgtcaaagaccgaagaaggcgacgacaaaactaagaagattccactagatccctctgatcctactaagactgctgtaataggcgctgagttagattgtaaataggaaagcgcgctcatcacctttcttcaaaataataaagatatctttgcatggaaaccatctgatatgcctggtattcctagagaggtgatcgagcactctttacatgttaaggaagacgccaaacccttcaagcaacgactccgccgttttgcacaagacaggaaggatgcgatcaaggaggaattaaccaagctgttagcagcgggcttcattaaagaagtccttcatcccgactggctggctaacccagtcttggttcggaaaaagacggggcaatggcgcatgtgtgtcgattataccgacctcaacaagtcttgtcccaaagatccttttgggttacctcgcattgaccaggtagttaactcaacggccggatgcgagctactcagttttttggattcttactcgggatatcatcagatccgactaaaagaatccgactgcttgaagacctcatttattacgccttttggggcctactgctacatcaccatgccctttggattgaagaacgcaggagcaacctaccaacggatgatttagaggtgtttttcaactcagatcggccgcaatgttgaagcttatgttgatgatgtagtcgtcaagaccaagaagaaggatgatctgattgcggacatagaagaaacttttgcgaacatccgcgccttcaggatgaaactaaaccctgaaaagtgcatcttcggagtactgtcagggaagctgctcggatttatggtgtctcgtagaggcatacaggccaacccggagaaaatcaacgccatcctcaacatgaaaccgccgagctcccagaaagatgtctaaaagctgactggttgcatggcggcgctcagccggttcgtctcacgactcggcgagtgggggatgccctttttcaagctgctgaagaaaaccgacaatttccagtggggacccgaagcacaaaaagccttagaagacttcaagaaacttctcactactccaccagttttggcctcgccacatccacaggagccgctactgttatatgtgtcggcgacctcccaagttgtgagcacggccctggttgtcgagcgtgaagaggaaggccatattcaaaaagttcaatgaccaatttatttcgttagcgaggttttggccgactctaagacaagatatcctcaggttcaaaagttattatatggtgtcttaattaccgtcaggaaattatctcactactttcaaagtcactcggtcacggtggtcacatcgtttccacacggggatatacttcataaccgcgaagcaaacggatggattgcgaagtgggccttagaattgatgtctttggacatatctttcaagccacgaacttcgatcaagtcacaagctttatctgatttcctcaccgagtggaccgagtgccaagaagacatgccggaggaaaagatggaatattggactatgcattttgataggtcgaagaggcttacaggcactggagctggggttgttttaatttccccgaccggagaaagattgagctacgtattgtggatacattttcctgtgtcccataacgtggcggaatacgaggcgctgctccatggattaaggattgcaatctctctaggcattcgccgactaatcttccgtggagactctcagttggttgttaatcaagtcatgaaagagtggtcctgtcttgatgataatatgaccgcttatcgacaagaggtacacaagttggaagataaattcgatggactcgagctcacccatgtcctccgacacaataatgaggcagcagacagactggccaattttggctcaaaacgggaaacagctccttcagatgtgttcgtcgaacatctttacgaaccaaccgtgcccagaaaagaaacaattgaagccatggatactcaaggcgtaagcatgattgaaaccgactggagagaacctctcataagatttttgaccaaacaagaactccctcaagacaaaaatgaagccgagcagatttccaggcgcagcagactctacgtcattcacgagaccgagttgtacaagaaaagcccatcaggaattctgcagcgctgcgtatctttggaagagggaagacaattgctaaaagatattcattcaggcatctgtggtaatcatgctgctgcacgaaccattgtcggcaaagcttatcggcagggtttcttctggcccacagctgtttccgacgccgacaaaattgtgcgaacatgtgagggttgtcagttctttgcccgacaagctcacttaccagctcaggagttgcaaaccatcccgctgtcttggccgttcacggtttggggtcttgatatggtcggtccattcaaaaaggcagtcggtggttatactcatctctttgtagctgtggataagttttccaagtggattgaagccaaaccagtcatcaaaatcactgcggacaaagctagagatttcttcatcaatattgtacatcggtttggggtaccgaatcatattattactgataacggcactcaatttaccggcggagtatttaaagacttttgtgaagactttggcattagaatttattacgcctccgtggcacaccccatgagtaacggacaagtcgagtgcgctaatggcatgatatttcaagggatcaaagcacgagttttcgaccgactgcgtccctatgctggcaagtgggcagaacagctgccgtccgtactttggtctttacgcaccactcccagttgggctactggccagtcgccgttcttcttggtttatggcgcagaagcaatgctgccaagtgaggtagagtttgaatccctccgatttcgcaacttccgggaggagcgctatgaagaagatcgagtggatgatatcaaccgactggaagaagcccgtgaaacagccctaatccagtcggctcggaatttacaagggttgcgccgttatcataatcggaatgttcgatcgcgagcccttttagtcggcgacctggttctgaggagaattcaaactacacaggatcggcacaagttatctgccttgtgggaaggaccgttcgtaatagctgaagtcactcggccaggatcttaccgactcaagcgtgaagatggtactcttgtcaataattcttggaatattgaacaccttcgtcgattttatgcttaggcatttcgtttgtatctttcctctttgactactaacttcaagttttttccttgaagctttcagtcggggggatgctataataataatggaacatgatttttatcaattcaatttgcttacttgatttatcattgccctgcttgattttttggcttagtcaatgaggactgaaagttttttaataacttttgcgagttctaggctcaataaggtttgacaaacacttttaagaaatcagaggctaagttagaattgtctagcacaacataaattcatcagtattgtacaaattgatcttccatcatcatcagaatcactgttactaatcagtgtcagttctttcatcatcggaattatcagacccagtcggccgaaggtcggcatcttggaatctctcaactacgtcagcagcaatcttgtcagcagctttttgcgcatcattgatgaggtcgagggctgtttcttcgctcgtcccgtctgcaaacccatcaatggcgtcggtatcgattttggggtataaagatttggtcatggctaatgccatgcttgctcccatactcccagcctccctgatattcttgaagtaagtatccagagcgactcttagcttgtcaaagatctcggaagcgtcaagtgtactcggaccggtgttattgaagaacatggcttggatgagtggggtagcggcattagcgactttatccctggctccttcaagcctattgatcttgtcaactaagacatcaaactgtgcctgggacttgattttgcgatctgcatcaatagattcatatcagcgaacggctataagaacatggggaatcaattatcattaccttcatcatcttttaaggccgagtccctctgctttgctaattcggccttgtctttctccagagccttgacctgcttctctaggtcggaaatcctagcagcttgcactgtaatatttttcggttaattgatatcacaaggaaggcttcacgaatacgtcagacagatatggtatttacctttggacgaaccactcaattcatagttggattcttgaagctcggagattctattcctcagatcatctcagtttttctcgcgagctccttgtcctcatgtagctggtttttagtagattcgagagttccaagatggggaactaatttctcaagagttgtggttttcgcctcattcctgagatgaatcctctgcaatatgaatttatcggcgtttcagcaagatatggaaggggacaattaaagctatgcacaaatggacttacatttacaatatgagtggcctggctgagtgtcttttttagcaagcatacttcttcatcttctttctgcttgcttatcacgatttcttgaggttgcatatcgtcgtcccaccacttaattaggatgggagggcgcgagtcttcagccgcctgtatacggggaatttcttcttcatcaccaatcattggtcctaatgtatccacgtataaaggttagacgattgattagagtcatttggatcaacacggtttcgggcaaggtgtttacccgtgatgatttccgaacggggacgagtcgactcttgcgtcttaacgggagattctggcgtcgggtcactgctggtgtcttgtttatgagggttgtctgcctgagctccaacttctggaatctcttggcttggtctagtgcccgactggttttctatcgggggctcctggttaaccccggctctagcctcggccgactcgtttccggttgggggttgatcaccagatcctacattatcggttgctggctggttatcactcggatgatcctcagcggttggctcggtttcttttaagtttgttcccgtgctggtcgggtcagagtcttttcccgaaggatctatatcagatggtttcctacaagtttggttatcagtattattactacactaggtacacatcaatgcaaggaagatcgttatgtgatttgtacctggaagacttcctgatctttggcactggatgactggatgtttttttccttggagtagcctgcttcggcagtttcttggttgtttctcggtctccaggctttctagcggtatcgccttcgtcgtcactcgacaccaacttccttttgcgcgaatctggctggccggctggatcggaggtatttggccgggcttcggaacggattttgggaccctcgctcccttgaccggtttggtggtggggtgatcggcgttgagtgattgggggatccgacttcatcaaagcaaattcctaggcgtaatatccttcattgttaactaattcaacaaacagacaagaccatattttgtgaaaggttgaagtgtttgattacataccggtggaggaggattgaaggcattgaatggcacgactggcagcaagtgcgaatagctgacgatgatggcatttgagaagatcttgtacatcctttccttcatgaccttaaagtcaagagagtctggatcttcacgatttggatcatgtttgctgtcaaactcaaaagctgtgcgggatctctctttgattggagctaaccggctttttatgaagtgccgcgtgatttgttctccttacaaaccctgctcctttagctttatcatgcgctccatcagttccactgcttgggcagcctcatctcctgtaggcaatgaattccatgtgtcttggtagaccgtagggagacaagaatactcgggaagggctggttcaggattttgaacgtagaaccagttggcgtgccagcctttgtttgaggtcttcaagggcatggagaagtatttttggcttagtgttcccctgagttggaaaccagcgcccccaacaacacatggtttgctcttgtttggctggggcttgaggaagaagatgcggcggaacaaggcgaaatgaggcctaatgcctagaaaagcttcgcaggcatgaataaaattggagatatgcactatggagtttggattcagatgatgcaagctaatcccgtagaagttcagaattccccggaagaatcttgaggttggaagagaaaatccgccatagaagaagtgagagaataccacgatctcatgtgtatcgggggtcgggattgcctcgccgaacgctggtcgccacccgatgatttccttcgccggaagaacgccgtgcgccaccatttcttttagattctcttccgttacatcggagggagcccactgactctcgaaactttctctctcttctgccatggatgcaagttgaatggattgatttggtccaagatataggtggaggggaatgaggaatcaatgcggtggacatgcggagaggtttcgtgggattttttgagaatggattggggcggattgatgaaccctagctttgacggtgcggtttgatactgtagcaaggagtggggaaatggcgagagtctcggcggggaaaacgaagcgccgcttggactttggtactttgttagggtatcgggagtgctaacaggcctaggcctgtacagtacttcagcccaatattattaccagcgtggcccattgtgatccttaggaacttaggcactttttgctttagcaatttgtgctcacaatgatgtgacccgatgctgctaaaatcctttttaatgcgattagataattctttagaattactacgatgcaaataaaaggtacccaacagaaaagtgttatactatttttgtaagcttttttaggctacaaaagctgtttgggttaatttgagatgactggtttattagtagtcattctcttagcatgttatatgcttattttgattatggaaagggttatagcctaggctattaaacttcttaattaccatgatctttatcatatttggtggatcattttaagagtttcctactcggattcttgtcaaatgtgtctttttgtggaccttttaagtgtttctcgctcgggcccttttcatatttttattcttgatatattcaagtccaaaagcagtcggctgggtattatactgaatactacgtgtgctcttgtcgtttgatgtttggttgtaaaaccgctcggttcttgactacctgtttagtttttcaactaactatatagtcgggggctatacctaattaggtgcatctactcgatgcaccatgttttatttttgcccttcacagtctttgattctagtactcggcaggctaaagcaggaagaggtgaagcactcggattattgttttttgttctgagatggctatttcggcgactgcaaaggtctcgggggctagtgtggagattatggataccccatatctacatggcagttatatttcagctgggtacagggtaccgaatatagatagaatatctttatgaggactcgggttagattctaaacttgtatgtcaaggaaatacccgggatcctagttggttacgattgtattttatctataatcccatattccgttgggatatggactgtattttgtaaagcggaccctttcccctatataaggaggggtccgtgtgcctctcggggcacgattttttcctagataatacgatcaataatacactcggcggaatcatccccggacaggagtagggtattactttttgaataagaaggcctgaacctgtataaaattcctcgtctccaaacccatccactttcctatcttgatagccaccccttttattattgccgaaatcttgcttcgacaaaattgattcaggagaggaagggattagtgagtagattggaagaaaaaaaaacggccattcatactcagtggtgtgtgtggaggaggaaggtagagaggtcaccagaagtttgagaaacggattcagctcatcgaggtagtttcatttttggcattaaacagtaagattgatgagggagatgataggatgggtgatgggaattagtggatacgttgctgctttcatggaggaaaaacgtccgaggattgaagacgaagcagaagcggtgtggccgtgcgtgggcagtggggagtggggaggatggcggcttgggttgggctgggctggctttggcctgtgtacagaggaaagagatcgttagaaacgagagatcgaagagaaagagaaacaggagagagagatatacagagaaattgaactaggctgcaataatctctactgctttaaaattccgtagtggtgatggtgactccaaccctaacagacacatgtgatattatctgttggatcgggatatcggacggtgatcccatcgcacgcgattcgcttttctggctttcctcccccgcgattcggtttcctcccccgcatcgtgcgcgtggctccgtcgcgtcgctgctgtctcagccggcccacgcacagctccgccgcctgcgtcggccccgcgtccccgtgtgcccccgccggcgcacgcgcagctccgtcgctgccaatggccgcgcaagcctgcgccgcgtccaccaccttcgatccgtcggccccgcgcacccgcgcgtctccgccgactcccgtgtgttggaattaatagataggccttaacccattcgaagattaattctttggtaaattacaaaaacccacctcatgggatgacatgcatgtggaatttagtaccaccttgcttattctaggagagggggacctccttaaaagagaggatgcctcctagccacttgaagcatgtgtggtggagagaagagggggaacatgcgcgcgctcgctcgctcgcctggcagggtagagcaggcggtgcgtgtgtacatcgaatggtccgcaaaattggctcctcaaccttgtgtagatgtagcctccttttgcagttttgttttgctgcaggaaattcggatttgttttgttttggaaacattctgaaaaatccggtgcgtgaaaacggcgtggggtccagataagttacgcgcgacttgtccggttcggttacgcggagtggagatcgtgcgggcgccctgatcaagcgacctatctctatataagccgagccgccgcattcacgcaacacacgcaaaatcaatctaggtttgcctcctactctgtgctgcgccgtcgctcgtagactactccatcctccggcgtgcaccggcgatcgggggagcaggtctcctgaacctctgccttcgacgtcctgcaccgggagaaggcggcaataaggtttttgcgaagcgcttcgcgtgactgcacccctgttcgtccgcgacggctcgccttcctctcctctcgcgtgctgcgtgccttcatcgacgcccgcaaccgcgagtagttcctgccgagtaaccggtctttccgccacctcggtacgtgttcgatatgttgcacatatttaatctgtttatgttttactgcttagtttacatgcgtagatctaatgatgcgttcatgctagtttatatctgcaatgtcatgatttatttatggaataaattaaatcattatgtgcttataatttcaacaccgtggacccgcgaggctccgtggcctccacgtgatccctcgcgcctccgccgactcggtcgcggctccccggctccgccgcctccgcgtgggcaagccccgcggtcgcctttgtcgcgagtcgccatctccgcgtcgacaacggccgaagcggtttccagccccgtgtggttcggttgcatgcacatgcatttgattcccatcctgcgagtgtaagtgccatgcacgggcgcaagctgcatgcatgcgcatggcactgttcatgacgaaaaaaaaggaagaagaagaagaaggagaaaaggaggcaagaaagacagcacgactctgcgctgcggaagcggttccgcatcgtgcgtaatcgctaagcggcctacgccggcctcgctgcgtgaggccgcccccgcgcctacggccaagactccgcgggccacaccctccgccgactcgcgcccggcgccagccccgtggggcgcattttgcctctggctcggccccttccgctggaccacgccacggcgcagaggctcgcgccggcggactctacagtccttccgctggccccgcacagctccgccggccacgcctgccttaaagccaagctccaccagccacgcgtggcttcgcgcggcacccccggcactcgccttcgcgcactacggacggcgctgcctccatcaagcaccgcggctttcaccgctagaggggatggactgacctccatttctcgcgggctctggacggtggtacctccgtcgagcaccgcggctttcaccgctagagggggtggaccggactccacatctcaagagctcaagacggtgtcgccttttcagtgtggtctttgctgagcatgagggtatccgatgcaaaatgcaggcatagatcaacaccctaagaagcaggggctggaaatcatctgctccccccgaacctcggagccagcagatgagggggtattgttgaggaataaccccatacttagggtgttgtataaactaatgtataaaaggactaaaatacatctaagaggatgttgtatatatgtagccaatcaagagcaaagatgtaattttcttttacatatgaataaaaggagtcctccaagggcaagtgagagggatctctcccccattccattgattctctttctctctcattcactcttgtggtcctcatagggctaagcttgggctccctcccattggagggatgctctagccatgcatgttggattttgttccaacacctacattgttacattgttcaatatatataaagaatatcatttcacctttttatgcaatatataaacgatatactttattaaacccgttgcaatgcacggacacctaactagtaagaaaggaaaaaagaaaagaaaaagaataaaaagagaggaaaaggaaggaaaggaggaacaagaaggataataggattttctggaaaaatagaaatttagagattttggactgttgaggaatttctctggattgagaataaatacttccaaaattgagctccactcccaaaactcaaatagaaaccaaataactctaattaacaaacgataaaataaatggcggtgtgattaatttatttagtcaaattaaacctttttcatttatgaaatttccattaagctattttaggcaaataaacacgaatgctaattttcaaaattaagtaaattagaagacacgacaaacaggacctgataaggtgacaatatgtagtagtgggtcccacctaggacccaccataatacccacttgagcattatacattgctgttgccctaaaaaaatgaaggaataaggatagctgtgaagtccaatcctatgggaagctaaacctaaggaattgtaaaaaaaatgtgcattccgatataccataggaaaaatgtaggaaatctgccatttgaaatatatttttttaagtttgcatcaactgacatcgggcctcatctagccgttagctttggagtgcataaatagctctagttagccttgtgcaccattctcccctgttctttctatttgctcatcaaccgtgaaaaaccgtggaagaagcttgctgatcctttcttcttgtcacgcccagaaatttgctaacccgaatttcaagcagaatgtgtattaaaatctctatctaggatcagccagagtagacaaacgacaatttgataaacagatccacgccttacaaaaataataaataattcttacaaacgcagcggaaaaacaaataagctagacttaatcttcatgaccaaaagcatagctttctccataaaccacaggcatcctcaacgtccggaacaagctcaattctcatagtccggaacaagctcaattctcatagaactcaccatctgaaccaatctctgtctctctctggggtggagaaaaataaagcaagactgagcaccaaccaccatactcaacaagtcataccaacggaaatgcatgatgtaagatattcacaaaggaatggctcattggatatttccaataaaagcagcatttataaatcatattttgaataagtaaaacaatatatgtaattaagcaatattaaatcatcactgttcaacgctaaa

SEQ ID NO: 13697 - DNA, 1569 bp, Oryza sativa
aatcatttactttcatgttaaatactcgcacaattacatcagctctatctgatggttgttggccaggttcaaatcgaatagtttctgcaatttcttgccacttaaagttacaagtgaatgtgacaaataaatcaggcgagccatacacacgacagattgccatcgcatcctgataattcatcaccatatatcttctaccgccggtaaagctagcaggaagtatctgacgtttgccaacagaatctccattagtaacacctctatcaatcgcatctacgattccttctacagtttcagcacgcaaatcagcttgatgatctattatgtattgtatcctattagcctcgatagtagaaaagatatcaacaacactttggtcactcagtcagccataacatgtgaaaggattaggctcatttagtctataatggataaggtatctgtagacctcaagcattgtagcatattttctaccagttccatcataatttctatatttaatgcctagatggaagccacgttcaccatatggaaatagcaaaggatactgcaaagccatatatgatggatgcaatgaaaacacttgatgcattccatgatctttatcgtgaacaagcacaccaaatttatattcttttgctgaaaaatcgcctactattatgctagctatttcaccacttgttggtaggttatactgcacatcatctttagcattgcagcctaatagcgaagagttattttttcattaccatgttcagagaggcggtctctagcatatctgaaatttttaacaagttcattattggtatcaaacatgcgtgttaaggcgctaacaatttcagggtctggtctatcagcattgtcgcaatcattttcgaaaatatttaatcgattttggatttcattgtcagaatcatagatatatagctgcgcaaatttaggtggtgcacctcgtgatggcagaagagtacaaattctgtgatgcacaacaccattgattttgaaaacataaggcgcattcccattattaattgacttgtcaatagctgcacccattgaggtgaaagcaaacatcgaattatatgatcgaatttgtctcaaaaatcttttggaacgtgcatcaccattgaaattcaataaagttgcaagcggttcaggtagaggacataaaggaggcaattcaattttgccacttttgcaacataggttgtaaactatttttcttttcgagacagcagagagggttttaactctctcttgataccaaaagatggcaccacaaaatgggcattcatatgtcggaggtcagtagtacgatcgttctgggtatgatgctgtaacatacatatttgattatgtcagtttttttccttaataaatgtaaaatgatttgcttttattagaaaaatacaaaccctttaaagattgaatgtaatccttatctgtctgggatgaactaccactggctttcctatttgcaactgcagtcaataaatattttaaccatatctaagttatgcagttctagcagcagtatactacaataaaaaaaacaccttttcagcatac

SEQ ID NO: 13698 - DNA, 1538 bp, Oryza sativa
gctaatttgacacttaatggattcacgggagagccaacagaagctaaggacattatttccatggagctaactattgggagcaaaactctccctactgccttcttcgtcgccgaggtgcaaggtaattataatgttatgttgggtcgtgattggatacatgcaaaccattgtgttccttctaccttgcatcaaactttaatacagtgggtaggtgatgatgtagaggttgttcatgcagatacttcggcttgcgttgctttagccgatgcctcagttgattggcagtatggtaatattcagtgtttaacaggcttagatctttctgattatgattatgttattgtcactaaggatggttttgtacccgtgtctataaagccggcttctgcagctcggctcagtagtgtgatgttataaatgaataaagaaagcaatttagattggttacaaaaacgtgcagagcaatatcggtcaaataagaacgatatttgggaggctattgatgattttgatgaagtagaaaaattaggacaaggtttttcgtcggctgaccctttagagaaagttgatataggtgatggcaccattcctagaccgacatttataaatcaaaacatgacagccgattataaagttaaagtaattggtttacttagagagtatgtcgattgttttgcatgggaatatcatgaaatgcctggacttagccgagagctagtagagcatcggctacccattaaatctgggtttaggctttataagcaaccacctagaagatttaattctaatatgtacgactggatcaaagaagaaatagaccaattattaaaggcgggttttattaggccgtgtaggtatgcacaatggatttccaatattgtccctgttgaaaagaaaaatactgggaaattgagagtgtgtattgattttagagatttaaataaagccacccctaaagatgagtatcctatgcccatagctgacatgctaattaatgatgcatcgggacatagagtgattagctttttagatggtaatgctggttataatcaaatatttatggccgaagaagatatgtctaaaacggcctttcgttgtcctagttttgtcggtttatttgagtgggtcgttatgacatttggtttaaaaaatgccggtgccacttaccagagagctatgaatttaatctttcatgatttacttggtgttatattagagatatacattgatgacatagttgttaaatcggaatgtatggatcaccatttagccgatttatgtttagcgtttgagaggatgcgtcagtatggtttaaaaatgaatccacttaaatgcgcctttggtgtgtcgtctagcaaatttctaggatttatagtacatgagaggggcatagagatagaccctgccaagatagaggctattagaaaagtaacagcgccgcagtgtaagttagacatgcaaaaatttttagggaaggtaaattatttgaggaggtttatatctaatttgtccggcaaagttaatgcatttacacccat

SEQ ID NO: 13699 - DNA, 37494 bp, Oryza sativa
aagtaacttagtgaaatctaaaagtaatttagatatattacaaaagtaatttatattttttttatcaaaatataatcatgtgagatcttgttataaagatttaattgttacgaacacaacggtgtaatcggattatagatcggatgagtagtttaagagaaaattgtatttgaagtgtaggtggatagtgtttattatagatggagcggtagctggtttaggctgtgtagccatgtccttttccgaagcagaggaggcgccgtgacagacgtttcagattctgaaacggacgaaggcacacgaagagatcagaagtattgagaactggtatgccttttattccccccacacatcacgatgccttcttccagcaatggcaaccggacctccgatccaagcccctggtcatcgactctacgtatgtgggcactcggagaaattcatgtctattattttgctataatcaagttttggttctggacttctggtctgagttatgcagattcgaattggattgcctgccggtgggtgaggtaactctaaaatcgtacgcacataatatacttgatagagtgcctaggtttccatccttctcgcagacaatttcttagcttggcttttggacttcctctgctgccgcagacacttcacagttcacaccgtcgtcccagtcaatttgcatccagtgttcatgaaggtcagatcattccttggattttcttttgtcgcacaacattttctatgtgatacattctcattcttattgctatcagagtttgatttttccacagtcatcatcgcttcccctaatctgtggagtaataatgatctttcatctaaaaaaagattcactattttttccttctgctgtcagcttggttttggtagctaatgttaatattcttttcttttttcaagttggctaataagtttagcaattaaatctttccctttatatatatcttactccctcctttaagtgtaaccatgattttttatgcacaactttgactgtccgtcttatttaaattttactattcatattttatcatcttataacaataaaaatattaattaaataagataaacggttaaaattaagcacggaaacttatgattgcacttaaaatgggacggatggaacttaaaatgggacggatggagtatatttttatcttgccgacagatggagtatatttttatcttgcccttaatttaacaatggatcatggctgatccgagatccctaagtatatatcttcgacgcagaacagcagaacctgcctgcttctcctgtagcttcactgttctcacgatacattgagtaagttgatcccaaaaaaaaaattaaatgattaatcttccattgcagcatactaatactgagcggtttttcttttgtaaacatgcatcgagttttacataaagcaatcatctgcattgcctttgctttcttttatgtttttcatgcccagttcttagtgtgtgcatctttaaaagaatggtagctatttggcatgtaatgttccacagcaacgcggctgagtataactagttttatgtaattgttcatgctaagcatctagctcaccttgattactaaaaagatctttgttcatgacccagagcaaactggctattgtgaaggtaatggggtgagtgtactgggttcttggatcaccagacagtctcatcatgagaaacgtcaagggcctaatttgtgagggtgtggcatcctcactgtcacgtccataaatttaacccaaattttcagataattttgtgtattaaacccctgtctaggaatcagccagggtacatacacaaaacaacaaattaatatgcagatccaaatgtaaataaagcgtaaaatatttacagaataggcgcttagtcctcacaccgaaaagaaagtagcaacagcagaaaaagatgatcctagcggggcttcagctccactccacaggcaaaactcaattggggtttgagccttagtcctctacttcgtcttcagctcagaagcactacacttctgaaaggggaaaaaatagtaaggctgagtacctccaccgtactcagcaagccacaccaatgatgcagacgtgcaaggggagacgaagggaggttttgtggctatttgcataaaggcagttgtaaaacattttattgagcaaaacagtaaaactattgattaattaaggtaatattaaatctccactgatcaatgctacaccatgttgaacaggcccaaccatcccacctgaactaactagttcattaagccaatttattaagggtgagactaatcacggtgaatctggtcgatcgcccataaccgcgggcacggctattcgaatagttttactctggccagaggtgcacaactgtacccacaaaacataatccaccggcatgtcactgtgcctggctagacacgtcaccatgtcaagtgattgtggcaagacccttcacataaccctcccctaacaatccacaccacactgatgtttcacccccaccccctaccccagagttgggcagttccctcgtgcaccgtggtgaatccagaagctggacaaccggacacctcggccgacccaactccattacgccctccctcaccatcggtgcctaggaaagggttgagctatactacaagtcaagtagttacccactctcgcttgtggtaaaagcactgtaagtcttccagggtttcccgtaaaccggtccttaattaccatgggtgcgactagcgaaaccgtacactcacagcccaccatcaagtcgtattttaattggataattacgaccaatgaaacatggtcggatgtctcgagcacgcagcctgtcaaaatactagatgtctaataacgtaattatcttattatgtgagctagtggtaattaagcatggctaaacatatataattctagctaggtcacataagtaacacaagctaagccaattatcaccaaagtttagcaaaggatggatatcaagtaaacgtggcacaagcgagcagataggtaaacccataatcccatgtaattagcaagacatgcaattttaattgcaaacaataaaacatttataaagtaggctcaatatgctcaaggggaatgtatgacttgccttgcttcttcaaacaatcttctgaactctttcctcgcgaacatgatcttctgaaacggcggaaactacacgctggcacgcaaaacgaggaaaaagtctaataaaaaccaagtaaatagtaaataaaaagtaaactaacatgtagacgtaaattttagatgaattttgcaagttgaatggcccaatttgaagttcgtatgaattagttatgaattttacaagttttgagccgtttaaattgatttctagaattattattgatttattacgcaattattaattatttttccaaaggaaaaggttatcgctgacatcatcgaaggggaggccggcgccgacatgcatgccccgcacgtcagcgacacaaaatggcggccgcacggtggaccaagtccggacgcgcgcggcctggcggcaccatggacctggaccataggtggtccacgggcgagcgaagcagcgccagccagctgagaggcggcggcgcgtggccggacgaccacaggcaacgagaccgggacgagcggcgccacgggaagcggcaaaacgggagggggaggaggggtggaggaggagggagtcctcaccgagcgccaaggtggcgagggagtgatgggtggcagcggtgtctcccgggaagatgacgcaggcggcccccggcgacgaccggtgggcgtggaagggtggccgagcacctcctcgacctggccaaggggatggaggggttagggagagaggaggaggtgcgaggcggcggaaggtgtaagtcggaggggagaaaaatggtggagctcaccggtgaccgagggaacatgggtttcgatggggatccggcggtcgaggtgcggtgggatgcggcgaacgcggtggatgtgttggcatcgcgtgtggtggccgggaacggtggcaaatggtagccggaggcggcgaacacagcgacgacctcaacttcgcggtgaaaatggtgatttggctttgtttttggggcggaggagtggatgctggggtgcggcaaggcacggtgatgccgatgatgcaagaggcgcggcacggggacggtgggagctgcggcagcgcgcggccggagaaggtggtggttcgggtttgtggtggcggcggggtttcaatgctgaggaagtggtggccgaggtgcggcacgcgacggcgaagccgtcggtggtggtggcacagcgcggcgacggctatgccggcgatggcgtgcgatcggagcatgctggcgagcggcggcgaagcgttgggcgtggggagcaggggagagcgcgaggggagcttgggcgaggaggggaaatgagagaggatggctgggggatgctttttatagggctcggggcttagaatcgtggccgagaggggcggagtcggccgacaacgtggcggcgggagagctccatccggcggcgagatttggggaaaatttggagaagtggtggaggagtggatggcaaccacgttcacgaggtcggacgcgagcgcgggatgggggaggtggcggatttggctacggagtgggcggcaatggcggtttccggcgggtgataggaggttggggatgacagttggagccacgagtcccacctgtcaaccagagggagagaggaggttggtagagggaggcaatgcagacttgaggagaatggggagccgagcgggccgaggaggggaaaagaagggggagggggcgagggagacaaggatggggttgggccgaaaacggcccaaaggaaggaagggagattttgatttgttttctttttattttaattgattaaatgaactttgtgatgctaaaattacttcttgagctctgaaaattcacgggaaatttcagagagtactttagggcacagagaatattgtgaaaatatttccggccatgattttcaaaggaaaattttaattccctcgttatttcacttgattaaatgctttaacttttatttaaatcctagaaaatgcattatttaatgatttttaatcccgaatgaaaatcagggcgatagactcaccatgcggcataattgaagatactgctacatttttgcacaaatttagacatgtttgtcgaactgcggttatctttgagctgcattttggataaattcagacatgtttgtgaaatcattgtctttgagctctaggccttgacgatactgcaatatttttgttttagtgattattaatccaaagtgcaattctcgcacggaggcatcagacatggttacgttagctgaattgatgcacgcatgtgtgaaatccctgccaaaacgagcacatggttttaagagaggggtttgaaaaatgcaatggattcaaaccccatagggattggtgtcacgaaccgcgacgaatcaccggcgtctcgcctagcgatttggtcgattttggaagtttgggtgattttggggaagaacaggggaagtagttagtacagagtagagagagagatagttggtttttgctttcttcttcttcgatgattcagcccccaactcgaaggtctgaacttatagttgtgctttagcacttatatggccagcagccgcacgacccaatagcaacgacctaagtatacagcagaagtctaaaaggggtacacacatgagtaaaatagaagcagcgtgacattccctcccccttaacaaccagcatgtccccaggctggtgcttgtggaaaacgctgccgaagttgccgcaaattctcccacgttgccaagtcatcgggaagattagtccagcgaatcaacccatatggcacagtggcaccaccccgcttgatcaattgatgccgcagcaccacttcaggctgaacatgagcatcctgttcaacacattgcacaagtaagtcagaacatacaggagtacctagtcgaatcaccttcttgaggagcgatacatgcaccaccggatgtacgagactgccttcgggcaattccaggcgataggccatagctccaattcgacccaaaatcttgtaaggaccaaagtagcgaaagctgagtttctaacaagtgacaagagtgcttagcaactgacatctgcacatatggttgtagcttcaagtaaaccaaatctacaacagcaaactctctttcggatctgttcttgtcagcttgatgtttcattctctgttgtgcacgtaccagctgttgatgaagtaattcattcatctgagagcgctcctgtaaccaaacctgaatgtcaggaactgtgctcaaccccagatcagcaaccccaaaggatgtggcctttctagcaaataagacttcatagggggacttgcccagcacactgtggaatgatgtattataccaaaactgcgcctgggaaagccactgagaccattttgtctgacaggcatgcactgtgcatcgcaaatatgcttccagacattgattaagtcgttcagtctgtccatccgtttgaggatgtaggaggagctcatattgagtttaacatatgcaagtttaaataattcctgccaaagagcactagtgaacacacgatctctgtcagaaataatcatactgggcattccaaacatgtcatagatgtgttggatgaaagcttgtgtaacagtcaaggcagtgaaagggtgagatagaggaatgaacttgtcaaatttggtgaacttgtcaaccacaaccataatagtatcataacccccagactttggcaatcactcaataaaatcaagactgactgttgtccaagcttgtaatggcacagaaagaggttggagtaatcccggactcttacagtgctcagtcttagcttgttgacagatttcacaaccctgcacataatcatgcacatccttcttcagtttgggccaggagaacaagttcttgatcctgtgataagtggccgtgacccctgaatggcccccactccactgctgtgcaaggctagtaggacagcctccttagcttcagtgtggttgcctaaccatattttccctttatgtctgatgattccttggaccaatttgaaatccccttgcccatctggcaataaactcagttcagccaacaatttatgggtctcctcgtcctttgtatagccctcttgtatgatttccagccacctgggaatactcatggaaatggcagatgtttcttcttcacactgcctggacagagcatctgctgccttgttttctaggccctttttatactttatcttgtactgcaaacccatgagcttcaggaaagccttgtgttgtaagctggtggttaacttttgttcactcaaatggctcaaactcctatgatcagtaagtatagtgaacactgaatgctgtaagtaagacctccacttttgtattgccaacagaatagctaaacactccttctcgtatgtggatagggcttgagatttgacccccagtgttttgctgatgaaggcaatgggatggccctcctgcattaatacagctccaatgcccttgtcacttgcatctgtttccaccacaaattctttgctaaagtcaggtagtgccagcactggtgagttgatgagagcttgctttagtgcttccatagctatctgctggggttggagccactggtacttgacattcttctttagcaagtcggtaagtggccttgccagttggccatagttctttataaaccttcggtaataaccagtgaggcctaagaatcctctcagttgtttcaagttttttggaggtggccattgttgcacagctaccaccttagagggatcagttgctaccccttcaaccccaattatatgacctaggtactcaaggtgttacttggcaaatgaacatttactaagcttcagatgtagctgatgttgagccaggacttgcaaaacccctttaagatgctgcacatgcttagccaaggttgggctgtagattagaatgtcatccacaaataccaacacatgctttatgatccagggagcaaaaatagtgttcataagtccttgaaaggtagctggggcattactgagcccaaatggcataactctaaattcgtaatgcccttgatgagttttaaatgcagttttatgttcatccttctcctgtagcctaatttggtgataccctgatctgaggtccaatttagtaaaccatttggccccggccagttcatctaacaactcctccaccactggcattgggtacttatttttgacagtgatctcatttaatcccctataatcaacacaaaatttctaggtgccatctttcttttttaccagcagtacaggggaagcaaaagggctctcacttggcctaaccactccctactgaatcctttgagctatctgtttctctatttcatccttctgagcaggggaatacctgtagggtttcaaattgactggtttcacccctggttgcagaggaatggcatgatcaaatgccctgtgaggaggtaaggaatcaggttcttggaatctatcctaaaactcagttagcaccaccttaatgcattctgggacttcttccaccgattcttcagtttcctcaattgcacacagttgcaatagctgtgacacagctccagatttagttagcccatgcaactgtttagctgacatcaacttgcaatgattcagttggtccttaaccccaaagagtgtaattcttttgtcatggtgagtgaatctcaacttctttctcttccaatccacccacattgggctgaattccttgagccattccatccccaaaatcatgtcatagctccctaaaggtaagattttcagatctgtgacaagatttaccctgacaccaccattccaccttgggactcatcttagtacacaacatcttccctccatcagctatagttacctgtgacacagctgtatcttccactggtatgttcagcctttttatcacactctcagacaagaaattgctggaactccctgagtccaccaaaatcaagatatgttgcttttgtattagcccttccaatctgatagttttcctaccagtaaccccagtggctgcacactccgaaattaccaattcttcatcactactggtttcaccttcctcctttactggttctccatcaacttgaagttggaacacctccaacaactcctccagaatgtggagttgtactgattttgggcacttatgacaaggtccaaacttttctccacacttgaagcactctccctagctcttcttgctgccttcaaagattcaaacctgtcttcccactttggcttttcttccacttttttagtttcctctagaactggccccaatatacctttcccttgatatccaatcttcccaggtgccgtattagcctccttgaaactccctctggtggaaacatagaagttcttcttcccagcttcagctatcagctcctcctgtattttggcgagagataacgcagcatcaactattctcggcttatgtagcttaatagcaaatttaatctctccctttagccctccaacaaaatttgtcacaaaataagtttcatcgtaccctttgttatacactagtaccctatgcatcaactcctcaaacctcttatggtactcgtctacacgcccagtttttgtaaaactctctaactcctctaagtggtcctgatatttatctctcccgaacttactatgcacagctacacataactccgcccaaccttctacactgtgcaactcctcataggtctgtaaccacagcgttgcattaccaacaaaatgcagcgttgcaaaggaagcccacgtttcaaacggaacttgatacatgtgaaaatacttctcagaattggactttcacaacttaggattctctccatcaaattttggaactctgtttttcgtaatctagtacccccatgatgctgactcccttgagactgactccgccatctctctgaaccttccctcaaatcgaaatgaatcggagagtggcggaagtgaggcttacccttgaccagggtatgctcctgagccgcagaggcatcagttgcaagaccctggtgattctcgaccttgccttgcccttcgggcggtggtgtcgctgctgttggtgatgccttcggctgggattccagcgccgtgatacgggtggagatcccttccaccgtcttgttcagatcccacatccccgcatccacgttcggaatccacgattccaagccccgcaaggtgcccaggatgttgttgtgactgcttgtgagttccgccaccttctcaccaagcgcctccgtctcgccttctgtcgccaccactctctccgtcagagttgggttccccatcttcctctccgtgttgcgcaaggaccgacggctctggtaccaaagatgtcacgaactgtgatgaatcaccggcgtctcgcctagcgatttggtcgattttggaagtttgggtgattttggggaagaacaagggaagtagttagtacagagtagagagagatagagatagttggtttttgctttcttcttcttcgatgatttagcccccaactcgaaggtctgaacttatagttgtgctttagcacttacatggccagcagccgcatggcccaatagcaacgacccaagtatacagcaaaagtctaaaaggggtacacacatgagtaaaataaaagcagcgtgacaattgggtgatatgggagggactcactctccatggatagattcctctggggtttagtatttcccaagcaaccgaacaaaaccttaaacaaacccatgccactggatgctttaagtttgcctaaccgtcaaccattgcgtgaaaattataaggtgagtcagatattcagaatcggagctgaaaattcttttggaggttaattttgttgcaagagtcagatagtactgttcttggtttgaaaagagaggtggttttcatttcgattgagctgaagacgacgtagtaccaacaaaaggagtatatcaatataatcgataagcccaactattaataacaattccagtttagcttttgcgtatagaagaaactaattaattaatacaagacataatttaattaactgatctccaatcaaatacttgttaattacattatatatatattctaacaagaaatttttgagagacatgtacgtgtgacctagctacgtatataagagctttaatttaatttttagttacatcctcggccttgcggttgggtgtattgtcgttgtatccgatgcccttcctcttggtcgggaagatcaagaagacgaagctcgacaagaacgccatgccaagaggcaggttcttgaggagctccttggtgttgccgccaggattctgcccgaagaagcagttctgcagcccgacatcactgaacgcaacggtgaggaacaccatcgccgtgaagaaggagtgcacgaagtccagcggccgtagtcttagctcactgtgactcaatttcttcgcttcctcctcttcccgggacatgttgaacacgttcaatccccgccgtgtcgccacgccgtagtagagcttgccgtcttggccgacgacgctgtccgtgaaggagaagaagagggagaggccggccaggacgccgaccagcacggcggtgagccacttgttggcggcgttgcactcgccgtggttggtgaaggacggcgacagcgcctggtaagccagcaccgtccccgtcggcagcagctgcgccaggttcgccgtgcttgccatcaccttgtcggtcaccgtcttcgtggccacatctgttttcgacgacgtcgtggactcatcgacggccttaggcgtcgacggagctaagttattggtcgtcaccgccgtggactcgccgttggtgttcgatgccatgttgatcacgatggcgcccggaggagatgccgccattgctggagcttttgatgcggcgtcgtagtaattaatcaactggtgaagactgaagagagatatatgtgtggtagctcgagttcctgcgcttatataggtgaaaacatttggaatgattccatgttgtgcgcgttgatttttctatgcttgaaactagatgggtcgtgaccattcatgcatggaattcagatcaactgagcaagtgtggtcagctgttcagcagtaccgatctgcatccactgcagtttttttctacctacatgttactactacatcttactccatcttggagttggagtacttggaaggttggaattctcgagatattttctcaatttacattgtaaccaacttggagcatcgcaatcgccaacgggctaaatttgtcttcactgtaccggtgagaccataagaaaatgacgtttttatcgtgccactgatgcatgccttttttttcctggaaggcgagaaaatgatttttattttcggtctgtgtgaagaactagggagtactctggctatttttttagtacaacttggccgtgcgcgaaaggtttatatccgggagtagagagaccgctttgaacctttcattttagatagaggaagatcatttaacaggaaacccagccacaattttttttttagccttacatgtaaagctcatgtatatattgcaatttatagttaatcgtaaaagacatgtgtattgatcacatgttatattttgcaatttatagtaatcatgtacaacactactcttgatatataggcgtgtacaatactactcttgatatatagtcgtgcagagaaaccatgtcatagaacaattcaatttagttctagtaaccttctatgataagcagtgtttaaagaccaaattgaattgttttaacatgaacttgccaggcaaatacaatccaataaaccgtatcatatactgtttaaaaatggaggtagtacatgtttattccctacaagaaactagaatttcttgacaggcaaaaactgccctaaaaaaacatcaaaatggccaagaaaacgagtaatattagtaacttaatttgttttgaccgtaaaaagttaactaaccgttaagaaaatcggatttgctataattatggcgataaattttcttcttaatcacagtcgaattttcgtccctacgatggtgcggacattcatgctcacatgggacatcagcgcacgcgttttacggcttgttttcgacagttcttcacgaatcacgatctagctatgtagctgcgcctgttcgcttccagcgtgagggtgaaaggcatgttgatatatgaccggtgggtaaaaaaacttagttatgtctaaatacatagctagaagttgattttttttgacggagggagtacactttagttacagcataattacactataattacatcataattaatattggttacatttgtaatttttattatatttagctgtaattttaatttatatgtggtgatcaattttaatttgatgtatttatttaagtttgtcatcttaaattagccttgtgttgtggaaggtgactgttttcttacctagatttatgttgcatgtcggataggtagtcccataaaaattctggattcttatagtgatatgaaaaatcacctatcttaagggcctctttgaatcgtagaaatgaaaaaacagagtaataagaaaaacgcaggattctgacagaaatacaattgtaaaacagagaattacaaaacacaggaatgaccgtttgattggaccataggaaaaacgcaggaatcagattagaaagatagactcggagaaaatttttcaacaggttaaaccttttgctaactttcctccaaaatgtatatagaattacccatttcataggaattttaaaggattcgagaggattcaatcctttgtttcaaaggacttcatagatttttttttttcaataggattaacatcctctaaaattcttatattttttctacaaattaaaggggctctaaatgtttatgtactggcagtacaatatgaagggcgccctaaatgtttatgtatttaaaatttttatcgggtttaatttatacatagcagatggaattaatttgtaattttaaattatgatgcactgcaagttttagagagcatttgcgacccatgaaaacaagttattatcacgtgcgagcttcccctgaatgcagtaaccatgtgcgtgcagtgcgtgcgcgcgtgcagactatcttaattaattgcaagggagaccccgacagtaggagtactaaattagtactgtggaggactaattaatttctttctaagccgccggaggcaatgccacaaacactaatctatcagccactagcaccaattgacagtgcaaactagggaaaaaaacacatgcgtgaaagctgacattgtaatactccggcacgaagaggccgaccggtctgacgaagtatatagtagtaataggcaaccaattaacccggccgaccagtcgccaagccgcgcgtggcacgaagaggcggctggctgacagtccgccgggcgcgcggttccggagaatcggtcgtcaatcgccgcgcgcgcgggacgtcgaccgatcgatcgacgtggatgactggcggttcgccgtggaggttataattaccttggatcgtctctgaaagggacttcgccgtgtgggaggaaagtaagatgcgatgagacgcgacgcgacgcgatgtgtagccatcagacccgtagtcgtagataaattccatgtatgtgtacgacgtacatgtgctcagaagaagcggacaacaaaatggaaaagggagaaataaacatcctagcatttgtctacggacaaacgttgtcactactaagtaagagttgcaggttcctgccatgttcctttcgatcctgaccagtcacgtttttgctttgacacaaacgattgttgcgatcgcttaattaattccaccattaattaggactacgtgatgcctcacactttgctgcggatatatggatgaatacattttatacgttatagaaataataaaatgatatatgtatatgtttaaataatataaaaatgacgtggagataataatttgacattatttgcatattgattatataattctaaaaatataaaaaaaatgtaaattatatgtcatatttgaatgatatttaaaatattcttagataataattgctagtgggtgataatgtggcaaacttgtctgcgatttaaaatactctatataataattgctagagggtgatgatgtggcccattccattcctctctctcctcccatcggcctggtccgcctcccctcgcttgctaggccggcccacctgaacgcacactgcaccacacaccacagacgccaacatgcggacccacctatcatctcccacctcccgccgctcctgttgccctcgcctaaccatagcgccgccgttgccgcccgcttggaaggggggatttacaacccgtgtttccctttccctttccctccatttcccctcctctctctctctcctcttgaattggccggatatcctcccgcaaatcttgccggggccattgaaggccactggatttgacaccaccagttccccgctctccagccctccccctcgtcccctaccattatataaaccccttccacaaccccctctcccatttccgccacttaccatccacactcgacccgaaacgagctcccgtcgttgctctctctctctctctccgccgccgctgtcgccgagctccgaccgagcttcgccgtggtcaggacctcctttcgtctcggcgccaccaactctggctttgtagcgtctccgccaacctcgatcgccccttcaccacacccgaggactgttcgaaccccgttctccccgagctcacaccaacttttccgtcgccaccaccgctttgggtgatccacgggcctcgcccttcctttcaccgtgctcatgctctctccgaccgtcattccgccatgtggcgagcataggagcgcgggcgctgcctcccaccggtcatgcagtcgtctcctccaccgggcgtgttgcgtggccgccgtgtggggcccgcctgtcagccgctgttgtccacttcgggtggctgatgcgcggggcccacagcaccggtggacggctctcaggtgcacccggtccagcgtagaccgattggatgccgcgtgagtccttctcgtggacccaactcacacgcgagttctctggtgcaaatgcaattatttatttattaataaaaataattcaagaatttgaaaatattcacctaaacaacacttaaacttcagagggccatatcttggtcgtttggactcggaattgacctgttcaagtctctaattttttcttaagaagtcaagaacctacttttgtactttgttcttgtgacttatttggattttattagagtaaaaaacccttttcttttcgttggtcatgtagacgctgcagctttggaagatccgctctacttggaggttgaaggcaagtcacatctccattgaacatattgttgtcccatgattttaaattattgcataaccgctttatttaaattctcgcgttctcattgttttatttagcttttcatattaatccttgttatagccttatcgttgcaatggtttatatcacttcgttcaccctaggaaaataaaacccaacaagtgtgtactctatatatggttccaccagtatgaatttagctagatgcttcgctagttaactagacaactttgacttgttttataatcttagactttaggagttatatcatattacttggatattatggagtggttggcttatgttggaatagggcatacaccctttcccctattcaaaaacaccccaaatggtcttaggctaggctcggggtgacgaggtgcatggttttgacttttgagagtagcactttggccatcataaggaccggtctttgggcctttgttgctatgtaataccgtacttctacatgtctaatgggtaaggcttagtttgtagtttagtctagtcatgaacaaaaggacatatagagatggatgaagtcgggtgatggatatctctgaggcaaatgaaggctatatgggcgggtgtccgatagtcgagatgtcatggcacaggacaagcattcgggtggccactctcgaaggatgttctgatgacgtggggcttagccttaacctacctgtcccgggagcctcggccataggcaggcgttgggtcggtgctcttgtgcaaggctaggatgggtgaagaactatgtgacaccctccgctcatttaccatggtggtaagtggcacgtggcaacgcgtgaggaaggcatgtcttgtgggtaaaattgtacacctctaataaaagtataatccattcgaatagccgtgccctcggttgtgggcaagcttaccaatgtacacaagttagtggtttttctcttaaaacttggttgggtttgcttgggatgagctggggcccggtgttgccagtttggtctaactcgttgtaggccttgggtttatgcaggttcgtgtgggttcacgaccttgattaataatcttgtgtagatctaggttcggagtttcctaaatagtctcgagcaaataagtggtttaaaatgctactttaatgcaaaacctaacgccctattattattcccttgtacttccttgcatttactgtgcgtttgccggtatgacttgttgagtatggtggttgtactcagtctcgctcatttttcttccaccccagaagaggagctcttggaagaggatgggttcggtgtctagctcgtgtctgccgtcaaacacctgtcgtgttcgccctagtcttccgtgtttcttcatatttctctatgagctgggcctttgggttgcccgtgtaataagtactatttatgcttctacttgttaaactttgatttgtatcaacttttatgtacctcgcctcctggaacatggaataatgcacgcacgtatgcaatgcatattgagttatctccagttgtgacacatgacgattagatcatgccacattgggagccagtgatgagaatgtaagacaaagttattttttacaaagctttgagcatgcagctcatgtgcccctagtcttcccttgttagtgccaaaccaaatcacacaattaaaatatatccctccaaggtgaatcggttagttaattgctaacaaaaacataccacttctggattggaatctgtcgacgttttttctcacgactacgatatttgcatggtatggggattgttggtactacagaatatgcggggttgaggtaaaagagatagagactgatttttatataggttcgggccccgtattcatcggaatcaggtaatagccctacccttgttggctgttgacggtcgttatcgatcagtttcgacagtcaatattactaaaatgggagagaactagtgatgcttgcaatgcatatgttaatcagaataataatattccactagtattaggtttactaaccttttgcagagaatgatcataaagtagaggagaaccgacatcaactcagacaataaatcaatcggacgatgtcgagaaccagacttgtgtgtgaataggccaagaactcagaattgacacgatgaattgggccaaaaattcacaagtctgcggagtggagcaatagaggaggccaccagccgaaactgggctggattgggccagccccaggttggttcggccgaaccaatcctggcaccgttggatccaggttttggcatggacgtccagtattgcatcccaatgacggttggagggcacttcggacaattccccttccacaaccgtcataaccacctctatataaggagctcactctctttacttcaacacacacctcaagcaatagctctctcattcctctcaagtttagtttagtagtatctagctggtggaatagaaatagaataggagtccggagtccggaagccttcggaagagttcgggtatggctctagcagctttcctttcctcttttgtaagctttgtacttttattagaatactcttctatatacatttatggtattgaaatactttccgagtatatgagtacctactttacattacgttcatgttatactgaatatacggctagcttatctgggagatgctttggtgcgggtatagtgtttgcttatgcaattactctatgtcatgacgatgatattagagtagtatctggtagtttagacgtggtgtctagattatgagatatcattatttggggttatatattgcagatgagagatgggccgctaatggtgacacctcagtacgggtattcctccgcgcctatatataatccgaagttaatttcctgagaagggtattcctccgtatttagccccggttggatggtgatgacgggctgtcgtaagaaactcggcagtcaggggtggcttctcgaagtaccaggagggcatcggatagagggtattagctagtatattagttaactagaatgtatgtatactatgtatattagaagtataggaatagatttgttttctcttttctttccacctagcttagataaattgttatgaggatgagtagaaatgcttgtgtgtcactctacccttggattatcttaacccctgcttagaatatgattatcaaaataatatataaattattagttgagttctctctacatgatcttcccacgggataaaataaatatgatacccttgtaatactctcgggtgaaatgctacaatggtatatccgtgcgcttgcggatgaactctataaccataatataccagaagtgtttctgcgccattgcttggaattatatttctagtaaagtcgttaagaaataccaacaattttgcagctctgagctgtaggcgcttcgcttctgcttcatcctccgggagccagccgttcgagaggtactttaggaacagggttcgccagtcctctgggtcttcatccagctcggcctggtcgattgccatgatattcgggctctctatgggcacacttgatgcgtacaggacctcaaaaaagatgcttggcgaatgcgggcctccacaaccagcagatttcgtcaaggcatatgcttcctcattttggtctctaggtaagtgttcgaccgttatgccggcgaagcacttttccatagattgaacagcctccagatatctcttcattccttcctcttttgcttcaaaggatttgtcaacatgacttgccactagtttagagtcggttcggatgagcaagcaccgaacccccaatgctttcgccttttttaggcccaacagtatagcttcgtactccgatgagttgttggttgtgtcgaactgtagccttgcggcatagcggatcggcacgccccctggcaaagtgagcactgccgtgcgcctgcccctttgtgcaaccacgagccgtcggagtacatcacccaaggttgttcgacaggctcgggttcaggggcgaatgccagtgtccattaggccacaaagtcaactaggacttcagacttgatggcagtgcgggcgacaaaatgcaggtcgaatggagataactctgccactcacttgctgagccagccagtaatttctttgccccggagcacttcgcccaaaggatactgggaaagcaccgtgactttgtgggcctgaaagtagtgtttgagcttgcacgaagccatcactagggcgtaggcaagcttttccatttcgatgtatcgtatcttctccccttgcaaagcttcggagacgaaatactctggtttctggcctgactctgtttcttggacgagggctgcactgatcgacactggcgaagctgctaggtagagtagcagttcgcttcctggtgctgggctgaccaaagcgggtgggctctgcagatatcgctttagctcgtcgaacgctgcttggatttaatttctcaggatttaatttcatacccactacacgtaagttgtcgaaggtctcctgtaagtcggacgcatggtcgaaagccatgcggctttttatgacgatattgtcgacataagcctccacatttcgccccagctgcttataaaggaccttgtacacctgcctggcgaaggttgccccggtgttccttaggccgaaaggcatcctgaatggcaaaaggtgctgaatggtgtgatgaaggctgtcttggggatgtcggccggattcatgtggatctggtggtagccggagtacgcatccaaaaaactcatgagttcgcagccagctgtcgaatccacgagctggtcgatccacggcaaggggaaatcgtccttcgggtacgccttgttgaggtctgtgaaatcgacacacatgcgccatttgccgttcgatttcctcaccagtaccggattcgctagccactcggggtggtcgatctcctggatcaccccagccttgagctgcttttgcacttcggctttcgctgcttcttggcgatcagcggacatcttgcgcagcttctgtttccttagcctggcatccggcttgaccgccagatgatgcatgatgaggtctgtcgaaacacctcccacttcgtcggggccccaggtgaagatgtcaatgtttttcttgagcacctccaggatgttctcaacttctctttcgcccatgtcgccccccagcgatacaaatcttgtggaatcggcatcgttgacctgctccttgatcaccctgccgtggggggcaggcttcggcgcgtgcttcgctcggtcatgcggttcggcctcaacatcgtgcaccgctctgttgatagcggccaaatcgccctttgatgtagccgaaggttgaagccccttgaccacgatcactcctgcagggccaggcatcttgagcttaagataattgtggtgggagatggcttcgaacttgttcaaggttgcgcggccgaagatggcattatagttgtatgggatgtcgacgtcgtcgaacagtatttgctcttcgcgtctgttttcacctgtgccgaaggctaccaccaattgtgcttggcctaggacttgaactgcttctccgccaaaaccacgaagcgaggccggtgcttgggtaagggctagggtaggcaaccccatcttggcgtatgcttcggcgaagatgacgtcggccgaactccctccgttgactaggattcactggatttcgaagccagctacgtcggccgagatcaccagggggtcttgatgtgggaacaacactccttcggcatcttctggcccgaaagagatctgctggttcaaatatcatggggccccttcacccgccgaagtgatgttgtgcaccattcacagctacatcttcttttgccattttgacagttgattcggtgggtcggcccttgtaatcacttggattactctgcgttgtacatcttggcgttgttcggccgggggtgcttgttcttgaatggcttcgcgaggtgcttcgacagctgctccttgttgcggccttggatcttatgcgttgccgctctgccgaatgtttcggcattgctctgtggtgtgcgaagagcgtccgtggaaggcgcagtaaaggtctttcctgaccttcttgcgaacaggctgctgatggctggttgcttgttgggcgtcgaactccttgcggagggcttgaacttcttcaacagccatcacggccttgcctgcactatcggttctgaatttcctccacgtcatgggagcttgacctgacctttgcggttgtccttggttcgccggctgagactggcaaacagcaagaggagttggctcggcgacttgtgcttgtacttgggcttgagcagcgatgacagaggctttatcgtactcagcctggattgcttgccgtcgcttggaatcctcttcgccccttgcgtattcgtcaatgatgcgaagcaggtgctcaaccgtctgcggctccttgttggcgattttccttgtgagttcgccctcgagcagcccggccgaagcggcattgatgatagacgcctcagttatgtcctgaacttggcatcgggcttgcgagaagcgacacatgtactcctttatcgaatccctcggccgctggcgaatgccgagtagatgttgctctgtcttcggctactcataggtgcgtcgaaatttatggacaaagacatcgcgcaattgctcccatgagtaaatgctattagctggtaaattgaagtaccaagaacgggcgaggcagtctagagcaagatgtattacctttgccttggtattttcgtcgccatgagcggcttcgatcgcggactcatagatggacaggaactcttttgggtccgtttcgcccgagtatcgcggaatgggtgggaacttgaactgggatgggattggatgaatcttgattcccccactcagcggcagccccctttcgccccccgccttgctcacggcaacttgctgtagaggcctgtttggatatggcatggcgaagggcgaagtcatggcttgcacgtgcggtttggccacagtgttcggctgcctggccgctaacggtgatgcctgatgagccgccatggatgggtcgaacgaaggctaggtccatgccatggcgacctggtttggcgcctgattcgttccgaagcctggtgtcggtgcctgtggtcggatggttggtgcttgagtggcattgctgaagtcgaattgcggtccttgactccatggtgaagcccccggaccaggcaggttcgtcggtagtcaaatgggtgcaccttgacttgtgttcccctccggttgggtcgaaggggttacttctggaatgttgtggggttggttgagctgctgaagaaaagcatgaagctgcgcttgcaaaactgaagctccttccgccattgcttgcgacatttgaccaggtggcggggggcatacttgggcagcgaccggccgaacttgtgactgtacatgaggggtcggatgtactgtggcggtcgaaggctgtccggcgaagtacgctggtgcttgcatgacttgtgacggaagggcttgaatcggcacttgcgggtagacctggggtgggatgtagcctgccgaatactggagaatgggggccgaggcgaccttggcttgccgggccacttcgtatgcctgctgctgctcttgcatttgacgaagcatgtcctggagtcgcaccatattctaacgcatggcccccatgttggcttcggcttgcgctttgaggttggctccggtgtgctgtgcgcggtcgaagctatagcctgctgcggcgaagcagcctggggcaccaccagttgacttgtcgaaaggatctccgccctggtctagagcgcccttgccgctgctaccgccttcgccgcatcgactgtgttcggtgcctgccccgtcgaagcagtaggagccgaaggtggtggttgcggcgcaggggccaaagtcgatggtaccacatcggcttcggcaccaagtgccgaaggctctgctccctcctcggctgccatctccactcctgcttcactctccttacgccttgcaacattctcctttgcgaccttcttcggtggcattcgctctcagtggtttcgctcggaggtccccacggttggcgccagctattgtcgaaatgacaaccgcttaaagtgtattaaattgagaatttttcttaggatccccccttttacatgaccctaggggtctatttataatcccattacaggttcccctattagggttaggttttacaggggaatttatatgattgcccttatgaaagggacatttacatgggtatatagtgtaattgaggtacatgggcttctagtgggccgactggggaacgctggcccagtggcccctgggcttgatcggctaagatggcgtcttgggtctccttgaagttgaacttgctatggcgaagccatctgccttcgccatacattcttcgccatacagtctttgcccaagatgcctccaaccttgtgggataccagcacgatccttcgcccttcgccgtctttgcttgatagtcttcgccatggggacttcgccccgacagactcgacgtcttgggcttgaacccccactggttgcatggtttcggcacgtctggtcgaagggtctcataacataccgccaacagttcccatcatgaacttcagccccagttggctttgggatcttggtttgaggttctgacgacgtgtccgtcaatggtggaggtggccttcctgacatgtttaccgtcttccaccgggcgtgccaaaagcgtgttgatgcgtaaaacacgaggcctgggagatctgcttaactccagtgcaggtccaaaatcttgcctttaggttcgtgagcgtgccaagttcatttgatcctgcaatcaacaagaaataaagacaaagaaaccgcggttaaatttataaatgatagccgatcggctagttgccgatgacatcatttatctctgagccgatgtcatgtttgaatcgatcggcagatataaataagtaacaaaagactaaatctacttgatcggctgtagatattaacaactaataatccttatatcgatatatacttaaatcaagtggttgggatagatcagtcgccataccgagacagtataaatcacttagattgaaatatatattaacaacgagattatagatgctcatagcatagcagatcagatagatctagcatgtatcggctaatactccgataccactctatattaagatattaaagcaagcaaaatatatcaaaacggaagcctaacatactttgttgtactaagatcataatataaaaggcagatctagcatgtcaattaagcatatgaaatataaggctaaatcaggtaagatcgggtgaaaccccgatactaccctaatcggcaaccaaaagcaggctagaggttgagattctaatcacgacttataacgtcaaactcaactgatgcagctataagtatgaaaagaaggacaatatctagacaatcaagcagttggatgtttcatagagtggtgaatatcctgtacgatctaagccaacatagatatttaacctaatcggctgccttccaatgatagatgttagccgattgaaggttagataacgatattatcaaagattatatagaatatatgataacccgacgaattacataaacaagattagagtatcataaagatggaagcactaatcccgagaacacaagccgccacagcaagttttacctctagttgaagatcgaaaccgatgcagctaaacccgaaagcaagaactcgtcgaaacgaaagtaaaagggtggtgatgcgccgacattgtatttgaacgtgtgttatcgtattacatggggctcggggtctatttatacccgagattacaaaatatgtccgtgtcggacacgtctcttatcactaacaaactctaaaataccataagtctttgcggcagactcttgtccaaacatatctctaaggaaattacatgaaatatcctaattaataaatacaattgcctactcaagactcaatccgtgcatagcaatcctcatgaagcacattaactcaacctgacaacgtgtaccacgccatattgttggtatcggctgaatcggccaacctagtccgactcgaactctgccgatcttagtcgtagccgattcagactttagccgatcctcactctgtttccggaacgatttctatcttgaattccacttcgatcctatcttcatctccgatacttggattaccaaatttggttgttaacaggttgtaactcgttgccatctggaccaagatcttcaaccattccctcttgaacaccatcacctttgtcacctaattcaccagcagttactttaccagatgagcttgaaccaacttcatcggcagcaaccactttcagcttgtatttctagacaattgtcccttggcgggtttctttgaatgaattcatgaacttgtccttcacgctgctcatcatctgttcaagctcttgcctatgttcagccatcaatttgtccagtgtgactggaataatatttccttcatgaacttcagatccggttgaatttggaagcttgttttgaggatctgttgacttcgaagcttgcttgttgcccgacatatttatcgtgtcccactgggtgtgccaaaagagtgttgatgcaaaaaacgaggcctgggagatctacttaactgtagtgcaagtccaaaaatctcgcttttaggttcgtgagcgtgccagttgatttgatcctgcaatcaacaagaggcaaagacaaagaaaccgcggttaaatccataaatgatagtcgattggctagttgccgatgacatatcattcatctctgagccgatgtcatatttgaatcgatcagcaaatataaataagtaagtaaggattaaatctactcgatcggctgtagatatctacaatatgtaatccttatgtcgatatatacttaaatcaagtgattgggatagatcggtcgcgatgccgagacagtataaatcacatagatcgaaatatatattaacaacgagattatagatgttcatagcatagccaataagatagatctagcatgtatcggctaatacttcgataccactctatattaagatattaaagcaagcaaaatacatcaaatagaagcctaacatactttgttgtactaagatcattatataaagggcagatctagcatatcaattaagcacatgaaatataaggctaaatcaggtaagatcaactgaaaccccgatactaccctaatcgacaaccgaaaagcaggctagagattgagattctaatcacgacttgtaaggtcaaactcaactgatgcagctataagtatgaaaagaaggacaatatctagacaatcaagctgttggatgtttcataaagtggtggatatcctatataatctaagtcaatgttggtatttaacctgatcggctaccttctagcaacagatattagccgattgaaggttagataacaatattgcctaagattatatagaatatatgataactcaacgaattacataaataagattatagtatcataaatatggaagcactaatctcgagaacgtaagccgctataacaagttttacctctagttaaagatcgaaatcgatgcagctcaacccgaaagcaagaactcgtcgaaataaaacgaaagtaaagggtggcgatgcgccgagattgtatttgaacgtatgttttttttattacatggggctcggggtctatttatacccgagattacaaaatatgttcgtgtcggacacgactcttatctctaacaaactctaagataccattagtctttgtagcaaactcttgcccaaatatatctctaaggaaattacatgaaatatcctaattaatagatacaattgccttctcaggactcaatccatgcatggcaatcctcatgaagcacattaactcaacccgacaacgtgtaccacatcacattgtcggactcggctcaatcggctaatcttgtccaactcggactctaccgatcccagtcgcagccgattcggactttagacgatcctcgctctgattccggaacgatttccatcttggtttccgcctcagttttatctccatctccgatactgaaattaccaaatttggttgttaacagcacggaataccgttgtagcacttcaccttcgggtgaccccaaaaggatatcgaactcagggaacgtgtgtaatctacctaaggctaagactatccaaggacaacaactgatgataggtaggctaagctagagaggactttctatgtgttttagttacctacgctaagcaagataattccctatctgttgcttcgggcaccgacccttgctggtctgccagcatggttccggctatagctctatgatgtatccgatcgtggagaattactgggacggaattcagggctgtcaccacctgccgcctacctctgacaaatccgtgggatacacaacaaacaaaggtcacctctaacctagacaccacgtctaagttattaattactactctaatacttgtacaggaacttccttctttatccagagtcctagtactagagcacttagtatgaatactaaacaatgaacccgcaaagatgaaaatctatcttacttagacaaagtaattaaataacataagaaaggaacacgaatgcttactttatagaagaagttctctgaacccggagcagagtgtaccgaggtagaagtcagatgagcgccaaacttccgggcactcctccagagcttcccctccattctctccatctctggctggccatttttggtcgccgcgggtttcctcccaagccctaacccctctcctctctctcctagggtgccgtcgccgcccgtccgtcccttcgcgtcgccgatcatcaccgctgccttcgccttccgctccggccgccatacccgccggtgaggttcccctctcctccctctttccctttcccccgtgtgcaccgccgttctccgcgcgtgcaccgccgtcaccttcggccgacgccgctgccttccgcgctgtccgccgccgcctcccgcgccgccggttgccgtcgccggcgaccgcatgccgccgccgctcgccatgcttagccggtcggcttgaagtcgagccgagccaggctggcgccttcctcctcccctttgaaccaccgcctggtggggcccacccgccaggccacctcctcctcctgttgtgtcgctgacccgtgggtcccgcatgtcccccccccattggatgatgtcagctgggatgatttattgcgcaataaataattaaggtttttctctttacagtgaaaacacagataatcttctaaaaatcatatctaattcatccgagctccgattaagtccattcaagtctcagtaaattcataaaaatgcattgaatccattaaaaatggttttgtttcctatttcagtagacttatagcatgttttgcttgtgtgctttgtttgtcgcgtagatttcggctgtttcgtcgatccgcggtttctcgaagacgttgctgtggtctcatcagtgcgagagcaaggaaattcatgcattacaattgatcatattgtacccaatttacaaatgtcccgcatttctattaaatgttgcattgttttacaatatcatgtgggatgggtcctactactcagtcatatattatttaccttatgccattgataacttgggtattaacatgattagatattagtttagggaatgcttagccatgcttagttcaactagtacacaaaaggggaatcacattaatgcatatactttgattattggcatagctttggattagtgccaccgcaatggtgttagttaattaaaatacactacatggtgggctgtgggtgcatggttttgctagtcgtgcccatggcgattaaggaccggttcgcgggatgccctggaagaacttatcgtacttaccacaagccagcgtgggcaatggctggacttgtagtgtagctttcctctagccgatgtacccaggcaagggtgggcgtgatggagttgggtcggccggggtgtccggttgatcggcttccgaattcaccgtggcacgagaggggactgcccgctgccttgcgaggagtgggggtgaaacttgaggtgtggtgcgattggttagaggggcttatgcgaagggtcctgtcacggcctctttctggtatgtcatggtggcatgtcggcgtgcggtaacgtgtcgtggggctgtttcttgtgggtacagttgtacacctctgatcagagtaaaactattcgaatagtcgtgcccgcggttatgggcggtcgaccagattcactgtgattagtctcacccctagttagctaatgaactggtgtagttcaggtggttggttgggcctgttgcaacgtggtatagtgttggacagtgattggttaatattgattaattactacaactgttttactgctttcaactactgcttttaaatgtctgctttattgcaaatgaacctctagccacagtgggtagtactcagtcttgctctcttttcccctacaccagagcagaagttcttcccagttggagccgtgtcgaagaagttggttttgttgatgccatcaaggatgcctgtggaatggagtcgcccactgcaggagtcaagtcttcaggcttagctcgttttaccttttccgctgcatttgtaatcttttatatttttgtaagacgtggatctgtatgtcaataattatcgtttgtgtaccctgactggtcctggacaggggtttaatgcacattcagcttagaaattctggtttgtgaatttctgggcatgacaataagtttgtgcacctcgagtacaaaactaaaaaaaatactccctccatttcaaaaaattttagaaaaatgtaataatatttaacaaacatattatcaaaatatattcaatattacatttaatgaaactaatatgtaatttggtatggtaatatcgctactatttttttataaacttaggcaaatataaaaataagtttgactaaaaggaaaggtcaatctaacttataatatgaaatgtataattctataaataaaacccgggtagaattatttatagaattctatgaaatatataattctataaataaaaccagcttatgatagcaaactagcagcggggaccgccaggctccaccgctgcatctctagtaccaactgctatatttaccattatcgataccttagaaaaatgatttgtcattggaaaattctattagttgtatagtattgttggctccactattgtaaaccagtaatctatagggtatggtattcatctaatgatgggtacaataagaataaagaataatgtacgtcaaacagtaataattttactcgacaataaattgaacggaggaattagcattgtgtccttcaagcacctccaatctcgctaatatgcaaactaaattagcagttagcaatactgtaatacagtgtaagtataatggtcctatggcatgtgatctgaaacttgtgtaggcttgttcgtttctggcgccggacggggagtggtgtcggtgtatccgatgcccttccttttcgttgggaagagcaagaagacgaacgtcgacatgaacgccatccccaggggcaggttcttgagcagctccttggtgtcgttgccggcgtcggggaagaagcacttggtgagcccgacgtcgctgaatgccacggtgaggaacaccaccgccgtgaagaaggcgtgcacgatgtccagcggccgcacccgcagctcccgtagcttggtgcgcgacaactcctgcgcttcctcctcctcccgggacaaattgaacacgttgaacccccgcggcgtggccatgccgtagtatagcttgccaccgcgtccgacgacgctgtccgtgagggagaagaagatggaggaggcggtgaggacggcgacgagaccagcggtgagccaccggtttgacctgtagcactggccgtggttggtgaaggacgtggacagcgcctggtaggccaacgccgtgcccgtaggcagcagctgcgccaggttcgccgtgctggccataaccttgtcagtcatctccggtggcggcctagccgccggcagcgcaggcgcagctgtcgccttacgctcgccgacaccgttgggcatcagcgtcgtggccatgcttatatctgcctcaggagctgcctcgccgtcaccattggtttcttgtggttgtggcatatcaatcagcttggtctcaagtgaggattccattacttggttttccttgtgcattaacgaaatccggttgataattatgtataatacgttacgttcttgaggatttatataggtgaatcgtttgcagttttttccacgcgtggttggtacgcgtgcattggattaagaggaaatggtcaaccagagactaagctgagctaggtagttggaaagttggaatcattcttagctttggaattggtatactagttgatcctcctcccatcctaaattattgggcgccccatttttttttaaaatcaaagtcggtaatttttaactaatgatcatactaaccacatctataataagtattatatatgttatatcactagatttatattttgaagcacttacatatgatgttaatttcatattcatcggaaactttacatagaataaattaaaagtcaaagtatgctgctcatctctacaaatggattcatgcaatccatactgaaaccaaaccttatgtttcatacagacttttcgaagtcttgaaatgtgatgtcgatgcttcgccgatgcgatccatcggcagagttttttcccatatgttcttttacgtgccaacgcatcattttaacttgagctttgtacctaaagaaatgcctcagccgtgatattatagggaaatatcgcattaccttagcagaaactctcgtcttggaaggttatccgtcaacatcaccggagtcatctcgtctaatcttatattgtaacgccatacaaactgggcatgtttctaagttctcgtaatcctcaccacaatagaggatataatcgttcgaatatgcgtgtatctgatctgtacttcaagtcctagagggcagactacctgttagcttcgtacgttgtttcgggccatttatttccctccggaagaatattctttatgagtttcaataactcacaaaatgccttgtcagtcacaccatttttttgccttccattgtaagaattccagcgtattacctaactttttatgccctgttcacagcctgggtacaagaacattttgtggtccgttaacatacgctcaaatttcgtgacctccttttcactttcgtagtccttctttgcgtcgtacaacatccgacaaaaatcatctgcactgtcattttctgcaacaggcccgcctgtcgcgcctgttgtattttcttcaaattcaccgaattgagcctaatctggaatgttgttatctttttcttcattttcaaccattggaaactgtcaaggttacgggtagggtataccctctacccttcgatatacgtcacgtatcgatatggtatgctcacgagtatacggacgtgttcgtcatacgttaaggaaattcatcatggagttcacaggtagaaggagtcctattcggtcaaaactgggtcgtcattgtgtcatgttcggtccggcttctccgagtcctacttggagacagttgacctgcgatataaaagggacccctcggaaggacctaaggcatcgaatctcagagccaacacatccaccacagcctacgaagccgaagcttgtcagagccaagtcgccgggagatctagtcgaatcaactcgactacgatctcgtcggtatcatcgagttctgctattccctttgtaatctgtggtttccaccatataatcccatatcaactagattagggctattacctgccaaggggcctgaaccagtataatccctgtttcctgtttgcttgatgtcgtactacgtagatcctcgtaccagcgtaccccaataccctctatattcggtctacgggtatcccccgtcgacagtggcgtgccaggtagggggacttggtgctcaaggttctactactatgacatccagtttcaccgacaacagcgttaacaccaatctcaaccaaggagttcctacttcaacaacactggtgtggactcaagtcggcgaaatcgtctttccggtttacaccatagtgctgatctcagctggtccgccaatggccggaaacgagaacgcagtggctagaacccggggtgactccatgtcgaagaatccagccgccgaagcggagatcggaacgtcgacaacatccgagcccgagaaggatcctagtgcggccaagccttgtctttccaacaggaatcacgagccgatgaggattacttccgaggtgacaaggtcctggtgtcctatccacaaaactaggaaacacaccctgcaagcctggtgggtctttctcaacgttcatgctgaaattcgtgcctgcaaagagtgtggaattcaacatacctctccaactcgtgatgtccattgtcctattcacaagacaaaaaatcacgacctctcgagttgcaaggtctttctcagcgccatgaagacaccacctcctaaggtccagcagtcacgcatccccatcagggatgaagacaaggaacaaggagcgacgccgattttagatcgatttgttggggtaatcgacatcgatccccacgaaccatcagtcttgcacttgctcgaagactatggatcatcgacaacgagtacgccgcgtgaggtattggctattgacgatgtcggcacgtcagtgcgcaccaatgcggaagcggagaatcaagtgactgctccgacccagcacatcagagccatcaacgcaatactgagggaaaccccctacgatcccattctgaacgacgatcaagcacgttggatagaacgactacaggaatcagtgaccaacctcagcaacgtgttcgaagaggccgctaccgcagcacacccagaacagccaccaactggcgatgctaatggtgaaaaccctgaacggcgggaatcgcctcatcgagccacccctccacctcgcggcacctgcgatctcctcgatcacctgaatggccgccgagaggcacgacacacacgagacaacgagaaccgttcccggcatcatgtctcttcacgggccattcaagcgaagatcgaggaggccattcaagcgaagaccgagaccgtgataaccaccataaccacgatgatcgcgaacggcggtgctgggcgatactggtcgaggacatcgccataataacgacgatgatggagatcggcgccgagacaataacgggagacgacgacaggattctcgagaacccggctgacgtcctcataatcgtacgccggaaccaagcgacccatcatcatcgtcatcatcctcgtcatcttcatcatcagatagacatccacgaaggacttatgatcgccgacaacccaccgccccagcgctaggtgtagagctttcagtcgttcacttcgggatgtccgatggctactcagagattattcgaaattgtcgatcgatgcgctcatgcggatgacgcactgaacgacaaaccgaagaccggagaagagaagaaaccagccaaggacgcacctgagtcaagcaagaagaaaaatcgcaagagtgggaaaaggaaagctcaatcggaagttctcgcaacagaatatgcggaccctcccaagcgcccagacccacaaggcagcgacacgaataaagcatggtgccccatacacaagtcggacatacattctctagaagattgcctcgttttcaaaaagtcgctcgcaaaacacatggcatcggaaaaaggcaaacgagtacacgtggttgagaaggacgctgaggcgcctactcaggaatcggactcagcatacccagattccgatcttcatgtctcacacatcttcggaggttccacggcatactcctcaaagcgagaatacaagaaagtggagcgtgaagtctgttcgacgtggcagggggctacgccaaagatgaagtggtccgagcagaagatagaattctcggaagaggaccaccccaagattgctgtcatcccagggcgatatccgatcatggtcgaacccactattcgtaatatcaaggtcgcacgagtcctgatcgacggcggcagctgaatcaaccttctcttcaccagtgccttggacgcgatggggatcccacgaagcgagttgacacccactgatcaacccttccatggaattactcctcagtcattgtccaaatcattgggcaaaattacgttgcctgtgactttcggccaagcaaatagcttccgaacggaacagatcacctttgatgtcactgaattcgatacagcatataatgccatcattgggagaactgcactcgcgaagttcatggccgcatctcactacgcgtatcaagtgctcaagatgccaggaccgaagggaacaatcactattcaagggaacgctaagctggcagtacaatgcgacaagcggagcctcgacatggtcgagcacacgcctagcccacccgccacagctgaatcacccaagaaagtgagcaaaacaaacaagacgccgaagccggacggcgcaatcaagatcgttccactctccagtgccaaccccgacaagaccgtcaagatcggggcatcactaggcgagaaataggaactcgcactcatcaccttcctccgcgacaatgctgacgtgttcgcttggcagccgtctgacatgccgggggtacccaaggaggtgattgagcacaaactcatggtgcgacccgatgcaaagccagtaaagcaaaaactgcggagatttgcaccagatcgaaaacaagccatacgagaagagctcga

SEQ ID NO: 13700 - DNA, 696 bp, Oryza sativa
ttcctgcagcccttattttgagtgatgtatgcaacaagttggctatgtttttttttgaataatgaggcatttactgatgtgttctcatcttcctgcagtaatgtgaagaaagagagctgcttcttccctatccctcaggcagcagaatgcattcttcgaatcgttgagaaagctaacgccccatcatatatctgtctactgatgctgccgagagtgagacaagtctcctgcaatccttggttgtgttcaatgacaggcaagtccctcttgtgaaaaggccagagcaccacaactctgagaaatgggatgccttgttatacagaaatcacatgggtggagacaatcaggtaaccgatacatttcagagttgctgtccagatttcttttggaccttttgttgttgtactaaacggcaaaccggttcggcttttttgcaggttgaggccatgctcgacaagacgatctgtgcgctgtcgaacgttttcataggtgcatcaggctcaaccttcacagaggacatcctgcgtctacggagaggctggggttctgcgtcccactgcgacgaatacctctgccagggtgagctacccaacttcatagcggagctagactgagaaaatgacatcctagaagaagaattgacagctacatccccctttttttccccactacgatctggtggcatgatacacattc

SEQ ID NO: 13701 - DNA, 2102 bp, Oryza sativa
gctaattaagctctcgttgattcgattctgcgtcgattaccacgagcttgatggagccgctcgtcttgaactcccagtccaagatgtagtcgtagttgccggcggacaccaccatcctcgccaccaagctcacgtcggggcgcacctccgtgatctgcatcaagaatcacacaccgaatcagccaaagattgagagtttgagacacgacgacggccacgaagacgaagggctttctgttcatgatcaaatatcaccagctggttggggaagccggcctcggtgtggcgccacgcgacgtcgccggagtagcgctcgaagacgcagatcatgttcctggcctcgacggggcggccgtcctggccggagtagtggccgtcgaggtaggcggcgttggcggggcagtcgccgccgggctggagcgggaaggcccagaggccgaggccgtactcgccggcgtcgaggaacgtgcggtagtaccactcctcgaccgggtccatgtacgggacgaagatctccgacacgaagccgcggtagagcacctgccgccgccgccgcgcgccgccggcgtcggcgtcggcgtcgtggacggaggccagcgagatgaccgtgccggcccgcatgtcgaagcccacgtggaactcccagttggcccacctgcagttgccgcagcacagccatatgcagcatccgtgcatgatgcatgtgcgcgtcagattgtcagctgatgaatgaattggtgaaatatggacctgttcttcagtcctctgcgtgaaaaaggttcaattctcgtatgggtttaacaaaactagcagtagatgagttgatcattagagagaggggcttagggcctgtttggagagctacgaaactgtctagctttttctcaaactatgataaagttgtagctacaaaataaagtgaaatactaaaaaacaatcagaaactaaaatttcagattctgattcacataaactgctttttagaatctaaagtttttccaattcaatcattggtaacttgatgagtagcaggaaaagaaaaagaaaaaatcttacaaattaggagcaaagactgaagaaactgcttccaccgaaaagcaggaataagtattcttcacaattcacatcgcaatctgactctcagaaaacctctcactctacttaatactatcctaaatccaagtaccaaactaagtactctagtcagctttaatttgcatgagaggctcaaacaggtggcaggaatgtaaatagagattttgtagtttaaacaacgattttgctatatttcactcgaaagatttttttttatctctcattcgattttctcactcaaatttacaatgtattttcttgtaagttacagtgtaatttttaaatcttcgcatgtaagttttaaaatttatattggatttggtctttttcttgaagatatggtcatttagtgtctattatggtgtttcttaattgcttttttgctttttactgtgtccattgaattttaattcaaagattaaaaatatatgtaatataatcataaaaatctttcgaaagatgtatatgtactccctttaaacaaaccaaacaaccatattttaccaaaattttgtcaagccaaataaaatcgcttaccaatgttttggtcacgttttcccaccgaaaccggttgaaaacaacacaaaattgtcaagccaatgtcttgacgtgggacgaaagcagttctcgatgaaatttcaagtggttttcaagaaattcaaattttaaatattaaattcaaccaaaattgattaaagaatgacgaaaatcactgtacagctagaagttgggatccgtcagtccattggaaaggtaaaccctctctttctctcatgagtcatcaatcaaaacacaccaaaatatctatgctggtgcgctgtacatatcaatatctatcctaatgcattgtacatgtcaatggaaaagtattttcatccctcaaatgaatattcctcgtttcttacatatcatctaaacaaccataaaaaagttgaaaaaaatataagatagattaatatgaaatatatcactacataaacatgtaatttcaaattctcgacttctac

SEQ ID NO: 13702 - DNA, 1046 bp, Oryza sativa
atcgccgtcccctgacggcgactatccttgggatttctcacgcgtggtgcacgagcttctaatagttcaaattgaaaatatcacaacgatacgtggatgcatcacacggcacaagtacaagcttgaacaagctgctagtaatggtcaaagcgattacctgacgacgtggccgtcgatgtggaagcccctgccctccggctgcaccaccacgccgggcgccggcgccggcccggcgtacggcggcccggccttgccggcgcggtagtccgtcccctccgccttgggcaccgggtacgccaccctgtccctgtacccgacgatggccatccggtcgaggtccaccaccagcgtcacgccctccagcggccgcgcgtagaagttggccgtcgcgccggcgacgaagcagagcaccttcgccaccctgctgcggcggggctcgccgtcgccgccgaaccaaccgacggggaacaccgcgcagagcacgtcgtccatgtccaccccgcgccgccgcaccgactccacgaacggcgggtgcttcggcggcagcgccaccgccgcgaactgctcctccagcgtcagcgtcgggaagccggcgccgcggtggacggcgtgcgagaggacggacggggaggaggcgttggcgacgtcgacgcggagctcgtgggactcgccgccggcgcgggcgatgacgaacgcgcggcgcgggagggcgtggcgcgaggcgccgccgccaccgccgtaggcgtaggagagcacatcgggtttgtcgggctcgtcgaggccgacgtagtggaaggtgagcgggcgggccgggacgagcggggaggcgagcaccgcggcgcggacggcggtaagctcggcggcggagagggggtcgagcgggtgggggcggggtgcgcccgcggcggcagcggcgacggcgagcgcggcgaggaggagagggagaggaagcatcgcgcggagtggcattcgggcgatcggattagcagcgacagtgacaacttatactggactaaattgaattaaataataatgggctgcaggaa

SEQ ID NO: 13703 - DNA, 2798 bp, Oryza sativa
  unsure (1)..(2798): unsure at all n locations
tgtagttagtgaagcccatgtaattagttgggccgtaacggtactgtaccacctatatatttatcgataaattttgtcctaaaaatttgacagatgtaattatagtacaatcgtaatgtaattatattgtaacttgcatataactacagtgtaacttgtattctctccatactcgtaaaagaagtcgtttaggacaatgtttaagtcaaatcttgagaatataaatcatgaataactctaaagttgttgagtttgaaaatgtaaaaattatatgaatagatttgtcttgaaaaatactttcataaaagtatacatatatcacttttcaatgaatatttttatagaaacaagaagtcaaagttgtattttggagaccgtgtcgatgtcctaaacgacttcctttgtgagtatggagggagtatgtaagtttcacgtaattctgaatcgtgagatctattacaagatttgttctggtgaggaagaaaaaaacacaacacacacatatgtcaaagaatttatttccatgacctccattttaccgaaataatatgttacggagaaatttttgaaagttacattatagttacagtgtaattacactacgattgtactgtaattacatctatcaaatttttgggagaaaatttatcaacaaatatatagcaaaattgttctagtaactagaggatgccccgcgtgttgctgctggatttggttaacatcgatttgttagataggaggtacaatctcaagaaaaaacaaatagatttcttggagaaattctttttagcagccctatctaaaatttgtagataatttaggtagcacatgttaactgaaggggcgtttagccataaagctcttttatacggattgacaggctaaatacatgtagatgtgtatggagatgggccaatgtgttcatgtgggctatatttggcactgaggaggcgaagagactcactcggtaactaatgagttgggctctatgctgcattccatccaacgtctgagaaacgatctaatgcattcatcaaacggttcacaatttgatgatgagtggaagcacgaggtttgagcttttggtcttcactttatagaaagaaggataagtctattttgcctccctcggctcttgtccttggttgaatcctatacctcaaccacaaataaacactggcggtctggcatcaaataaacactactgctacactagccgagagcccatatgttgcagcggaaagctaattgagtttctaacatattaagtcaatcacatgtaattattatttttatattgaacaagtaggtgattttgaaatttaggtgataaccaacactgaaacggaaaagaacttgttggaggatgatgtaaatatgtagtagtataaattgtgggatccaaatattgagatagggtgatatcgtagaacgaatacgatcactgctaacattttaagtagtactacgtagatatggatacttcaacatcatgagattagatgaactaccgatatccagaggtcaaaaggattgtttacattgaaacaaagcagtgccgggtgaaattaacagctcttttcttatccctccagggatagatacatacaagagtgctccataaaagtagaagcatatttctcttttagatagctattgctgtccaggttcacacaagagttgtatcaggcacattccttctgcaaattcatcagccatcttgaagccatagtctcacagtcctatcattgtcgaggccgcccgacgcaattttgttctccgttggatggcaggacaccgagatgacagtgtcagtatggccttcaagtttctgaagaatgttcttcccttggagatcccatatgtacacacagttgtcttctgatccactaacaatatacttcccatttgtaacggaaaacgcggactggaggcaatactttctgttaacatgtccactgtacatcttcaagaacttgccacttgcaaagttgcatagtttctgaaatttggtaaggacatacttatgaagcaaaggttgcaataaccatatattttccaaatgaaataaataactaatttataaaaacattccgtgaaaaatgaagtaaaatcactacatgaggaagcccatgatagaataacacaatgccaaaatttcttacaatgttgcttgatgtgaagcattattgacctaaatgcccataaagttttacagatgtaaacagtacaagggctgaaggagtgaaggtgtatgtatgcacaatgaataccatggatcaacctaatagtctaatactaatataaagcactgataacaacatttgcactgcaagtttcatatttctttcatatgcctccaattacttgaattatgcatgaaacagtgatctgttatcgtgtgaactgatgtgcccaaataaacttcagaagcagttttttaaaaccatttaacaacataactatctgaagataaacttttcacagtactaagaccacacagatcaagaacatgaggtttggtgtgaaactgggtaagtatagacatacttagttcaacatgtaacatattggttaccttaaatcttgggcaacggctttaacgaaatgatcctcagagtgaaggatctttgattgtattggtaactataatttcttttctgtgtgaaactganacaagatgtgctatatggccgccagtaatactagattaaataattagcagttggaggaacaatctgcctatgaaaaagaccacggcgaataccagaaataaagctacgataggcttctattca

SEQ ID NO: 13704 - DNA, 2843 bp, Oryza sativa
ccgtcggcgtgcccccgcagggtggcgatggcggcgagcgacgacggggagagcagcgcgaccgtgccgtcgagggacgccgtcgcgaggaggcgcccgcatggggagaacctcacgcacgagacggcgcggctgtgcggggtcgccgccctcacctgccggtacggccggtacggcggcgccggcgcctgctgctgctgcgacatcagcggcggcgcgccctcgccgacggtgaaaaggtggggaaaagtgtgagacgcgtgttctcctctcttcgacacggacccgagatttgatcaaaagtaccttccattaaaattgaaatttgaggatttattttctttgacgcaggatttacttttttaaacacagtaaaaacagtgcatccaaaactactcccactgtcaataaaataaaataaaatacatactactaagagaggatgtgacctctccagcccttgtaatacgacgaatctaggagagagtagacctcagcgtacactctttccctgtaaacatctaaaaaaaccctgctccctccaactcataatataagggattttgagtttttacttgtaatatttaaccactcgtcttatttaattttttttgcaaatataaaaaataaaaaattatgcttaaagtactttggataataaagtaagtcaaaaaaaaataattctatttttttaataagacgaatggtcaaatagtataagtaaaaactcagaatcccttatattatgagacggaggaagtataacttatggtgacctcggatgcctcgacagaaacattgtcaaaataattaaacataaatagaaatatctgtgtgaagtttagaatttaaatgcaagtgaataggtttcactacaaggaagaaaattgttcacttctcgagaatttactcgtatttggttaagagcaggtagcatagcaaagtataaaccagctataaacatatgtcgagaagataaaagaaaagagagatgaacaacaagctatttatagctaggtgtaacacggactccaagacacgatgtatattatgacaggtgagaccatctattaatagtggttatatgtttatagataactaataattggctatatctctaacactaaaacgtggctatagctctaacacaaacgtggacaagagggaccaggatcctctgtagccgaagtcacttaactttatcactgatatgtgggtttgataatccctagattcacatgtaagtgataaaaatatcgtgcatttgactgcagagagcatctcagtccggataggaggggtaaatcacagttactgtaccaatccaaaatatttggtcaaattttacggttgcggattcgcgacttcacgtttcccctttccctatcggcggcgtcccaaatagcgaatcggttcgtgtaaaaaaaaaagtgagccgcttagcctcgccggcgccgcctctctccgggaagcggcggcgagaacgcggaggagagagagagttcggggttggcccgtcgcgtcgccggagcgatggatcttctgaagagggagctggagaagaagcggaaggcggcgacggccgacttcggcgggaagagcttcgtgcggcggtcggagctggagcagaagcagctccagaagcggcgccacgaggagcaccgccagctcctctccaaggccccgccggcgacctcctccgcctccgccgcgggctccgaccccagcaaccccaacgccgacccggcccagtcctccgccgcaaaccctaaccctaactcctcctcgtccgccgccgccgcgtccgtcccgccgggcctcgcggggaagaagaccgcgcaggatgaggcgctcctctccgaggagcgccggatcgacgagctcgacctcccgcggcatgaggtggtgcggcgcctccgcatcctgcgcgagcccgtcacgctgttcggggaggacgacgccgaccggctcgcccgcctcaagttcgtgctcaagtccggcgtgattgacgacatcgacgaccttgacatgacagaggggcagacgaacgacttcctccgtgacatggtcgagctccgcaagcggcagagggctggccgggacacctatgtcaagggcaagggcaaacgagcgggcggcggtgatggcggcgagggtggcgctggcggggataatgctgatgatggggatggggacggccggaggagtggggatgatgctgatgcggacaaggactcgaaacggatgaagaccaagtttgaggagctgtgtgatgaggacaagatcttggtgttcttcaagaagctactcattgagtggaaccaggagcttgatgagatgccggagctggagaagaggacagcaaagggcaagtcgatggtcgcaaccttcaagcaatgtgcgcggtatctcagccccctgtttgagttttgcaggaagcaggtgagaatccttttgtactgcatcaataagttacataaacaatgcattgttaaatgttaatttggttgtgtctataacttcagtaattgttagaaaaaactttaactaataaaacaatggtgtggattaggatttgaaatgaagcttgtagctgaatggcttacgtcgaagttatgatcctgggacctgggtaactggttaccatgatgaatgcattttatgaccatatcagaaagaagagatggcaaagctcggcgtctatgttttttgtagaaactgtctaactgtttgtgcttcactgttcggagctttgatatttcgtggtaattgtggtgacctctatgcatggcacctgggttcttaaagaacagcttactagcatatcaagaagctttagtgtc

SEQ ID NO: 13705 - DNA, 747 bp, Oryza sativa
ctttgttcctattgggatttgcctttgttctctactagcattatattctgatcctgaattcactgttatatagatacttagctgtccagatttagtactggcattgaaattaaatttctacaaaattatgccttctgtcatggattcagcctcaatgtaattttggatttccttgcagtggatccagtttcttactataccttgttgagctaaatcatattgctcatatgggggatatttttatgcattttaaggctacctatgacttccttgactacatattgtttggcaactctgataccaattattgttttgatttatgtttaggttcttcctgatgacatccgtcaagcattgctcgttattgttgaatgctgcatgaagcgtgattatttagcagcaatggaccaatacatcaagctggccattggcaatgcaccatggcctattggtgtcactatggttggtatccacgagcgttcggcccgagaaaagatctacacaaacagtgtggcgcacattatgaacgatgagaccactcgcaagtaccttcagtcaatcaagaggcttatgaccctttgccagcgacgttatcctgctctgccctcaaaatcggtggagttcaacagcctggcaaatgggagtgacctgcaggcccttttgtcagaggagaaagatccaggaaaccctcctagcgaggataggcttcgactcatgccagcgtcaaaagagtgatgcttcaacgca

SEQ ID NO: 13706 - DNA, 2422 bp, Oryza sativa
atcatttatcttcttaaaatatgtttgcagctagcttatagcctgctattgtatcttctctaactgtaatacattatgaatacacagacaaatatcttgaaaaagatacattatgtcattgaaacatttgaaaaatacacagacaaaaactagtgtgcaatgaaccaacattagaaaaacatgtaaaaaatatgttgataagtagagtgcaacatcaataataagtagaaaaaggcgaaaccctgttaaattcaaggtgaaacattttctggaacattaagtgccaactatcgaagcatcaaaaataacaaatctaaaaacatgaaacacagtcaatttcaagatataacatttcactattgcccgtgaaaaattgtagtccatttgttgaaacatcaagatttgcaaagcataccaatatggctttcttcctcccgcttccacaccaggttgtagagatctcattcgccagttacagcgtcttgacatctccattgtagctgtcgttagcttcatcatccttatgcagtcgtgcgtcaactctactttgtggcatgacgaagcaaacccgacgcccaacaccacacatttgcacatgtcagtatgtcactccaccttgaaggtcaagtttcatctgaggttgctgcctcccggctacttccctgcgacaaccctttgcttagccacctttgctcacgaccggttccccccgagcactatatggccaggtccaacaaggagatggcaacggtgaggaagaacttgaacgggaacatagaggcaagggagggcatcgatcttaacaacgtcaatgatgtggggatgggtttggaggagattgctaattgggttgcttattgacatgcaaggatggagagagtgaatgagttttgggctttggatgcctgaggaaaagcattatcgtccctatttccctcaacaccatatcatcacttgacctctctaacttgattctgctatagacctaattcatcatcctctgttggtctcctcttcttctcctatcttagatcattatgtcaaggtcttatttgcattggttgaaatccagcccgtaaattatacaagatctgaagaatcatttgagattgtgaaacgtcgcgtgttgcataaatggaagtggtcttccagacgaaggtctacacacgtggactgtgatgtttggctcagtactaagcttttttaaagtttgccgtactttacgactctattttttgtttcattacatctagtttggctcggcatgcatgcgcgacaatgttagggaaccatccacacagatcttacggtggatgtgccacgattgaggcatatccaaatgactactcccaccgtctcaaaatataagcatttttagcacagtaacaagtcaaacatttttaactttgactattaatagaaaaaaaaaatcaatcatgtaaaattaaagttactagatttatcacgaaacaaactatcataatatgtaactctttttatttaaaatattatttatatatatattaattattggtcaaattagcatcttgtagaccatgttagagtctgaaaatgcttatattttgggacggagagagtaagttaccagagtatttgagtaaagcatgggcggcgagaaatctcattgccgacccaagtacccaactgcgagtcgaattcaattgaaatttctcaagttcaaaggaaatcaaggtctaccaagtccaatggaactgcaaaaagatgttcccaataaataattggccacttactcacttgccacagcgcgtgtcaatccgacttgcacccgttgtccgttgcacgtgcaagcagctatagtcatctggaaatggagtcgccgccggcgcacgagcagttgacgagaggccggccatggccgatcggcatcgtcgtcaacagcgggttcctctcgaagaagttggacggccggagctcgagcccgccgctcagcgtcggcatcaccgggaagtcctcctggtacggcacgtggtgcagccccaccgtgtaccacagcacgatgtcctcgccgcggatcgccctgtcccgctcgctccacgcagcgaggccgtcgccgccggtgctctggtcggcgtacagccccgacgcccacttctccgacctgctgtacggcgtcacccgcacctgcttcttgcagtaggcggcgcgcctctgcgggaagtcgtcgtcggccagcaccgacgccgccatcgcgccgccggggacgacgcggtacccgacctcgttccccatcctcgtcttcttccccgggttgacgaacaccaggtcggccggggcgccgccgccgaggtccacctgcccgtccgcctccctctccgccacctcccgccgcaccgtccagtagctccgcctcggcgtgtctgccggcgcgtcggggtcggcg

SEQ ID NO: 13707 - DNA, 638 bp, Oryza sativa
agtggatccccccgcatagtatgctggaggaactgttcagataggagagtaacaaaattcagtaaaaaaaaaaaagaggaccacagaaagaaagataactggtaagaaaatcagctctgatagctgaataaatgaaaacccgacaagataacgcatacctatggagactgctcgggtgcatcgggcatagctgcaggcaagggatcatccaaggaaaaatgggttacatcatgtcaggatggtaaagagtggggatgatgcatgcactgttcaccgtaaggtaaaacggcagagcaaacttacgtgtagctaagattgtaggttagggtttgcagcgtatcagccttgaacccattttcatctaaaagaacatgataatgtgttggacggctcgtcccctgtccaaatacaaaagaagaaactattaacactggaggtaaaattatttcaatttcattgcaaagtgaaattgtgatttgttctaccaatcattaccttgataccagaatggctacagaggtaaaagtcaaactcactcggatggcagatcattgtgtcaacaacagttcctaagagaaaaaatgcacttgatgatttaatatttctttttttaaaaaaacttcatacttaatacaatg

SEQ ID NO: 13708 - DNA, 698 bp, Oryza sativa
ggatgtgtaacatccgctccaaacactatcgtaggacgatctgtcagaattggtattttcttgtgcaacgcatcttcaagtactgtatttcgccccccgacctaattgcaaaataaaaatgatattaatgtcttttgaactgcttgtagagtggttagtcataccatacaattaaacttcatcctaccttaacattcatttttagggccagattttcaagatactgtttcccacctttctgaagactcttgggtgcacagcattgagttatcacaccaacctctgtttcacaaattcgttttatccttcctacatatgtaatgagtatcagaaacttaaattcaaattgaatcacctgcatgagaatgcatcaagagcttaccataagaaccactaatttcagtcaatattacaattaataactgaagttgctgccctgtcaggtcttgctggtcaagcttttctgaagattgcctatggatatttctgattgcaccctcgatgttgcgttgctgtccttgtatgatatccacacatggtctcgtattcatttgctacaaacagaaatggataaagtcaaccagtgaatattttagtgacaaaagtatacttacaaaaataaatttacggatttctttaaggagtaatttaccatgccaatattattgcacatgccaaacaggtcttcacaaaacggc

SEQ ID NO: 13709 - DNA, 5207 bp, Oryza sativa
aaatccttgcacaaggttttgtcaggcttgcatattcttactgttaggattcattaatttacggtagaatggccgaagaaacttgtcatcatgtttctgcctattcggtcttccatgcattaagtatcaaagtgaagccaaaacgatgcgcttgaagctccttttcattctgagagcatgaccttgacagcaatttttccatggattggcctgactgaaacaagaacacggcacatttattcgatgaaccaaatagccagtcatgaacatcccataggacctctactggaagtccatcaacatagactgtctggtttcctctgaacttccatgcaagtctcttcacctgcatgactctcttcttgccaatcctgatttctaggcttggatccttcaaccccgatgtgtcacactctatggtgatatggtggagctgaccaatgtccaaaaaccgggccttcgctgaatacaccttcttcccataaacatgttccttcctggctatcatgacagcattggaggccaatacatctgacgaaaccctgtgatccccatccttgcgcatgtcgccgagcacaagaacagcttcaagatcacagaccagggcaacatagaagccttcgacgggttctggcccggccgcaaacttcgcagaggacaggtcccagacgatatccagtgctccaccatcgacctccatggccttggaacctttcctcttggagaacagccatggctttatctctgccttgcaaaggcaacgattcgaggagtcgtcgactgcgacggacagagcctgccccatggtcatcttgctccaggtgacggtcacgctgcaagatttgccacggaggcgggctaggtaggtgcactgcaccatgttctggccacctggagaagaggaatgggcgacctggacgccgctttgacttaagcaagatgcaaagtctctcatcgtgacgatggcgacggttgcaagttgcacgcccaccttctcctttgcggctttctgacgaacacctcgtgcgcaaccgccctacttatcactcacaccgtcacacgcacactccgagcaggctgttcccctcggttggaatctggattcaaaacatctgcttgctccgactgacggctgaaaagaagtgaggaaaaaacgatgcatcaaatccgcatctttgcgctcgatatcccaagatttccccccaatcaaatccacgcctgttaacctggaatctgaaacaacagcagcaccgcaaacaaatcaagaacccgaagaacggaacatcatttaggaactcccagagatcaaccagagaaggagcagccatacctttccccccgacgaaatcaagaacaccaccggcgaagaacggagcagcgggagcctcagcaatcagcagcggacactacagagcaaagccggtgggcggccgttttcacctggccggctgcgccaagaagaatcaccacccacccaaccgctccacaagcgaacgtgctccttcccctccctccctacccctcaggagcagtaaaccagcgccatcagcaacaacagcaccatcatctctctcgctctcgctctcgcttggtccgttaagcttcgcacttcacagcagtacaggagtaggagtacttctgtttgtagcgtaggaggctcaaccaaaagcagaagagggcgggaggaagaagacaaggggaggggtgcgactgcgagggcgaccgccaccagcagcagcgtggcgttggggaatgtgggcagcagaaaagacgcggaggcagacaggcaggcagcaagcggccgaggcagacagggcaggctcttgggtgtcgggaggtggagggcgcggctgcactgtccagtcgcagcgagaggtcgccttcctcgcggacatgtgagctccacctgttcgcacttcgcaggcacggcctaaaaccccgtattatacgggaaactttggtcttctcgtatggaaaatgtgttgtgtagagagggagatgagaggtgccgatcacaatacagtgtcacgttgtatacagtgtatgccaggaacttcgatcgacataggtagtcctcgttcttttcttagcatatcatgtcggtttggaactttggataggaactctatgccgtaagagcaagtttaatagtatagccaactactagctctaattttactgagcaaggttaacggtgattttactgagcagatcatgccaaccagaggattgcgtcaaggggatccgatttcgccgtacctgtttttgatatgtgcagaaggattttcgtccctgttgaatgctgctgaagaacgaggcgacctggaggcgacctgacgggggtgagagtatgtcaaaatgcgccaagtattaatcatctcttgtttgcggatgactcattgctgctcctaaaggctgatgaacggagcgcggggtatctgcagaatgtgttgtctctgtatgaaaaatgctctggccagactatcaacaaggagaaaagttaagttatatttagcagaaacacgagggaatctaagagggagtcttttagatatgccttagatatcggggttgaagcatggaatgaaaaatatctggggttgccagtgtatatggggagatcaaagaaaaagaccttcaattatttgaaggagagggtctggaagaagatacaaggctggaaggagaagttgttgtcgcgtgccgggaaggatattttgatcaaagctgtggcacaagctattccagcttttgcaatgtcatgttttgacctgacaaaaaccctttacgatgaaataagcagtttgatctcccgtttcttttgggcacagcatgatcgggaaaacaaaatgcattggattgcctgggacaaactatgcagtcgaacggaaaaagggggcctgggatacagagacctccaccttttcaatctagcgatgttagcccatcaagcgtggcggctcctttccaatctagactcattgtgcgcaagagtgttaaaggccaaatatttcccagatgggaagcttatggaggttagagaaagtccgggcatctcatattcttggagaagtattgttcggggggtgcaggtgttgaaggttggcctaatctggcgtgttggtgatggtaccgacatagatatgtggaacgacccatggatccccttgggtacaaccaagaggccaattaccccaaggagagggatcgttctgaacaaagttgctgacttaattaatccaattaccggagaatgggatagagagttgatccaggatatattctgggaggaggatgtgaaaaacattctagccatcccagttcataatggctatagcgatgttgcagcatggcattttgacccaaggggcattttttcggtgaagtcggcataccacactctggaatatcagcgtgatcgtcaggcaatacgacaaacaggtgaatcttcatcggggaaaacgagcagtgcagcccttcagtgggagaagctatggagactgaatcaccttcctaaggtgaagcatttcctgtggcgcttagcgcacaacagtttgccactccgtcagaatatcagtaaaagaggtatggagatcgatacaaggtgcccagtctgcctccggttagatgagaatggtggccactgtttcttcaagtgcaaatttgtcaaaccttgttggcgcatgctgaactttgagcacattaggcaggagctttctcttcagacttctacgttggatgtatgtaagcacattctgaatttgagagaagacattatgttaacgactgtcatactgctctggaattggtgggatgcaagaaacaaagtgaatgctggggaggataggagaacgcatgaagaggtatatagcagagtcataaggatggtgtcagaaaactccttgctctttcgggacaaagctcggggaaatcctagcagtcaaagtacatggtgtccgcctccccagtgtgttctaaagctgaacattgatggtgctttccaggcggctaatctaagtggtggttggggctttatcctccgggaccatgaggggaatggggtactggctagagcaggacgaatcgaactggtgcatgatgcgcttagcgcggaagccgtcgcttgtctgcatgccttgcgtgctgttctaaatcatggtttttcgtatttctctgttgaaacagatagctccatcctggtgagcgcactggactccgcttgctacgaccagtctacggcgggcgtgacttttaaacaaattagaactctgctccgtatggacttaggtatgatcaaggtgtcttttgctaatcattcatgtaatagttgtgctcatgaactggcccggaaaggggctagttgggacccgtgtcatatgtccatatgggcagaccccctcccggattttgtacagtgttttgtggttcgtgattacactgaaccaaggtattaataaagagcacgtttcctgtcaaaaaaaaaactactagctctagtttatctatagtcaatctaagagcgggtacaatagcaaactattagccagctataaacatattttaatgagataaaggacgagagagaagagcagctgtcggtgatatgggaccgggggtatcgagaccagaggcttgaggcagacacaatcgcccacgtggcctggcaccctcggggacgtcgggcccaagggtgaggtgtccgccctcctcttgatttccccgaggggggtcgggtgactcctgtcccggccccgagggccgaggcgccccgaccccttgagggtttttgcgtcacatatatgggttaggtgaacacggcagggctcatctaaccgcatttattgcggtctggtcaagcgtgtcacgctgcatgcagcgcagtgcagcgcgttcctttatccggtctgtgaccagtcacagaccggtcagatcacgggttaggtggcgactggcggtctgacgcacgcctcgccccatcccgtcaagacgagagcctctaggcactcgtctctagccggagctagcgtgttgcctctcagagatggcacgttaccttcggtcagatatataccaggcttcatcccaaccattacaggaaaaatgttacatgaagaagggcgaacatgcacgttgctaaactgacgcgtggtggacaaggatgactgatctgtgaccggactgacactggacgcgtcatccacagacag

SEQ ID NO: 13710 - DNA, 1344 bp, Oryza sativa
acccgcacggcgtcgcgccggctccagcgtgcggcgttgcagggggcacgcgggaagcgcgccgaagcggaggagaggagaggggaagcgggcggcggcggagggccgaggaggcgcggagcaggacgcccgctgcggctggcggtggcggcggcgcggcaggggagaggaggggaggcgagggaagccatggagggagagaggggggaaggggaggaggcgtggggtgcgtttgactgtcagccacccatcatcgccattgatgacgtggcaggaaggagctcctggaagacctacggatggtgtcggtgagtgacgatggaagatgagaaccgtgcgtttgttatcctatggctgcggagaggaaggtacagcccaatcatttagcttattcggggaagaagccaaacaatatatttatacaaacgaaatataatttataaataaaacttttatgtacgtgtttttagtgatgaaaaataaaattcgatgaaaaacccctaaaatcagcttcagattaaatgttgaaaaattaaattttggctaataagtataagcataagttgcgtcaaaatgagaagaaaaatataaaacttacttaaaagtgaaatttaccagaaattacatttgttttcacatattactagaaatatgatatatttacaatacaaatacaccatcgtaaagaaagtgaactgcaagttcgatatacacatttgaaagaaaaaggaaaaaaaatatagatctatttggtcgagtttgacttgaaattttgtacaacggtactttattcaatcataaatatttgatgtttaaaaaatatttactttttaagatgacattttgtattagaatttttttagagtaagtttacaaaatacaataaattttatgatattattataggagttcttatggtgaatctatgtacagtatttttttaaaaaaccaaacatttgagaaacaattgtgattggaattttaagtttgattaaatcttatcttaaaagaatatatttcaccatgcactctgtcatcgtttttcagaattgctccgtaacaatctgatttgaatttgagaaaccccatataataaacttttcactcgtcatcaccgcgtgtcgtcgtctgaaatttgagaaccgccaaaatttttacttggcctccctctcgtcgtttctccagctgcccttcatcctcggccccgtcgggccctcgccgacgaagacgctctcgacgagcttccgcagccgctccctcgtcgaccgcggcagcagcttcgccacgcggttgatctcgcggccgatgtcgtactcctccttcggcccccactcccggtcgaac

SEQ ID NO: 13711 - DNA, 4246 bp, Oryza sativa
cgtacaccttcgcgccggcgaggtcgcccttcttgacccgctccctctggaagttgtccaccggcaggtcgagccagtacccgccgtcgttgccgccgccctgcgggaggttcgacccgtcggcggcgaccggcgtcggggtctggctacccttctggtacagcagcgcgccgttctggaagaaccacgtcaccgacgacggcaggtagggctcgtcggggtggaggaacagctgcggcgcgtaggcggcgaggagcgcgttcacctgggcgaggtcgggcatgcaggacgtgtacgccgcgccgttgttcttgaggcacgccagcgccgacgcgctacccgccgtcgcgtcgctcctggcgaggacgaacgtgccggcgtgcacgccgcgggcgtccacgccgcgaaccgccggcctcagggcgacggcgctgaacccgtccttgtcccacaccgtcgcctccgcctcgcacgcgtcggtgaagtcggcgcggacgcacgcgacctcgtcgcgcggcggcttgtccggcgaggccgtgaccgcgacgccgatcgccctgtagccatcgggaggcgtggggagccagaagtgggcggcgtcgtcctggctggaccagacgggcgcgtagtccagcggcggggcaaggagcccgccgccggagacgtcgcgggcgacgaggacgtggccgaagagcggcccggtcgttgcgctgcgcgtagtggccgagggcgctgaagccggcggggacctgctccggcctgaagaaggtggcgccgccgccgtcttggccggtggaccagaccttggcaaacgtggtgacttggcgcacctctagaccaccaaggtcaatgctaccctttgcaaatcctccatctgaaactgaaaattcagaaaggccagtcagcatctcgaaaagaaaaagaagcaagcaagcaagcaaacaaacaaacgccagtcagacaaagatgttacagagttgacaaaaccacaaaactgggcctatcaaaatggcaggccataactaagaatagaaattcgtttagccaagtgtttatagagctgaaaaaattagcaagtcataatgatagcaacagagagcagaaatggtctattcaagttgtggtgttctggatagagatgcgcatttgtcttccaaacaaccctggctagctagatgaaggcataagattatgctggtatatgctttctattctcatttgataacatatatattctttggaaatcatggttatcagtgtctgttcagaaaagggcacaccaatacgagcatttcagagcaaccgaggactagaggaggatcttgtagcccatgaatatagcaaagtatgttcctagtcgtcattgcaggtaagctacctcgccagcatcgcctaaagctgccttatttgcatttagccatataactcctgcatttgccatgcatgtatttttctctggatatgttccaatcatattggacttgtagtcaagaggaaaattaatgatgaatgcgtgatcaggacaagattgaaaaaaataataataatcagaatttgctaagtggagctgtgcgtgagaagaacagtaaccgagtatcgaaaggcaaaccttagtaatttagcaaaagaagcgaagtgctgtaatgatcaggatcaccaagttttgcaagaaatcaattccattcgagaggtacacaaaaccattcgtgcaaataataacataataaccagaagaacaaaaaaaaacacgaggtatgcacaaatatgcaatacgtacctgacgacggccacgacggcaacggagccggaagagagaacgccgtctcgatgggcagcgccgccgtgctggccatgggaaaacaaggcaaacaccacttgctccttcgcatagcacacacacaggacggggactaaccggagaaataattcaggctgttcctttcttccttcacttgcacagctatagagatcggagggaaagaagcaaaagagaggcaaatttaacgggcgagatctctgtccaggagacccttgtccctttcaacggcacagcgacttggcaaagacgactcgactccttcacagtcacaggcttggattagctagctagcttatcgtctacttctggcctatggttacttgcaagaaaccaatgtgctcctaagctctcagctctgcctgtgcggctgtgcctgatggcaatgacttcacttctagtgatccctacccgcatagcttggccgtctttaagaaggtgtggcttggcttgacggctcttccatctcccacgacacaagtctaatgcagacacactataattaatattgcatcgacgcatgtcagcgtcacttccatgaggaaaacacggcgatgttgtttagtgtttcttgcctgcctcaacttgtgtggatgcatgtgtgttagctggaggtcagcgtggacagacaggagtacatgacagtatgataggttcgttgtacaattgtactcttcctgaactgtagtatgatgtaccatatcattggaacaggagagaaaaaaacgtgctgcaaactgaacgttggtagcagcaaccagtaaccaccactacgcgccatgagctgcggttgttgcagactcgcggcaagattggttgggtcagataggcacaagtgacaaatgtggcatttctctaagcttctactatagataccgtaccatggctattggtcagataaggacttggtagtagttcacacgaatggcacgaggggaagctgaagctgacctgacctgatcagagaggtgtgctcggagttgaaaaattccggtgctgatgtggtggaggggagagctagcttgctgggacaagaaactgtgtcgagcaagtggattgcagttctggccttctgggttatctgcactctccagttgaacaatggaagtattcagattcatggagcaagaacagcagcatgctgctgtagactgctaaaaaaaattcagaaatgcttatctcgtagattgaaaggcaagggacattagaaacttgaaaaggatgtacaatgggaatatccgtttcttcgacatgcatatacatttagtcacatcaacttgggcattttcaggattaataactaactgttggtgacagactgaagaagtggatggcatgattttattctcatgcacaattatggaccattttctaatcattgagatgaacggatgtatgttccgtgaaaaacagtgcagaactttagttggaccgatccagaagtcacatgctgtagatcgaacacagtttatatattcccagcaaaaaatatgtaacaagagtagtttttcaactatctaaaaatattcccagcgaaaaagatatgaactttcatccctcgagggatgttccctcgttgtttgcatgtcatctaaatagttatcaaaaagtttaaaaaaatttgacaacgtagattaatatgaaatatatcactccacaaacatgcaagaccaaatttaacttctacaagttgcaacaaaaaaaacaaaaaaaaactgaaaatagttatcttacattcatagctatatttgttatttttgttacaacttgtagaagttgacttttaacttgcatgttttttgagtgatatatttcatattaatctatcttaccaattttttatgattatttaggtgacatatacgaaacgagaggatatcccctcaaggtatgaaatcactttctgagtgaaaaatccatgtctcatgtgctgcaacgccgttgcccaatttcgctgaccaaaccctcacgaagtggttggtataaatatggaaaacaaagacgaatgcataggataatatagagagcacaagttgtcatgtatgatggagataggcatggccaaaacactgggaaacattgtctccagataagatgagtatgagggacactagcccatgcagccatgctacagtgactttcagttcaacatcttttatccatcagcaaaattgaaatcatgttattcctttctttgggacattgaatacggatatttcctagattatgacaggcatactgcagatatacattgaataagcgcaaattaagcattcgattttgaagtatttggttttcattgctggtttattttggacaaacccacttggctagcatgcaaaatcgtgaactgaaaagagcgaagatttcagggtggccataagagaattaatttactgaggggactgctaatactagtggcatatatat

SEQ ID NO: 13712 - DNA, 899 bp, Oryza sativa
aaagccctcctctttgtctaaataatagaataaactcaaaataacaaaataaaatacttgataatgattattagtaaatttttgaaattttgaaattatcttttgtattatgccgtatctttgagtgctttgtttgcaataataagtaaataatataaaatccaaaaaagtataaatttttttaacctaaattctattgattataaaccccaattttatcacaagtgaagaaaagttaaatctaattgaaaacttgaactaaagtaactgagtacacttttcaacatttatcttatattctgtaaacaaatactccctccgtttcacaaagtaagtcattataacatttcccacattcatattgatgttaatgaatctagatagatatatatatgtctagattcattaacatcaatatgaatatgggaaatactagaatgacttacattgtgaaacggaggaagtagttatcttcttaaaaagatattaaaaatgtttttctttcctcgaaagggtcatttcccaaaaatcgtaaattcaaacctttggttttaaatacaaattcaggaactcaaatatattatattattaaaacagctttgaaaggaggtaccacgtttgctgtgggggctaaaaattttcacattaatcggagaaaaagaaaaagaaaagaaaagaagagtccaagtagaaatacaatctaaaaatagctgaaattcggaattaaaaataagcaatattgaaggaagtttccatataggaaccccatacgagatttatttaaatttcgaaataaaattaaattaaatctaaatttgaaaaaaaaagagagagtcccagttgaaataaaatttaaaaatagcctgaattccgaattaaaaataacgaatattgaaaaa

SEQ ID NO: 13713 - DNA, 962 bp, Oryza sativa
tgttaaattttggtgtacttgtcttgcaggagcacttcaaaaaatactatgatgcagtgatgccatacctgaaagctattttaatgaatgcaactgataagtccaataggatgcttcgtgccaagtctatggagtgtataagtctggtcggaatggctgtaggcaaggataagttcagggatgacgcaaagcaggtaattgtgtcttctccactgtaattttgctctgtatgctatgttctatgcatgcacttttctaatctacacattgattgataggtcatggaagtacttatgagtttgcaaggaactacaatggaaaatgatgatccaataacaagctacatgcttcaggtacacataaaacctattatgaattaatcataataaaattcagatcctttgtaacattttctcctttatgtgacaggcttgggccaggttatgcaaatgtctcgggcaggattttcttccgtacatgaacgttgttatgccaccactgcttcagtctgctcaactgaagcctgatgtcacaattacttcagctgaatctgatgatgatatagaatcagatgatgataggtttgtgcatcttcttcaattgctatgttttatccactgaattaaatatgcccttaatattgatgctgtgtcagaggcattctatttaaatttatctatggttcattctttcttaagaagtactatttgtttctataccatactgaatgtaattacatacacttcgttcatagaaggttcctttttttcgtgaaactcgtgcctgtttatatttccgttatcaacctttttttttttgggttagtgggactgcaacttgcaatagctaccttatgcttgtaatatgtttccctattgattatcttttttcttttgcaatttgatttgttcagaaatatatcatccttttttatgtgaggtgtggtggttgtttttagcttc

SEQ ID NO: 13714 - DNA, 7018 bp, Oryza sativa
  unsure (1)..(7018): unsure at all n locations
acatcttttatccatcagcaaaatgaaatcatgttattcctttctttgggacattgaatacggatatttcctagattatgacaggcatactgcagatatacattgaataagcgcaaattaagcattcgattttgaagtatttggttttcattgctggtttattttggacaaacccacttggctagcatgcaaaatcgtgaactgaaaagagcgaagatttcagggtggccataagagaattaatttactgaggggactgctaatactagtggcatatatatacatactgtcagattacaagtaagaatgattgcagagagaatagtggaaatttcacatttatgaacttgccattattttcgttataacttaaaaacagaataaaacctccatgctgctggtactaacccctctgctttgagaagacaggttctttgttccctccaataagtcagattccttcgtcatcccttgaaattcaatcagtcaggtgtgttatcaccaatactcaaatgcaagtactgcaaagcacagtacaaaactaaaattacatttccatttcccagagtcagttacacacaaacttgcgactgtatggctaaagaaacacttaccatggcctacaaagaagggaccatctggtatcctgagataaaatagttgttcccgttttccagcaaaccagattttagtgggtcaggggctttaatacaaagagaaagcagccccagccatgtgctaactatggcgtgtaacaaatgattcgacaagtggatttacaaggtcaggtgcttcatcctgcaaggaaaattataaacaaatgattcagctgccaacttatcaaataaaatatagctaaaagcaaagcaaattgcaaaaaagaattaatcaactgatttcagctgttacaggacctgtgggcagtgtccaacatttggcaagacaacaaaatcttcaacagtatcaaaagatgcgtaagctcttccaagctccacaggctcccatgggtccttctcaccccaagctaccaaaactggacactgcaaaaaaaaaaaaaaatcatatatagttgatataaccgaaataagttctaaaaaaacaaagtgaataatcactcacagaaccacaggaaacctaaccttcactctgggaagtaattcttcaggtagaggacctcctgagtagcagatgaactcaaggaatacatccacagcaccagggtcaagccctggctgcagaataaactgaactagctcatctgtcactgcggatgtgtcatggtagcactgaaatgaattccatcagaactaggagaaaaaacattgtggaaaaaaggttacagttatgttacaaactaaataaagggaaaaaaacaggttctatacttaagatgatgaattaaagattttctttctacagaatgcagccattggagcaaggtcatgtggcttttacttaatttgggacgttaagcctgaatgttgtgttaccatagatttttgtatatgcccaataatctgcttatgctttgattattttccaagatgagaggattaaataaatatacacctgacagagaatatttttcacagattctggtgtagcaacagcgctgaagaacagcttcccaataacagtattcctaaaaaccagaaaagggattgtaacaaggaggtaacaagtatgtggatcccgcaacaaactatgaaattctgagttaccgtagcagactttggaatgatttgatgaaaggccttccaaaccatggctgcttactgatatgaagcatcctcaatgaaatattcaataaaaagatacccttgcacttctgtggttccatagcagctgcctgtagaccaacaagccctgaaggacaataataaacacattacaagtgcttgttaaattctttttcatgcgtacaaatactcatcagtgacatgtatcactcgcacctcccctcaaaatttagaggtacatgaagagaacttgtctcatcttggacactactccaaatatcattctggagtagttactaggctaatacactctagtataatgaaaatcaatttccattgtgaagcatgagcgcatatgacatatctagttgatatcaccataattttgaacagcatcatgcacccactcactacagaaatactccctctagtcattaatatatgatgtttatatattaatgaccggagggggtaacagataggaacaacactactaaactagcatagacatcatttacggtcttcctttttccctactcaaatgtgttttctgaaataacaaagggaggaatttgaaaaatgttcttttggcagagtaagcaattttatggattacatcgagcgacatgcattcttatgctcgtccattagttacacatacaacatatgatccattgcatttcatgtatgatgtatgtaagcatggagctgagcatacctccaattgaattgcatatgaagaaagcttcgctcttaataacttcagcacaaaacgtattcagctgttctccccatgtctcaaaagtataaaagctctcaccaagctcacgtggattaggcttatcagaatagccataaccaataagatcaattgcatatactctgtttttcagagcaagaacaggaatatttttccgccaatggtcactggaaaaaaaaaagaggggagtctgtacatgattgctaagcaaagtgatggggtgttttttgacgcagaaaagtgatgtagtgtgataattaaaaaacaaacactagtagtccccattattgtatcaaatcaaactattggaaaagtaatgcagcttgaggtttcatcataaaaccaacatttaacacagcccaagatttaacaataactaaggattacatgtgatcagtgatcactaaccaaaaaattctcaaaatattaggtccaacatttcttctcctaaacctttacaacatagaactacagaagcatctaaaaaacagttgcagcaacagctactgcactgccatggccttaagctaactccccattggcatgataactgaaaattttagtttggttgcctgcagatatgaaacagaaagtccacgcacctgtttgctccgaaaccatgaattagaaccaatgcagggccagaagttcccgcgtactggtaccgaatgttgtagcccttccaattccacatgctacgcaaacaagatggtaatttagaaaccagaaatacgagaaactggaactctgtaagcaaggtcacacgcaaaataactcagggtaacacttgaactatagactggagtgggggagtggagacttgtgcctacctggtgcgcacctggggctgagtctccaacggagcatccgtggccgtgtgcggcgccgcggggaggctctcctcgaccgggtcggccatggaggaggcctcgacacgcagcagccgcgcccgcgcccgcgccgcgttccccgaggagagcctcgccccggcctccaggtagtgcgccgcgccgactacgcggggcagaagtcggcggcggcggtggcggaggaacccgtgccacggcgcgcggagagggtggtggccactggaggacgtgccgccgcgccgctcgtcgccatccccgacggccgcacgcaacgcaactacgcgggggcaccgggctgtgtggagcgtggaggagagtcganacgagagagtaagagaaagggatcggtgacggtgagaaaaagcgtgacttgtctgcacggcgtttcgccgcgtgggcgaaacggaacggaagaaaaagtgcgcgcgtgcgtgtgcgtgcgtgcggcccaggtggtttcgctggtccgtcacgccagtggacgcgtgggccaagaggccgggacgtatttgggccgaggcagtaaatcactccgcgggccgtagggatgcggcggctaacgtatttggtctgggctacgtgcacgggcgcacggctgctctattgtgcatgggccatctattattaccaggtggcccaatgtacagacgcatgctactactaccagagagttataagaggggaccacctatacatttggcgacaaattttctcctaaaaatttgacagatgtaattgtagtacaatcgtagtataattacactgtaacttatatgtaattacactgtaacttgtatgtaactacagtgtaacttgtgtaattttgaatcgttatatctattacaagatttgttttggtgaggaagaaaaaaaatcacggcacacacatatgtataaggatttgttcccacaacctccattttaccgaaataacatattacagaaagatttttgaaagttacatacaagttacactatagttacagtgtaattacatgcaagttacagtgtaattacactacgattgtactgtaattacatctgtcaaatttttgggagaaaatttgtcgataaatatatagcaaaatcgtataagagttaagaccacattgaagtttgaacacacttgaggtgtgtttggataatggaaaatggagggtgggattgggattgggaaataaatgaagggttagattaaatggaagagggagaatgaatagttaggatttaaagatatcttttgatggatggaaaattatttccctatcacattatccaaataatgccttgatgtggtatggactcatagcggactcggattacaaacagatcggatagttcatacatgtataaataagacgttttaatttttttacaatcaaatttataaaaaaaaattagcaaatttaaacattaaattagttttattaaatctaacgttaaatatatttaattatgtttgttttgtattgaaaatgttactatattttttcataaatttggtcaaatttaaaatttttttactacgtacacaataacttagaaacaacgaaacaagctactctcaagtctcaacctagcgaaagagtctctcaaagttttaaaaagacagattagtcatttgaatagactataatggtgtatggttcaatcatagggtgtgatgatatgcccttacaaatatcagattatcttaaatagcactttgtcgaataatccgcgtaaaaaaattaaacaatccacatccatcggattacagtaataccatatctttatctatctccgtcaaattttagatacctaccatatatcctcatttcgggtacggatgggatcgaaaagtatccgatttattttcgtcccttatcattgatgaggttgactgctggacctacaccaataatccaactagaaaacgagcagtggccagtggagatgtggaggtacaggcgtaagaatgacgagcaggtgagcgtgcagccgtcaggtggctgcgcactgttcgtttgactattggctagggaatctcttcgactaatctttcttcccgtctcaaacaatcactgacctgaaacaacacacgactagttcagctgaaaacgcagccacgcaagtcgcgcggaataatagaattgatcacactttgttcagagtcaaaattgtcaatcattggacattccagctcgttcatgagctggtcgtgcatcttgaacatcagaacatgcccttaatttacacgtagcttaatcaagtttggagatctcatctgacctgagcatggtgtgattcgtttgtcacactcacaatgcaactccacagcaaaacgatgctcgttgtgttcatcaatatcgtgttcatccactgccttagcgtgaacattggagcggcggtggccaaccctgcagccagcgatggccggttcgtccaccacggcttcacggcggaggacctcaccatggacggcctcgccgccgtcacgccgaccgggctcctcgcgctcaccaacgccacgtaccaaacgaaagcccacgcgttccaccctgcgcctctccgcttcctcaacacgtcgtcgtccgccgccgccaccgtgcggtccttctcgacgtcgttcgtgttcgccatcgtgtccgacgaccccaggttcaggaacaacgtcgaccatgggctcgcgttcgtggtctccccgaccaagaacctctccacggcgaacgccggccagtacctgggcctcctcagcatggccgacgacggcaagccgagcaaccacgtgttcgccgtcgagctcgacatcatcacgaaccccgagttcggcgacatcgacagcaaccacgtcggcgtcgacgtcaatagcctcaggtcgctgcaggcgaagaccgccggctactatgtcgacggcgacggcgcgttccggagcctgcagctcaacagccagaagccaatgcaggtgtgggtggactacgacggccaggccaagcagctcaacgtgacgctgtctcccgtgcaagtgcccaagcccaagaagcctctgctctcccaagccatcgacctctccacggtcatggccgaggagatgtacgtcggcttctcgtcggcgacgggcgtcgtgttcacgcaccactacgtcctcggatggagcttcagcttcgacggcggagctgctccctcactggacttctccatgctgcccaaggtgccacgagtgggtcctacacgtcggtcagtaatgctgtatgttgtgttgccgattgccagtgcactactgtttcttgttgcgtttgttctgggtgtcttcttcgtgagaaggtggcaccgccagtttgcggaggtgcgcgaagattgggaggttgagtttggtccgcatcggttcacatacaaggatctgtttcatgctacgcagggattcacagacaagaacctactcggtgcggaagggtttgggagcgtgtacaagggtgtgcttcccgtgtccaatacagagatagcggtgaaacgggtgtcacacaattcaagacaagggatgagagagtttattgctgaggtggtaagcatcggccgtatccgacaccggaacatcgtgcggctcctgggttactgtcggcgcaagggagaacttctccttgtttatgactacaagacaaatggtagtcttg

SEQ ID NO: 13715 - DNA, 2493 bp, Oryza sativa
ggatcatggagccaatgcaaagaccacatacgtggtaggaactatgggttacattgcccagagctcatgcacacggggaaggcaacaccgttgacggacgtgttcgcgttcggtgtgttcctcctcgaggtcacctgtggacgaaggccgattggggaaagcgatagcaacgagattctattaatagattgggtgctgaagcattttcttagcggatccatccttaacgtggtggatccccggcttgcagggaggttcagcttcgaggaggtgaatcttgttttgaaactaggactaatgtgctcacatccattgcccaaggcaaggccaagcatggacaaagttgtgaagtacctcgatggtatgcttccagcaccagagctatcaccgacgcacatgagctataacatgatggagttgatgctacagaatggggttggttcacatagtttacccgtgtggtcctctttgttagataatagtgttggtacaatgtcatctgcttcggttctctcggacgggagatgattctgaagcttgtacccgatacttgtcagtgggctcggtaatcctttgtattttgttgttagtgaatgcaaacaattatgcacttttagagttcctatttttaatcatttttttcttgatagaagacacatatatactacacacgcatcgtaattgtgccctatttaacacacgaccagtagatatcagaggctgcgacaagcctaaggcagctaagacttgagccctagttttttttttaatttctattagattctataaaaaaaagtgaaattttttaagatacaagatgtgtaaacaagttgaaccggagtctcaagaagcataaaattcctatgctgatttagtactgctactgttgtattgcacatttatatgcttaaaagatgatatgaaattgacacatggtgtgggcaatgaagggtgtcacatttgaacttatgtgatttttatggagtttaaatttgactaaaatggagtggttcacaagtaagtttcattataaaggcattttgtagtatacgcaaaacgaggtgagccattagctcatgattaattgattattaattattttaaatttcaaaaaaggattaatatgatttttaaagcaactttcctatataatttttttccaaaaaacgcaccatttagtagtttgggaagcgtgcgcgtggaaaacgagatgtttttctctctcaatctcctagatctcccaggaagaacgaagcctaaggtatttatgggatttttctaggttatgaaaagaactagctgggttgcccacgcaattgcgcggctagcacccaaacaaaattatatattttttttatgattttactaaaaatttattaaatagctatcttattgtcttaagagtttgaaagaccaaaccttatcatccccatgtttctaattatatattattttaaaagtcacaccagatactaccccttatgtcatcttcttctttatttgcttgctcgatctaccactatttctattcattctccttagaacctttaaacattggatcttataggttttagagtttattttcacgttgagtttcgtttttataatttctagacgtcatgtcaaacgttgccattatactcctctatgacccgtctactatctcttctctttattgtcattgagattttaaaaatcaaacataattatcatttaggttcatttttactttctagaagtcccgccaaaccgtcagtgactttgccattgccattgtacttctctacggctcgcccgctacctcccttctttattgtcattgagattttaaaatcgaatatgattatcattgttttttttttactttttagaagttccgaaccttcaaaaattgaaccttgtagtttttagagtttattgtcttgttgggctttatttttttataatttttagaagtcttgtcaaacgatgtcactatgctcctctacggctcgtccgccgcctactctttattgtcattgggattctaaaaatcgaacataactatcgttggaattcattttttattttttagaagtcccgtcaaccgtcggcagctctgcaactatactcctatacaccccgcccactgcttctcctttttattgtcattgagattttaaaaatcaaatatgattatcaatggggtttattttttttactttctagaagtcccggcaatcgccttgatcgtttgctttacggcctccctgtcgcccctccttttaatcgtcattaggattctatttggtgtttcattaacaatttttttatgtcgtatcaaccgccaccactctactcctttatatgcctgttacttaatttatctcgtcatgtgttttacatggtcttttctttcaatagtctttatttttatcacaaattttagttatttataaattgtattcttaattggaatcttatttttcttttttctaatttcagattttttta

SEQ ID NO: 13716 - DNA, 8360 bp, Oryza sativa
  unsure (1)..(8360): unsure at all n locations
ctgcagcccattgaaaggctctgcacgttcatggctgatgcatctcccccctactcgatttcttcgtgggcagacctgtggcagcaattcgtcaccaacttccaaggaacttacaagcgccacgcgatcgaagacgacctacatgcgttgacatagaacccgggtgaatccttgagggattatgttcgacactttaatgagtgcagaaatacaatccccgaaatcaccgacgcttctgtaattcgcgctttcaagtccggtgtcagagattgctatactactcaggagttggcaatgaggcacgtcacgactacttggagattattcgaaattgtcgatcgatgcgctcatgctgacgacgcactgagacgcaagaacgacaaaccgaagaccagaggagagaagaaaccagccaaggacgcacctgagtcaagtaagaagaaaaatcgcaagagtgggaaaaggaaggctcaagcggaagttctcgcaacagaatacgtggaccctcccaagcgcccagacccacaaggcagcgacgcgaagaaaatatggtgccctatacacaagtcagatagacactctctagaagattgcctcgtcttcaaaaagtcgctcgcaaaacacatggcattggaaaaaggcaagcgagtacgtgtggtcgagaaggacgctgaggcggttactcaggaatcagactcagcatatccagactccgatcagcatatccagactccgatctccatgtttcgcacatcttcggaggttccacggcatactcctcaaagcgagaatacaagaaggtggaacgtgaagtctgttcgatgtggcaggaggctgcgcccaagatgaagtggtccgaacagaagatagtattctcagaagaggaccaccccaagactgctatcatcccagggcgatatctgatcgtggtagaacccactattcggaatatcaaggtcgcacgagttctgatcgacggcggcagctcaatcaaccttctcttcgccagtgccttggacgcgatggggatcccacgaagcaagttgacacccaccgatcaacccttccatggaatcactcctcagtcatcgtccaaaccattgggcaaaattacgttgcctgtgactttcggccaagcaaataacttccgaacggaacagatcacctttgatgtcgctgaattcgatacagcatacaatgccatcattgggagaattgcacttgcgaagttcatggccgcatctcactacacgtatcaagtgctcaagatgccaggaccgaagggaacaatcactattctagggaatactaagctggcaatacaatgcgacaagcggagccttgacatggtcgagcacacgcccagcccacccgccacagctgagccacccaagaaagtgagcaaaacaaacaagacgccgaaaccggacggcgcaatcaagatcgttccactctccagtgccaaccccgacaagaccgtcaagatcggggcatcactaggcgagaaataggaactcgcgcttatcaccttcctccgcgacaaatgctgacgtgttcgcttggcagccgtccgacatgccgggggtacccagggaggtgattgagcacaaactcatggtgcgacccgatgccaagccagtaaagcaaaaactgcggagatttgcaccagatcgaaaacaagccatacaagaagaacttgacaaacttctcaaagccggttttatcagagaggtactccatccagagtggctagccaacccagtcatggtgtggaaggccaatgggaaatggataatgtgtgtcgatttcatcgacctcaacaaggcgtgtcccaaggatcacttccctcttcctcaaatagaccaactggtggactcaacagccggtttgtgagttgttgagctttctcgacgcttactccggttaccaccaaatcagcatggcgaaagaggacgacgagaagacagcattcatcacgccgttcggggtattctgctacgttaagatgccgttcggactaataaccgcaggaaacactttccagcgcacggtccaaggtgcacttagcgaccagctcgaaaacaatgtcgaagcctacgtcgatgacattgttgtcaagaccaagacaagcgactcattgattgacgatctgcgggaaacgttcgacaacctccgacaatatcgcctcatgctcaatccagagaagtgcacgttcggagtaccatcgggcaagctactcggcttcctcgtctctggcagaggaatagaagcaaatcccgggaagatcaaggcaatcgagaacatgaagtcgcctacaagactcaaggaagtacagaagctaatcggatgcatggcggcactaagcaggttcgtcgctaggatgggagaccgaggacaacctttcttcgctctgctgaaaaagcaagacaaatttgtatggacacaggaagccgaagaggcattcattgcactcaagcgctacctatcaaatccacctgtacttgttgccccccaacctaatgcagaattatttctctatattaccgccacgccatattccgttagcactgtcattgttgtcgagagagagaaggtgcaacgaccagtctactacgtcagcgaagctctccacgacgcaaagacaagatatccacagatccaaaaactgctctacgcggtaatcatgacatcaagaaagctacgccactacttccaagcccacagggtcacggtcgtatcctccttccctcttggtgaagtagtgagaaacaaagacgttgtcggccgcattgcaaaatgggtagtcgagctaagccagtttgannnnnnnnnnnnnnnnnnnnnnnnnnncaagtcccagctgtacttgccgacttcgtagccgattggcatatgcctgataacaggtcagataaccaaatccacaacgaaacgtggacaatggcgttcgacggcgcactcaatagccaaggagcaggggcaggattcatcttgacatcaccttcgagagatcaattcaagcatgcaattcacctcaacttcagggcgaccaataacacagccgagtacgaaggactactcgccgggataagagctacagctgcactcggagttaggcgactaattgtgaaaggggattccgaactagtcgcgaaccaggtgcataaagattacaagtgctctagccccgagttatccaagtatctcgcggaagtcaggaagctagaaaaaaggttcgatgggatcgaggtccgacatgtataccgtaaagacaacatcgaaccggatgatctagcacaacgtgcgtccagacgagagccacttgaacctgacacctttttggacatcctgacaaggccatcagtgaaagaggcaagcggcgaaggtagcccggtcgcccccaacatcagctcggggttacagaggcagaacacgccgttgccgatatcgagaccacagacgactggcgcaccccactcattaaattcataggcagtgaagagttgcccgaggacgacgcagaagccaagaaaatatcccgtaaagcaaaagtctactgtatgatcggcaacgatctatacaagaaggcaccaaacggggtactcctaaaatgcgtcttctccgacgacggcagacatctcctcctccacatatatgaagggatctgtgggtcacatgcagccgatcggacattagtcggaaaagcttttcgacaagggttcttctggccatccgccctcaaagacgcctgggacatggttcagcggtgtgaagcctatcaattccacagtaaacacacaaggctatcaccgcaagcactccagactatccctctcacttggccgttctcgtgctgggggctagatatactcgggccattcccacgaggacagggcggctacaggttcctattcgtggcgatcgacaaattcactaagcggattgaagcgacacccacgggggaaatcaaggccgacaatgccatcaaattcatcaaagggatattctgcagattcggattgccgcaccgtatcataacggacaacggctcccagttcatcagtgccgatttccaggattactgcattaggctgggagtcaagatctgcttcgcctcggtttctcaccctcagagcaatggacaagtcgagagggcaaacggcatagtactacaaggaatcaagacccgcgtctacgacaggctcatgtcacatgacaagaagtgggtcgaggaacttccatcagtactatgggtcgtgcgtaccacaccgacaacgtccaacaagtagacacccttcttccttatgtacggctcagaggccatgctccccaccgagctacgacatcacagtacacgagtacagaagtattccaatgaggatcaggaggagcagcgacacgacgatgtaaatctactcgaggaacatcgtgaatgaattgctgttcgagcagccagctaccaaaagggccttcgccgttaccacgagaaaagcatccgagcacgcacgctttcgatcggcgactacgtcctccgatgggttcaaagccaagcagggcgaaacaagctctcacccaaatgggaaggaccgtacacgatcacacaagttctgcggctaggtgcattcaaaattgcagacggcgatggtcgcgagttggcaaattcctggaacattgatcaattacgtaaattctatgtataagtcaatagtatccatacttgtaagacatcttacagcttcaataaagcctatttttcaggtccagaccacaatcaaagtgttccttcccgatgatcccttacccaaatgacacctagcgttgaaacctatcctcatgtccctttacgccgtcttgacaaggcctccgaggaacctaagggaacttcggctggggacgcccagagccgataaggccttgtcggatcctgttgagacgaaagaccatgtaagatctggtcgtgtaagagttctcgccgtgcgtattaaccaagccgtgtaaccggaaataaattttccaacttcacggctgggggctaggatcagtgctggttcaaccgaggcaggtcaaaggtccaaaagtcttatctcccgagaagaattctccgatgacaaggctgggggctagggagagtgtataacacaaacgactaattgaagtcgcgaagtgagaagacactcatacacgctaaatccagagtaagaaagcttagttagatagatttcttctctatttcacaagtacttcttacatttccatcaaaatccaaaattatattacactttttccctaagacatttgtcacaggacacggagactaccaggaaggccaacgccagtgattgactggaagaccttctccgccagcagcgccatcgacttcgctagaccatctatctccgtaggagttctccgagaacgagaaaacccttcgcggaggaactcgaggtgcagctgcggacgatgatctcgtatgcaagccaacacatgccccccggcatatcggcttgaccgacgacactcctgcttcaaggcttcgtcgatacgttgaccgatgccttcgagctgggtgcaggcgccattcagccacgagatatatccggccgccgattcctcaggatccccacggggtactcggaggtctctacagactctggacatggacgtgcagcaactctttagatatgagttgaaccacacctcacgaccccggagtgtctctacggcctgatccttcttcacttccagcatagtcctctcgagttccgcgacctcaaacttcatcctccaatactggatgcaacgatcctggtctgcgcagcatggaaacgattaagtcaagctgctcttctctcccgagaatacaacaaatcaagtcgacccagatggaagcgtaaaggaaatgataacaaagacaaccaacctaagggagtcgctgccatgctcgtttccacaggtgaattttgagctacatcgccctccggcgcatgcggctcgaacgcaagtaacggaacgaccactggcaactcaggctgcccgtgctgctggacatcctcgacatcaacatctctacaaacgacaacaaagtactcaagatcaaaatgctaaagaaagctaaggcgataactgcacacacaaaggcggttggaaccaataagagttttacaaagcatggctaaagagtacaagagagctaagatcctacgcttcaatagcgggaggacggactccccaggtcgccgacctcctccatcacatccttgctcgcatcgctagccgccccctgatccaagatcttccgcagatcgagttcaggatgtgccagcctcacacacgcaaggacatggcacaccccggtatagatcccgttgaacgtctcctctccgaccctggccgcgtgcttggaggggatcgcctccatcgccgttgccagttccgcaagcgaagacgtcaacgagaactcgtcgggattcgccgggatggtggccttgacgccacactccccggcgagctggtgcaggccggtgtaggtgacccacagtgagccacagatctccgacaagtggttctcaagctccgacatacggtgctcgagcccttgccgttgtcgctcattgccagccaccagctcccgcatcttctggaggtcctcgcgaacctccgctaaatcgcgcgccagccgatcggcgcgctcattcgccgacgatgccgccttcgcctccgcgatctcgcggccaataccgtgagcaccagcctcgaggaggcgccccatctcgacctggagctcctcccaggtgagaacggcagccagcagaccccgaccagccgcaagatcaatagctgggccgctaggtgtcgcctcgcggctcctgggcgcgaccacgacatccgtcgaggccatggcgtgtgacgcgctggaggtccctccagacccgtcttgcgccgccttcgcccgcgccgccctgcaaaaagccgcaactgaaacaggctacaaaaatttgatgaagagacaagacctcaaagtcatccacttacttctcgccaagcgtcattagccgctgccgtcgtggaggcgggggagacgcgtccgaggcctggagtacaaccgatatgatgtgaggtggaagttttccgactacacgatcaaagggcaggagaacttaccgagggggtgggcgtcttccgacggtgtccgaccacagaggagaatctcctcctctttttcggaacattgccgccactcgttgtggcagcggcagcggcagcgtcagacgcctccttggcgactttctccctcagcgacgccgccacctgatggtccacaagtggcccgatgatatcagtcagagggagagcctacgcttcatgaagtcataatgcgatcccggaagaaaaatgcaaaaggaccgctgagcacacttacattgatggtagcgtcgcgctcggctgcccctttctcgcaaggggggacggggacgttgctcgccgttgtcgggccactgatcatcagttagccgacgcggcgctccacggtggcgctgtccaagcctgtagatcgagaccagaatccgataagccgggaacaacacgcgcataagggagtcaatttaactaaaaaggaaaataccccgaggacaaacccgggtcgcgtcctctggctcagaataatcaaaggctggatgggctcgagcctgaagtggctggatccgcctaccgatgaagtcggcagcgacttcataccccgacaacccccgttctcggaggtcgtcaacgatatcgatgaaagattggagggatagggtcaaggcgggtttggtggcccaagtggaatcttgtctggttgctcctcaggaacaacgaagaccggatccgaatcctctatctgaagatagaaccacctcccccgccatttgctgcgagatgaggggaactggaaggggatgtgtcgcgacttcaggccatcccgaagtcggaaaccaacacacccggacacctttttaggttccatccagcgtaactcatagtaaaagaggaagaggtcaagaaacggctctaccccaatgtaggctccatccttcccgctttagtcgtatcacgcgacacgcctcacagccgttcgatcatgcctgtcgtcctgacgtacatccgcgtggtcgcgctctaatggctcaatgagaaggatcaacgtagtgcctgctgccttttttttaatagatatgtatgtctttttcctcttcaaataaagttttctctcaaattacttatccgatctataatccgattataccattatgttcattacaattaaatcttcacaacaagatcttacatgattatattatgatgaaaaaatatttatattt

SEQ ID NO: 13717 - DNA, 6423 bp, Oryza sativa
  unsure (1)..(6423): unsure at all n locations
tgtaatatagagcatctgttctaacatttgtacacacagcagaacaaaatcaacagatatcccaaatagtttatgtgcgtgccctgaggcatggtagtaaatttgatgtttattctaggaagaagaatgtattatatccataatcattactagtgggttactgggttgtcaaggcatttacagtttacaatgatctacggagtcaacgcttgttattacaatgagattttttttaatcacataagggcaaaactgtaagcatggttctctgcatacgtgggtcttcatatagaagggctacgcctagacccaattttagaagctgaaatgtccatataggtatggcgataacgcagcaaaaagcaaatatcaaacttgaaaaatagatatattccaaatttcaatatttgagttgaagtacccatgaagctccatttctgcagcagacaggaattgagagaatctagtagcaacatctgcaacgctctcgccaccatctggtgccattaagggatctacttcatctactgcccatacttctgcatactagcacatcatatcagacttagtaagttaaataaaagataagatcataagaatgtgaaaaagatgaacatgtgcttatgtggtgtggacgtgtgggattttggaaaagctaaaacctctgaaatagatatgcatgaccagtaatgcagttagggaccatattgccatttatttggaaagaaaaactccttctggagattaagatcttattatgattcattttagtgtccaacaaaaactgagctgaaaagaaggaaatggccttgtttttcttcttgttcattctgtaatcgtgaaaaagagatgaaacatctgtttcccgcatgtgaggatgaatagatttgtggtgggttgcaaccttgcgtgttgccactaacagtagacccactgatttgtggtagtctctgctggatgaatcattacttatcattataagaaatcatatgtaatttgcaatctaacataattccatagctacattattaaaaaccacatgcacaaatatcaaattgtacttaaaagatccagaagttccagaggtgctctgtgacggacccgaagccatgacgagataagataaccactgccgggaggatagctgggcggagtcggctgttagggacgaggggaattagactgggaagaagaacgtggggagagagattagactaattgatattagttgcttaatccaaatgatgatacaatccatccttatataaatggagggaaggacccanactaatcttatccaaccgactctaacccactgagctaccgtgtgtgtacgaggtgaggatgggatagcantttctcaaccggtaccttgggcctcgttctcatggcccaatgccaatgacatgctcgcaggtggcagattcactattaccaccattaggttcacttctttaataatagagattgatgttcatgtcaaacgtggtaaataaattatattcatctgaaaaggataattagacttttttgcaatgacaatgtaacaatgaacctctttctagtggtacagaccacagaggcaatcaatcctcgaatatccgtagaaaggctcagttaataacaacagattagagaactataatttgaaaattggcttggaagaagtcagccaccatttctttgcttacaacaagaatgatcttttcatcaattttaatagatgtaatttttttattcttttaatggaggatgtatttgttacataacatgtttttgcacaatttcttatagcttcatatgacaagctcggtctgtgaaaaccgctaaattttggagttagtttgaataagacaaacaaggagggcttgtttctaaaatcattcttttgggaaaaattgcttagagcttcatgaaagttccctaacttttgtcattagcttcaataagataaaagaacacaaagaaattcgagaatatcgggctttttcttgttctgctcagacaaacatgggaaagaaagtctgggcatttcttgttctgttcgttagaagatggcatttcgcaaaaattacagctaatataatgaggaaggaaaattattctgattcaaatgagttcctgtatttttttaaaaaaaaatcatgccagtgctattagttaaaataggtctcagtttgtaccaccaactgtaagtatgcttagttgtttatttatatatcgaattagagtctgcacagtttgatagatcagcaaaacacaccttctcatgtgaaagcaattcatgcgatggcccaaaatagcgttcccgaagttcaacagctggctgcaaagaaattattattaccttaagaaagcagaatagaaatgtaaaaggtgtttcaaaaggaaactccacactgcttttcacgtttgaatagctcaggaaacaaacatttggcaaagcaaaaaaattggacaatgttttggagttaatacatttcaaatttgtaaatcatacatttgaaggggatgattatagttattgaatggtagaagttagttggcatgcctctgttaggttcacaggtcttctctcctaccagattatttacaggtcttgctagctgtaaacttgttctaaagaatgacaagtttaaacagggtttactatgacttatgtaaacatgcccagggaaaaaaagggaaaacaaagaattgcataattgtttagagtgaattaaacaaaagactacatttgttcattttaacttttgcattaataagaactaagaagtgccagcgcatcacttaactccagcgaacagaagcaggtactcctgggaagtatcacattttaaatatcacacatggaaatatcagttgcatgtcttttttcatccttccatacaaaattgtctgcggcctggccctttttcaatctttatgcacgcaagttggacaataaatcagtaactaattataaaatcttactacacattcatgattatcatagataaaagaatccaaagcctatagggaaagttacaagttacaactcgaataaattccatgcgaaattacttgttcctaaacgttagaatatctatgctcacaaataactgcacaataaacagtgacagattttatatgcaggaccaaaccactcacaatgcagctgggagtatcaaaggggacaccaagcactctagcaacctctctggcagtctccatggtccgtgagaatggggaatatcggatctgaacagaatccagtggcacacccaattcctcaagctcctgcacgcaatcagtcccccaaaatcactatggcacatcctctccaagagctcatggagacacgactaatgcacaccaaatcggataccttacggagcgattcgccggccaagcgcgcctgctcgacgccctgcggcgccagcccaaactccggcttcgtgccgttctcctgcgaggattggagcagttagaaggaaagatccgaatcaaactaaactgctaactggacacgaagttcttggaggcaagaaattgaagaagggtgaagacagcgaggtgggatgcacggatcggtaccagggaggagacgatgatgccgcgctcgttggggacgctgcggccatggcggaggatccagtacctgttgcggaaggagggcgccggcgccggcggcgagctgctgccggagtcatccattcccccccaaatcaaagcacgtagtgacacccgctccaatcaaagagcggagtttagagccaaacgtttttcttttcttttttaatgttttcgctatgcaatggggatcaaattcctcattttccatagtactagctaattcttagctaattatgcgctaatgatctttctcgttttgcttgcgtacgaagatttcatcccaatcgaacaaatgaacacagcattaggcctagctcacctgtttggatgagtttaagattatgagaaacagctggcaaatagtcagcttctaagaatctggaatccagcttttagtttctagttcattttctggattctacaactacagcttttcataatctagataaaaactggactacaactacaactacaattatagtttctaattgtgggagaagctgcagaacccccaaacagcaccctattcctcaactccaaactttaactttgtcgttttccattagcacgctttttaatcatgtgcaacgaggtttcttgtaaaactcgttttacatgcaacaaaaatccatccccaaactggagatcgaatgtggttttttatgttgaaaaacacacccactgtttatcattcccaattgttctggataaagattttttatcaaataactaaaatgctcttaggatcgaataaatcaatactagctctcctgaacccttaggatgtgttgcacattccccttgccaaacctatgcagaaagctggtggtagtgagtccaacaacagcagcagcatccacatctgacgatgacgaatttttcgtctacaatagcgaccatattccacacaagcattcatgacccctagctgcatgacaacgatggtagcggtggcgattatattgcagtaaccgtggtgacttacactagcagcatatctccctcgttgtgcacttctccttacaccaaagccatgaggcatatgttagggttatgggtgaggtataccctctacccttcgatatgcgtcacatatcgatatggtatgcttgcgcgtatacggacgttttcggcataagttaaggaattacattatggagtccacagatgtaaggagtcctactcggatagaactgggtcgtcattgtatcatgtcgggtccgacgtctccgagtcctacttggagaccagttgacctgcggtataaaaggaaccccccgggaggaactaaggcatcgaatcttaccgccaacacatccaccacagcctacgaagccggagcttacaggaaccaagtcgccgggtgatctagtcgaatcaactcggctacgatctcgtcggtatcgtcgagttccattattccttttgtaatctgtggtttccatcatataatcccatatcaactggattagggctatgacctatcaaggggcctgaaccagtataatctttgttttctgcctgcttgatgtcgtattacgtagatcctcgtaccagcgtaccccaataccctctatatccggtctacgggtatcccccgtcgacagtggcgcgccaggtagggggacttggtgctcaaggttctactactatgacatctagcttcgtcgacaacagcgtcaacaccaacctcaaccaaggagttcctacttcaacaacactggtgtggactcaagtcggtgaaatcgtctttccggtttacaccacagtgctgatctcagctggtccgccaatggccgaaaatgagaacgcagtggctacaacccgggacgactccatgtcgaaggatcctcccgccgaagcagagatcggaacgtcgacgacatccgagcccgagaaggatcctagtgcggccaagccttgtctttccgacaggaatcacgagccgacgaggattacttccgaggtgacaaggtcctggtgtcctatccacaaaaccagaaaacacaccttgcaagcctgctgggtttttctcaacgtctatgctgaaattcgtgcatgcaaagagtgtggaattcagcgtacctctccaactcgtgatgtctattgtcctattcacaagacaaagaatcacgacctctcgagctgcaaggtctttctcagcgccatgaagatgccacctcctaaggtccagcagtcacgcatccccctcagggatgaggacaaggaacaaggagcgacgccgatttcagatcgatttgttggggtaatcgacatcgatccccacgaaccatcagtcttgcacctgctcgaagactatggttcatcgacaacgagtatgccgcgtgaggtattggctattgacgatgtcggcacgtcagcacgcaccaattcggaagcggagaatcaagtgactacaccggcccagcatatcagagccgtcaacgaaatattgagggaaactccctacgaccccgttctgaacaacgatctcgcacgatggacagaacggttacgggagtcagtgaccaacctcagcaacgcgttcgaagaggccgctgctgcagcacacccggaacagccaccaactggcgatgctaatggtgaaaatcctgaacaccgggaatcgcctcatcgagccacccctccacctcgcggcaccggtgatctccgcgatcacctgaatggccgccgagaggtgcgacgcacacgagacaacgagaaccattctcgacatcgcgtctcttcacggcgtcacgataacgaagatcgaggaggccgttcgagcgaagaccgaggccatgataa

SEQ ID NO: 13718 - DNA, 5839 bp, Oryza sativa
  unsure (1)..(5839): unsure at all n locations
gtggcagcgcacgccagatcttctccaatggtgagggtggtggcgatgacttctctggtggccaagcccacgccggcggcaaccgcgagggcaacgacggctggactggcggcaagaacgaaagagggcacggccgctggactgggggtggtggaggtggcggcgcccgccatgggtagccaaccctagctggaggctgggccttgggtttgttttaggaataagttcatctaaggtcccttaacttgtcaatgaatccgattttcgtccttcaacaccaaaaccagatacaacaggtccctcaactatcaaaaccggtgcagattaggtcactcgtggtttcgatggcggttttggctgacgtggcgcctacgtggctaatttgactcggtctcgatctgacatggcattgacgtggcgcttacgtagcaattatacctcgaaaaataataaaaaccacgggcccacatgtcagcttaaaaaaatgctggggcccacgtgggccccacatgtcattccctctcccctctcggctctccctcttcttcctcactcccgccgcctacgagctccgacgacaacggcggccgaagcatgccggagcacgggcgcacgtacaaggacgccaccgagaaggctcgccgcttccgcgtgttgaaggcgccattttcctttcctattgatcacagtaagtggtcacgggaaaactgtgagaaaaattcctttttgatgtcgattccaggggaagacaatcaagcaacaaagagaaagacaagaacgggggttggatgaagaagaagcaaaacgagcctcctttccacacaagctcgcggtggctggccgccgtcctctccagctcgctccgccaccatccagccaagcgcgctcgtccaccatctgcggagggccggagctcatcagtgggttgccgccgccactgtttcaactaattttgcctgccttttgagattgggaaattagttcagcggtaaagaaataaaggggaaaacagatgggataaacacggtacacgtagatgataagtagataagtacggtacagaggggggccgcctctcctcgcccggccgctgcgcgccgcggaggagggctccctgncnncnnctgcgcgggnggcctcctcnctgcccccctcctcatggtcctcctcctccncctcccgaagtgacacggccgacgggtcaggctcccggcggaaggggtcgggcacctcgagggagaatgcgaggcgttcggcacggatgggtggctccggctacgtcggcgggagaagcgacaacgtcggcagcagcagcgaggcatcgggcatcgggcgctcggaagccatgggggatgggagcgagcagggctagtgggtcaccaccggaggcatggcggcggattgggcgagaggtcgccggttcggcgaggtcaatggaggaggacggtggcatgagcaccgacgcccaactcctcttcaccggcccccgcagtcgccagagccatgcctccgtcgcgagagaggagaggggagagagagttgatgagaggggatggggagagaggaagaagggggttgagaatgacatgtggggcccgcgtgggccccaccattttttattaatttctttgtaaaactgacatgtgggtcccacaaggtttattattatttttgattgaattgccacgtaaacgccacatcggtaccacgtcagatcgagaccgagtcaaattagccacataggcgccacatcaggcaaaaccgccatctaaaccgccgagggacctaatctgcaccggttttgatagttgaggtacctgttatatctggttttgcggttgaaggacgaaaatcggatttgttgacaagttaagggaccttagatgaacttattcctttgttttaacccttggctagccaagcaaccggcctagcgcccctcggctggtcttcttgggctggctccggtggcccactactcccaggcaaataccaccttcgctaggctatctatgtcacatacatcaactggctagcccaactgggagcaagctgacctcgttgcataaccagatggcattttttgcctatgttggatataatttggcttggagagtcatttgaccactctgttagagttgctcataaataatacaattttttaagaaaacacactttttacctttttagagttgtgaagtaaaataatccggtgaaatagcccaaaaaaggaacacatatgtatccctctaattaagaaaattgtcagatctcttgtcccatgggttcagatttagtcggctcgtgctattacaacttgaagtttattgtggtcatgattcattttgtattctagtattgcagattttctagtgccacggatcacagctggcgaactgtgagctcaacacaacttcatgaacaaagctatctttgagatattttctttcttgcgggaattttatctggtgccaacacagcgcatatgtatccatcatcaggtgtacctgggaatatcttgcatgaaccttgtggatctgtctgtatatgtactatgcattttcaacgctacaatcgggtaaccagtttcttattgtccaataataccgtgctgatatatactccgtatattttatctgccatgcatgtctaagcattgacggtgactttttttctgtgattatcatgggtccagctccaccgaaaccttgaaaccttgttcagttaatcccctaagaaacttgaaaagaattaagagaaaagacgtggacttaatcccctcgatcttgtccgatctctttcttgtgaggattaaccgaaaaatcctgaaacggtgaaaatctcctaacggtaggaagcaatgaagaaaaacgcaagcacccgcacaaaggcttcatttataggaaccataggtgactgagatttctaaaagtttttggaaatatagtcataattccaaatattttaatccataaatataatcataataaacatgacttgtgataaacatgacatgtgaaaaagagagtgattctaccatggtggtacacatgaatatgctaccagtaacaatagcatctaagaacacatttaacaccgagatgagaagaatatacctagagaacgctccgaatccggaggcgacagtgttgttggttttgtcgccgtgttgccattgtagttttctctcctctattgccgttgttcccttcgttgccggtgacgaagaggaagaatagcctgatgcagatgaaacaatgccgaaagcagtcacgtgaagaacgcactccgcaaaaacatgatcgcctacctacccttgcaggtacttgtaagatcgcacggcaagaattaaactaaccaaaatggaggtgaatgattgaagtatccaaatccaaaacttttagcgaaattaaaagttaccctattattgatggagatcgatctgaccggagtagatctgtcggtctgaccggtgtagttgttccggtctaaccgcctgatgtactgttgttgcttgtcgccaccaccggtctgaccgccatggagccgccgatctaaccgggtcgatgccatcggtctgaccgctgatatctcgccgattggaccaccgcacctgagaaaacacaaatcgaaaagtgggagctcaccgtggggcagcggccaagagggctcggtggtgaggaacggtgacggtgggctcctcggggtgtggacaacggcggcagctccacggcatctcgcgggtgcgaagcggcggacggccaccggatggaccttgacaggaagaagagggctccggctgtggatggtgaaggcgaagaggcggccgaggcgcggcacggcatggcaaagccgttggtgctggcagcacggccgggcgaggcttctctcgccagtggggaacggctagaggcggtgaaggaggcgacggcttgggtagcgcggtgaaggcttgctctttttattatgcccttggcttgctttgcactcgagatccactttgagccttgttctttttattatgcccaaactttgtgtgtctgtgtttgagttagggatttgagttcttgtgagtgcttggtgttgattgcgtgaagatttgttcaacacttgtttcttgcttaggatattcttgcttcatcttttactcttggaggtcgaggattcctaaacagcgaggtcattcttgagccaccgatctacgtgtggttggccaggagaagtttgttaaggttggtatcgattctctagatcagcaagtaaatttatagggtgcactagatcaaggagagatggtgacactgagtttatacaggttcaggccctcagaagagtagattggatctgtatagatgtatgcgcggtacggcgtatggagtagcacgtagtgtccaaggattacccgcgctagggtttccagctcctatatagacccggggaggctgactaaagtcagtaggatatcctttataatctgggtacatgtcgcctatttacatgagataagacttgtattcttatctttaatccccttgcgaaattacatcatgcggcatgggcctaaacctagtccgcccaccccatgctacacaacccaaacgcctaaccttcggtacctaggtaccgtgtaccccgtagttggatcttgcctccaaaagataagagaccactagtggaagaagtagtgctttgtgtaacctctcgaggaaagggactcggctctttgtgagatcctcaacgaagattagaatcccctcaaggattcgaacttcgggaacaactcatcttgcaagaacttctgtgacatccttttccctctcccttccactatctttgcttgcttgcttgtttgagcttgatgttcttggttgtgactagctagatccattttgctagtgagtttgtcgctgctatgctatttttggaaatatccgaagctccttcggatatatccgaaattccagcttccgcatttacttgagtttaatttagcctattaaccccacactataggcctaagtgaccctttcaacaaacacccatttgcttaaagaacatcagactccaactagcataaaaagcagtcaccaaattgtgacgcaaccacacaactggatcggcaaaattgagaatgtgggaaccaagatcagcctggatggtgaaggttactactagcatatcaggctgttagccatagccagtccaattgcagcctatggccagtcggatgcagaaccaggaaatctatgcattggttaaagaatagaagaactggggtaacagtaacacaatgattccaactaaagaacagaatattttatgggcaaaataaacatccttctgctgttggatcactgccgagttgtaaaaaaatacacccaactgaattttgctacttcataaattaattgtctactaaataaaaacataaaatcatatctgcagcaagtcacacaagtcggcgcagctccccagtgaggagtgcgaactgacggtgctgtgacaacacggatagtgttatcatgcctctctttttaaggtcacttacctcatcaagggaagaagggttctcctttgtttctttgagtactgcttgaaagatctgtagtgggtccccatgactgacaataagaattgcagagctgcatggaattgaacatacaagtcaactccacataatactccctaacacagtatatggaaatgtgtgttgaaaaaaatactaagcagcaactggatgtggaacaatggtgattatgtctaatttagttgttctattgtgccaggaatagtactcatgtctacgagagctatgggcacccctcctcaagcttgtaaa

SEQ ID NO: 13719 - DNA, 10004 bp, Oryza sativa
caagaattgcaatattacttatatatgtgatacgaaagtatatatagttgagaataaagacttttggatatgaattttataaatttaattttatgtaaaaaatagaaaggcaaaacaaaaagaaagaaacacattagccaatggctatctctcgatcggcatggatgatgggactgggcgattggatgtctcgcgctagaaagtgatccgcccctgcgcgccacaaggttgcctctttcggaaccagctgaccatacccttcccatagtttgactttttaagattttatcatagttaactagaaagtgtcttttcgctacggtgtattaaaactaaaaatattttatttttaaccgaagttactttcacactgctttggtacttttgctcgttagaaaaagtctcaaatgatagagagtaatatagtagctaataataaattattattcaatagtgcgttgcaacatgaaaaactaatgttattaacttagtaaagtaacagaaaaagaagcatccacgttatctcttatggtctagatttctcatattagttggagtaaaatataaaaaatgaggagaactcattgtagacaatgtgatgaggacacaaactagcttggatataaccatgattaacttatgtattaattaatcaaaggtgcatatgttctatattagatttacttgttatatatttgaacaagcgttgctacataatgtgtttcgtgtgttttcgtttgcagaggtacttgcttgggtgaaagaaaagagaccgagcgtaatgaatgcatggatgattaaagaagttgattggggaccaaaccaagattttctcaagtccacttccatctcaccacatcacttttggtccatagaagacaagagataaagttctacacgttttggattcggattcgggcctcctgacagcatcaacttcaaacggacctagtctctgatctagaaggaatttcggggccatgagtacttgttggaaatcttatggagtctactttcaaatggttttggttccacgtcaaaattcctaccgagctgtcggaaatctacaaaacaaagccacgtatcttatccagtttgaatctgatttgagttttgggtcttgtaattatgtcgtgggcttaacccaagggggtgtgcgccctagggcaaacctaggacgtccctaatcatatttattcagtagctgtcatcgtttagagttaggtttgcttagattaatctgtcaagaacagtttcgccgctagatcagtttgtggaaccccaaattcgaatgcttaatcattcatatgcaatttggttgcaatctatcttgcttttgcttgtgttcttcgattcgcatgcaggaattagccttctcggcgaggtcaaccgagttttggcacggttgataaccagaggagatgtgatgctgtgattgcggggctcagtagcgtgttcgttcaaaagccggatcgagttgtgtcacgactccgcccaaatcgactgtttatcaatacctatcggaacatcgggacctattccccatcacaatgactcattcattttgttttttttaaaaaaatcacgctatccaattggatatatgcataaaacaaatcttttgccaaaaaaaaaactaaactgaataaattaatctatctatataaataatacaacttaatataaagtataaattataaattaaataatattggatgaggagtctagaatattctccaaaagagcctagagtgcatataggaatataatttagaaaaagaattaaaattcaaaataaaaaaatattgaaagaagagtttagagtccatatagaaaactaattagaacaataaaaaataggaatattggaagaagaatagagtccatataaaattaaaaaataattaatattatttaattttagtctacatttaaattctatatcatgacaaataaatatttacatttttagtcgacaaataaatccatatcatgagaaaaatctatccaaaattttagtttattcaatttagttggaattaaattaataagcagtcataaacaattaaaatggtattaatgtccctcgcaaaaaaaatggtattaatgctatttctgataatagaaagatgcttaaaattactaagagagaaaacattgattttaattgcggctcatttagaggcccaacagtccggtggcccgatgcgggagaagacgcagccgtccgatcgaatggacggtccagattgatcccagccaagataaatatctgtagccaaaaccataaccctaaaattcattccaccctccgcgcccacgatcccttctctctctcttgatcgaaaagcgatggcggcggttccggcgcccgccctcctccctaccacgagcggctgcggcggtgcccttccccctctccccgcgagcggcggcggcggctccctccgacctgtctcgctttcctcgccggcggccgctccctttgtcctgtctcgcctcctcgctccctcctcctctcctcctcgcctccctcccgcggtggcgcgggttgacggcggtcgcgggcgaatccgagggtggtggcggcggctccctccatcccctctagccttcctcctgtggcagatccgccggcggcggcggcctccgcaggcggatcaagcggcggtggctccctccgccccctctcgccaagtcccgcggtcgatccgacggtggtggcggcgttggcggcgtccgcgggtggatccattaacagtggcggtgggcagatccggtagcggcggctccctccgccgcctctcttctccctccggcggcggtggtggtgtcggcggcggccgcggatggacccagtggcggtagcaacggccgagggcagcggtggcaacggccgagggccacggtggcgatggccgagggcggatccggtggcaggcgagtgaagtttgtggtgtatattgttgttcttcttggatgattattttgtgattttgtgatgattgtggttgattttttgggggcaaagattggttaggttttgttcttttccttgcggtgtgtgcatctgattcggttgtgccgattttggaaagtgtttccttatccaattcggattcgggggctgcgaaggcgcaccgccgacggacttgcgacgaacagaaaattacgaatattttaattagttaagattaagatttttattatttgcttttaaattgttaatgacacatgcataaggttttacttataaattatttttttccagcaaatttggaaacttcctccacgcaaagccgtagcgaaattctcacctcaagatggccctcaccgtcggccacctccagccgccactcgccggagccggagccaaaagcgtcgccattcccggcccactcatcccacgccgccacatcctccttgccgacgccgacgtactccatccccgccacccggtggccgaacctgacgcagtcgagcaccccgaagcggcgcgcgtaggcgccgaggtagtccatcacctggcggtggtccgggaacacctccgtcaccgtctccggccacgggaagtcggagtactggtacatgggccgcggagtctgcagcgcggtgccctccagcgtccacgcccacacgccacccacgccggtgtccgcctcgaacaccaccggccggcagccgcgctccagcagttgcttgcacgcggccaggccgctcacgccggcgccgacgatgaccacccgcttcttctccatgatggctagtgggctaggaaagtgcgagctgtgtgagttgtttggagtctgatgagcgaggtggtatttatagttggtcagtgctatacttcctcgaaatatatcttttgaccatgtcatctaatcataatatatataatggataaaaatatttttactgttttttaaaagttatatatatgtagtgttaatacctttaaactatattttaaaagttatcgatgatcaaagttacaaaagtttgatctcaactttatctaaaccatcaataattataaaaccagaggtatgtcattaactgtttaattatatattttttataatgatgcattatgcactaaattgtttatggaacatgaattgcttaatgtgctatttttttatatggcgttactgagtattaaataataatggcatgtttgttatatgtacttataaatcattcttattatttttaatttgttaaacttatcagtggtgctaatacgcatgctgcgcaccgaatgctagttcgagcgcgcacaacattccctccgtccggttttcccgttgttttaccacccaacctttccgccgcaatccacctttccttcgtccgttttttttctttttttcacccccaccttccgtgtttcttttttctcttttccatctcatctatgcttcattaaaagagctgataaaatattaaccatccatattttctcattttctcgttccttctctccagatttgttatgcttcattaaaagagctgataaaatattaaccatccatattttctcattttctcgttccttctctccagattttttatgtattcttattttagtaaaatatttaccatctagtttttctactgtctcttcaagtttcaaaagtaagaaatttatgttggaaatttggtcataattcggcatattttaatccaaaataacaagataataaacatgatatttacaataggatttgatccagtgatagtggtgaatgtaatcaacatgagcatgcttaacgttgaataagcatcaacaatcacataatgacacaatgttgacattgcgatgaacattaacagtaaaacttctaattgaaataatgtaataaggttataccccaagaatggtcctccactggaatttgaggcagtattgcctccgttggtgttgacgggagtctccttctccttgtctccagtgttcgacatgttggtgaagatgaagtagatgttgacgaacagtgagtagtcgcgccttgcgctccccaaaaacctgatcgcccgcccgtctgtgcaaacgtcgcagcaacgcgtggtttcggaggcctactctcccaacgcgtgtgcacacactcgtcgggatgggattaccgtagcagcaacagctttggaaaatggatgaaagtgtgtcttcttcttctcgcgggagatcaaatccattctcattttataagaggaatggaagatgaagagtaagagtcatggaataggaagaggaatggagcaactaattgtcatcaactagccatgaaccatcctccactacacaaccatcaaccaacaatcaattaagagtaattgatgtaagttaccaatggaataggaagaggaatagagcaactaattgtcatcaactagccatgaaccatcctccactacacaaccatcaaccaacaatcaattaagagtaattgatgtaagttaccaatggaataggaagaggaatagagcaactaattgtcatcaactagccatgaaccatcctccactacacaaccatcaaccatccatcaattaggactaattgatataagttaccaattccttaatcaaatggattaattctcaaaactcttcatcccattgatatcccatagaagaatgaattcacatgaattcctagcataatgagccttggaatttatttgatttaattgatttaaatggatcaattacccaattaaatctaacaatttactctactgagttttccatttattcccagtatcccacctctgcaccttcaaaagtaacaaatttactcacataaatgcccccttcaaaagtaacaaatttacttgcatgaatgcccccgcatcgttcggcactattcctagatggtcataaaaaaaatactaccagcttacaacgctagtaattcttttaccagtgttataaataagagagaatcccttatatgccactgagtataggccgggcatggctaacaactcagagagggcaaatatgtcttttttacttaagagttaacggtcaacacacggtcaaccgacgggagtggcatgagagagtgcgcaaattcggaccaattgcatataagggaagagccaattttcagtggcatataagggatcagacagattttcaatggcataaaagggattatctctataaatatttagactttatagtctgcacgtaaaataattaccaccttcctcttaatttagcctatggtctagtagccaccatgtagtaataatataggagtaaaaactgatagtaagagtattgttaatatgaataacaaaatgaacaaataagtaaaaaatttacaggctcaatcacacacgagtgataaaattactcacaggtgaatcaaactagaaaagaacaaaatggtctagcaaaaaaaaaccatcatgaagttggggtcctgatggctttgctagatcttgtgataaggatgtagaggttgatctgtgtcttatgacagatggtggagagggcaaccgggtggcgagcgacagtcagcgataaaatcatagaaggatgtagcggcgtggtatagagatgagcttggcgatgtgcattagcaaccatccatcatctagcaaacagaaaaaaaatatgcaaaaacattcttgtttatgtcatagagatgatgagcaaaagaaaaacatcctggttgccctctccaccacataccaacctccccatctttgttgcaagatccagcaaagctaccatgatctcagcttcacggtggattttttctagaccatttttatttttctaatttgattcatttgtgagtaattttatcactcgtgtgtgattgaacctgtaaatttttcattcctatgggcattgtgtagtagtatcgcgtcaataaagacaacaactcttaaaagcatgatagtgacgacaacagttaggctaaccgtacgctgcaatctggaaagccactgtagatagagcatgaaaatcgccaatccacgatgtagtaaaagttttactagcatcaataattacatctcataaacatgcatatgtcggatgagtacatgcagatggtccttttagaaaatacatatgttagcctaatcatgacttgtacatgttttgagtcttgcatatagggatcacgtcatgtgttagacgtgtcatgtggcaggagattgaacgtgaagtgttcacgttgattacgcagttagaaacgtactgcatacatgagccaagtagttagctagttagttagcacttagcacatacatgtgttgcttgtcttataggagaataagtcttcaagttgttggacaggaggccttttgacttagtacagggacgtatagctacgaactggaggccccagtgcgaaatgcatgatagaaccctaaaattttacgaattttacatgtaaattctcacggtcctgttatcgcgatcaatgtgatatgattcatagaacaacaggggagacaaaatgatggccaactatttctagttacaactattatgctcttctacttttagttttgtgtcatagtcctgaccttttgcaggcttaagcattctatttataccactaattaaatagacttagtgctccatgcaattaaaattaatttggggggccttgaatagtcgcacactcccgcacatgctaatgtacggccctgcttagtggctatgcatgtgtggatcgtgcggccgtgtgcgagagactcggccaccacgactttggccggcgtgtatgtcacgtcgatgcctgggtctttataagcattctgtaagtgttcgtttctgagcgaagagagagctacagagaaaaaggaaaggaattagttgccgagaaaaacttgtgtgcgcgctgcgcgcatgtgcacttctgtgtactccagtgagcagtggcagatgtgtatatcggtgtcctaccatactaattatacttaggcggctatagcattataatatattggataagaagtttaatcataggttttgctaaaagtcatcgttgtcgcctgacaccaacgctaatactgtagatccctccctgagtgagcttctctgtgagtgtgtttactgctctgtgagtgtgtgctgctcacgtgagtttgatccttggccaaagctatcaacataggtgccacaacttgtaaaacaagcggtaggacctacagaaagatagcactctccagtcccataatgctcaaaagcgtgtattcccattatgctcaatatttcagcataacttatcatgacaaattttcttgttacacctttttttttttgcacatttttgtgaaaagagaaaggataacttgctgaagatgatatatcttccatggcatagtatctacctccggtggcaggaacgaaaagaaaaattgaactccgcttaggcctaactgcaaattggtaagagatcgtacaaatttaggctttaagagttactcgttaccgattccaaatcctgcaatcaaagaaactatgattacaaaataaaattatgttcccttattcctattggttgaaaaataatgtttgacagatcaaaacaactcaaaaccaaaacatgcttcgtgacagtagatcaacctatcgacagtatcatgaaattaagtagatgcatcaaaaacgcttttttttccttaaaaaatgcatttttttaatgatttccacaggttgcacaacttttataatgccaagtgccaaaggaaattctgaaggagtctgtaactagttcattatgcagtccagcaggtgcgatgaggaaattctgaaggagtctgtgattagagttccagttaatttggttggcccggcaaaaaaggatttttgatatcccctaactaaaacaaacttacacatttgttcctgctaacttataaaaaaaattcctgtacacttccctctttactgagaaacacgaactgagctcctgttctgcggcgtggtggcaggaccgctaggggattggctccgggaaaccatagtatagaaaccatatacagatgcaggtcaggtaacgacagccaggagcaataatcatagtatagaaaccatacatatgcaggagtcatacgaacatcaataatcatcactgcacatttctaattgtgaagaacaagtgcaaaatatatggtcatatcaatcacacaggattttaattcttttccccactatatattgatgttaccacttttaatcatggcatacaacctggagtttaattcttggaagtagttgcgctgtgaaacagcttcaatgtcctctaattaaatgatccctgtttagctaacttaaacagtttactggagtacctagatttatgtcagactttatacatcctaactcccaagtaaatggaacttctaaggaaacatcaagtcttatgtcagactttatacattcatgtgacactcaaccaatacaggcttaatgattggtatcttatttgaaggttagagaaggaaaatgcaaatacgcttgcaaagagggtatttggactataataggattatttatttataggttgtttatctcctagacctttactctcctagatagttaatcccccagacctttggtctaatataactcattagcattgattgcaattcagctatatatatgagagatcacctccccacattgtgtgtgaggcatctattccacttcttctacatggtattcgagtttaggctcttaccttcgtagctagaaacaggctgactgttgcatctgtagctggatctttggatcagtcgccgacaccgtccttgacctcgccatggagcaggatcagaccgctcaagagctttgggtcgccatggaagacatgttccgagctaacaaagaacgctgagcaatcttcctcagcaccaatttcactccatgattcaaggcgactcctccattaccgattactgcagaagatgaagaccgctaccgacgcccttcgcgacatcgaccacgccgtctccaactcctaacttgtg

SEQ ID NO: 13720 - DNA, 885 bp, Oryza sativa
atccaagaaagcaggtagtaataatcttaaaacaagcatgatcagacgataaaattattccacacgactccgagcccaaagtactactctttcttggggtgaagatcaatataatcaacagggccatgaacgtcgaataaatcagcccaaaatccattcttcctcctcgggttgcaccccatgtcccggcatagcttatcattgtaccagatgtgaaggaatccgatgcaggatctgcgaaagtaagcacgagaatagcgcttcatgaacttctcccattcctggacatcattctgcatcacactgatgcttggcaacctgaagccaccatccatgaaatgtgcgagccacttggcccttaattctgatgtgtacaggtttgccaagctttctgaatagccgataaccgccagctgcgggatcttagggtgaatgatctccctgtgagaaatcatgcagcaaattaattaactacgacacagtcctggatagaaattggaaattgtacaaattaaatttttgctccttgcaagaaacagttattgagttgacctgtagagaggtatagttgtagatgcagagcctactgcaatgctctgaaagtattcagaagtgaacatctccttgatcttctgtccccctctgaatccagttccaaagatcactatatcgctctttatcggcgaagattcgccttcaacaagcacaccttcattgcaaaagctaaatgtctttgatttcttgagaacgatgctgccttcttctaatctcttgtaatggtctttgggtgtaatggccatcaagcatgtaatcaaagcttcaaataggctatggtcaggcaccatgccatacttcttcattggaatggaataatagctttctgca

SEQ ID NO: 13721 - DNA, 4924 bp, Oryza sativa
tatcggttattcgctggatcaagtcaggtacgagcagcagtagtatcggtatttgttatcaactactgtattagtaaaacaatccaagctgatctattactgttcacattaagaaaaaaaaatcaaaaccaattcactgtatcggttatttctgtgaagcttcaaactctccaatcttttgctaagcacattagcatacaaggaaaaaattctaagaccgtatattaatttattcggtcgacaatatttcggctatgagctatatgaccggatttaatcaaggaatttcttcatcaactttgacgagcgggaacgggttcaacaatattgctacacaatacattaggaccgatcaaggcatcatgaaaggaaacgtcccgctacctcaagttgtaatttcaccaaaggtaaccttcgattcgcccaacccgtcctttgctattcaaaacgttaataaccattgtgtagatgcatatgctacttctagttttgctcctatacaatatgcttataatgctacggggggtcaatgggtgattatacagccgattgcacaggaatcggctatatgcaaaacctagctaacggtatgaccggtcatgacaccggtctaaccgcgtcctatgccggtcagaccgtgcctaccatagccggtcagactgtaccctattctggccagatcggacctcctgtggccggtctgaccgcaccactgaccaccggtcagaccgggccatgggccggtcagatcggttccctgggagtttctccaggttttcataccacgactagcaatattgattttaattattattcatcacctgttaatactgttagtcatgctactccacatatccctaatgcctacaatgatattaataggggatatcctcccgatactaggtatggccaatataacaatattgtgccgcaacaaccaccttttaggccaccaagtccaccaccagatccaccaaggcctgaaactgtggaggattggtttagaaatattatcagggagaatttagcaaagctaaggaatcgcgctagggagtaccaaaagccgtatcctgattattatgacattttcccatatcctcgtgattataaaattcctgaatttaccaagtttagtggtgaggatagtaggactacatgcgagcatgtagataaattcttagcgcaatgtggtaggattaatagtaatatttttaaattacgtttgttttctttatctttgtccggtactgcttttacatggtttacttctttaccggcaaattctattgatacttgggcttaattagaacaaaaattttatgattattttcacactaatgaaactgagcttaagttatctgatttaacatcggttaggcatgaatacaatgaatccattgctgattattttgaaaggtttagagatgttaaaaaccgatgtttcaatttgaaaataactgacaaagatttggccaacattgcatatgatggattgcttgattctattaaagagaaattgaatggccagatatttcttgatgttgatcatgtgttgcatgaagctctggcttaggaaagccgagtggatgataatagcttacaagctagtttagacgaaaatgcaatatcatgtgtagccaaaccaagcgatggttcggattgtattaataatttgtgcaatgatgccataataagtatagccgaaccaaatgttggttcggattgtcttgctagcttggataatgatgcaacaaccattatagctaaaccaagcaacggttcggattgtgttattagtttaaacgatgatggaatagccgaatcaagtagtggttcggattgtgttgctagtttagacaatgacatcattgaaaatatagccgaactaagtgacggttcggattatatcacaagcgaaagtgaaatagcattgtcacctaagaccgaatcacaaatcggtcatatggatgttggaaaagataatgataatgtcttgcgggatagtagtgagatagaatctaaaatagttatgcatatatatcaaaggccgtatcctgaacacatagattcggtcccatacccgcaaggatttgaggtgcccaacttcacgaaattcacaggtgaggatgctagaacaacaatggagcatatcggccgatttattgatcaatgtggtaaggccggtagcgatgatttgcttaagttgaagttgtttcccctttctttgtcaaactttgcatctacatggtatagtttgcttgctcctaattcaatttctacatggtcataaatggagcatgagtttcatgattatttcaaagatgcaagcttgatggagaaagaccgattgatacttcatcggtcacttgtgaaacgatttcggttacacctatgcttaagaccggaattgttagtgatcctctccctattagtcctactgatgttgacaaaaagaaagggaaaagtgttgttattggggatcttcggcccaagaataggatcaataatgcaaaggccgaatatcgtaaggttacaaaagatgagtcatttagttcccaaaagaccaaaaagccgaagctcgcttttgagatgcttatggctaagtacaagaaaggattagccggtcaacgatttgataaccaaactagtgattcaaaaagaccaagatcatctcgtaggaagagatttggtcaaacaccaaagcaatcagagccatcaactataccaactccatacaaacctccggttgtgatgccatggtatccatatccaatgtcactatatggttatccctttatgtattacatgtcgtggatgcctcaaccatctatgccgtgtcatcaggaatggaagcaatcacctaggtcagtaccaagtcattctaacccaagacaagaccgttttccacaaaagaatcggtccggtggatcaaaggtgaaagaggtaaagaaggtgtgggtgaggaaagaagccaaagctccggaggtcgttatcaataaggagtctcaagttgttcatgtacctactggagatgtggtggaaaccatacaagcaaaggggatcgaagccgacaccgtgattgtcaaaagtggaggtttgatcgaggcatctagctggtctgaccgccaacctgtggccggtctgttcgaacctcttggccggtttgaccgacggcttgtggccggtttgaccgggcccagaggtcggtctgactggggggcattggagaagagtgggaaaattgagagcaacataggagcttccactccgaccaaaaatatgaagaatcattgcttagctcctgaaaaacaaccacagccaaagtggataccttttggcttatctcgctctcaaaagaggaggctacaacgtcttcgagccataggtcaaaaagaaaaggaggccgaagctgtagagaacaaaacatgtaataatttagagcctcgaacgactcctaagagagtgtggagacctaaagaagtaaaagttaagagaccggtgatttcccatagtagagataaatccaatttgatgagagaagaatcatcgatcattagagataagtctccttcgcatggtgctatgaatgttggtgcggtgtttgtcttgccttcgaaatcgtgcagtcaagaaagccgattttgctcggggggcaagacattaatatgctcatgagggaaccaagagaagatgaacggcgatggatacaacatcacatctttgagccgccgtttgttggatgctaaggcaaggtatgggtttattgtgttcaacgttatattatatgcctatgccatgttagaacattgattgatatatagcacatgtgtgtttttgcttatcaaattgatattatgcatatatgttgcaaatgccagttctaggtagtggaattggtaggttggcatatagtttgtttgaagtatgatttggctcatgagtctttgatatttatttaaagccaaatcatatgtgtttttatggatcaccatataatatatagatttcatatttattgcaccatgaaagttttgcttattagtaattcggctaatgtcaatggtcaatgtaatgatttgttctagagttattgtatttaggaacattggcattgttaatattttgcatacatgctcaagccgattacttacatttttagtttattggaatctatgcatgtgacacatatgactttggtgattcattattgatcatacttcaattggctaagtgttttgatgccatgatgattattgtctcaaaagccacttgaattctagacctattagttggatgtcataatttttcatatgtctagaaagaagaaagtttggtccaataatttgatacaccaagcatctggctattatgtgaagaaaaattatatactaaaggtcgatgcttgatttcaaaggtttggacgaaattggcaaagtcatagaccaggggcggtctgaccggcattgcacggccggtctgactggtgataccggcgctctgaccggctctgcatggccggtctgaccgggtagacagggcggtctgactggcattgcacggccggtctgaccgatctcgagcagagagctaggggcacgttacaattgattaaaaggccgaattaattgtgaattcggacatttgtgcccatgagttagaaatagcttggagaattccttagattagatatttgaaagatcctacatttatggttgatcgaaagattcggtggcaagtgttcaaatattatatcgccgaaaaatagatggagtattacttagataatgttcaatctaagttgctaggagagtagtacatgaagggattcgtgaaattcatcaatcggccgtaagataaattggttgcttaggagagtggagtttcattggccgaaaataattgatgattgtttcaaatgctatag

SEQ ID NO: 13722 - DNA, 503 bp, Oryza sativa
gtcaggatgtccaaaaaggtgtcaggttcaagtggctctcgtctggacgcacgttgtgctagatcatccggttcgatgttgtctttacggtatacatgtcggacctcgatcccatcgaaccttttttctagcttcctgacttccgcgagatacttggataactcggggctagagcacttgtaatctttatgcacctggttcgcgactagttcggaatcccctttcacaattagtcgcctaactccgagtgcagctgtagctcttatcccggcgagtagtccttcgtactcggctgtgttattggtcgccctgaagttgaggtgaattgcatgcttgaattgatctctcgaaggtgatgtcaagatgaatcctgcccctgctccttggctattgagtgcgccgtcgaacgccattgtccacgtttcgttgtggatttggttatctgacctgttatcaggcatagtccaatcggctacgaagtcggcaagtacagctgggacttg

SEQ ID NO: 13723 - DNA, 574 bp, Oryza sativa
ttgtacggcagtaatatgtacgtcttgaaatgttgctgcgttaggagatgcacgagattgtcctctgtatgtttctcgtacttgtcgatcatttcggtgttgattttccgagggtcgatgaacccagtatcgtagactctccgccgtcgggccctttgaatctccattctacaacgatgaaaggaaagtattattgcttacatatatgccaggagctaattattgaacgaaacaaatcgaactcaaagatactcacaaaatccatgcgctcagaagagagacatcgagggcgtccaactggtacagatcgaagagttccttgaaatggatccagagaacatcgtctccttgcaagaagtcggggtttctgatcctcgctccgaacatctctctacccttggcgctcatttccatgtaccgttcatggaatttgtacatctgtgtcggtagggactccagctgttcaggtttgacaagcggtttaccgagttcaaacttgtatgccaattccgccttcgggattggtgcgccttgaaccaattgatccacaaatagaccggtgtctgcaatgaaa

SEQ ID NO: 13724 - DNA, 1442 bp, Oryza sativa
cgcctccgacacaggtcgatgaagagagagggttgagagggagagagagatggggggagtggttgagatggataaggatgagccggtagtagaggataaggatgagccgggatgagaggggagggttatgagaaagattttttttttatcatctttgacgggcacataaaatttgacccgtcacaggtgactttatctcacctttgacgagttttgtttttggaccgtcacaggtgactagttacctgtgacgggctaaatatttttggcccgtcacatgtaattttacctcacctttgacgggtttcatttttgaaccgtcacaggtgactagttacctgtgacgggtcacctcctgatggctcaccgatgacggcatcctgtaggacccgtcaaaggtgaccctcatcactgaccagcacttatgcccgtcacagatatgccgtcacaggtgcaaggatctggcgtagtgtaacctcatttatcacctcaaggtttgtcccaaatatcagtatgtcatcaacatacaagcacagaataactccctcacccccaccatggctatagtacacacatttatctgcctcattgactgcaaagcctgtagatgtcaatgttttgtcaaatttctcatgccattgcttaggagcatgtttcaaaccatacaaagacttcaacaatttgcacattttgccttcttgaccttcaactacaaacccatcaggttgatccatatagatctcctcatccagctctccattaagaaaagctgtcttaacgtccatttgatgaacgagaagactatgtgaggctgctagggaaagtagcacacgaattgtggtcaatctagcaacaggtgagtaagtatcaaagaaatattcgccttctttctgagtatagcccttagtaacaagccgaaccttgtacttttcaatagtaccatcaggcctaagcttcttcttgaacactcatttgcacccaacaggtttacacccatagggtcgctctgtcacctcccaagtcccgttagcgataatggaatccatttcactacagacaacctccttctagtagtctgcatcaggagatgcatatgcttctgaaattgacttaggagtgtcatccacgaggtacacaatgaaatcatcaccaaaggacttagctgtcctttgtctcttactccttcgaggagcttcactgacatcctcctcagtgacatattcatgtgtatgttcagtttgttctggtggtgtgattgaactaggaattacttcagagggttggctcgaactactatgtgtatccttcattggaaaaaagctctcaaaaaaggtagcatcacgagacttcataattgaccaacatgcatgtcaggtacctcagatttaactattaaaaatctataggcaatgctgtgatgagcatatcccagaaagacacag

SEQ ID NO: 13725 - DNA, 7565 bp, Oryza sativa
aggtgcttgctagctgcaggatgatccttggctgagcctgggaggaacttcttcaaggccaactggcccctcatgcaattgaacctcctgtagcttgcagcactctttatgtacttggaccagccatagaaaatgacatgatgcttcactgcctcaaatatccgatccatggaaggtgtttgcttgatgtaccaccgctggttgacaagggcatcgcaatagatgcaagcggagagccagaggagacagttgggcttcttcgtcatccgtgcagcgcaccagatcacactctgctggtccaccatttggttcctcctgtcagtagccggccacaccgcaagcggaaaaaacaagcggcatagggtgacggaggagatcagctccagcagcgcagtactgaagaagaggatgtatgtcacggtgatatcatgtttgttgtacatgtctttgtggcttcttgcgtagaggccggctgcggtcgttgctagtaaaatggaaagcaaccggagccaagaggcaatgggcgtaatggtcaccctcaccctggtatatagccggatatatacatcaaagagcccagcacgaatcaccctataactgtaattagtgttgattgccatcagaaattggaggatcttgaggcgtttggaataggtgacaaaggcgtctgccatgaataactctggctgaagcacggactgcagccgacgcaaagttggtttactcaattgtccctgacgattcatgatctccttagccctctccacatactcgttgaggttgatgaggtcttcttcttcttcttcttcttcttctttttcctcctcctcctcctcctcttcctttttttggtggtctactactggttcgatggcagtttttacggtggacctttctaagttctcatggaattgcccaccttcctttctttctccttgtttgacggcttccgtttcgtcattgggttgcggccgctcacgaagttctcgagagaccacaaacattgtgactgtaggtataaagccagtagtgcatgacctccagtagtctgccaactgtcctccaccagatccaatcagcttcttccttcggggcacactaggagggtgccttgctatgcttcttataatggccctcttgagagcccagggcttggcacaaaacttgaggatgccaacaatgaacagaagaaccgcagctttcagaaggatcttcttacagaccaagccaaacagaacacatacatagcaaccgtgacttgggacaccaaggtgacgacttggcgccaccatagatagttgtcctggatgctgtaggaggctatcatatcttggccagagaggtgaatcaggaggatgggcgcccacagcacctccagctccgacgctgcaggagcctcatgcttgtgacggttgaagagggtggcaagggcgtagatcgccagggagtcaccgccgatgtatgcaagccagatgcatagcctgaaccacagcgagatacgatgccagcggacacctccatatataaagaggaacaactgtatcgtgttgcttccaaggacaaggatgcggagcttccaatcatcccaccaatccaaagcacttgagatacccataacttatgatgatatatttctctacatatatgtctagctagctacctctctaggttggaagcaagcttgctctcttgcttggagtatgtgggagtgttggtatgtcaatgaatatattggtcacacacacacacatatatatgttgttctactgtgtagcacaacagcttcttttcttattctttttggtgaataatgttcacactacagcttaaccaaacagattcatggcaacaagcttcaagatcaatccactgccaatggccccgtgtgtgcaaatattccaagatcaattaaaggggaaaagcatacggttttatcgaacacgctagaacgctagtcctagaaagaaaaaaaaaacttgaaccagcggggagatggaatctactgagggcaggtaatctagaagttgagacgactagctatcaacttcatgaacagtcactgcatatgttaaaacaacacaattgcacaaacataaccagtccaaatgagttggatgaaaacaagttaacatatataacatttaataccaacatgttaacatgacatttgatctgtactttcttgatctattctatttatccttgattaattcatgtgcccagagtagtttatttattttattttttttgcaaagagacgtatatttctataaaccccctttaattttggctatagcaacaggaaccaacaaatcaagagtatcggttgaaagaaccgatactaaaatgcataccaagtcaaaaaaaaaatatgggatgtgggatttaaactcaagatctttcatcttagccctcacgcgcgttaccatcccacctactctacatatccgacttgagtagatatgctttccttttgaactaactctataggcatatttagtaccggatgataacataaatctggactaaagatatttaggggactcggggcttttagaactggtactaaagagatctgtaccggtttttaatacatccagaatatttatggcttaggacatttggtaaaagatgagttctctgtagtagtgaaatgtcgccgacatttttgtaatcatcttccctcccttctgatttctgcccctagattcccgttcatgtttgtgtcttggtgcatctcagatttttcaattttttttgtcatgttttttttccatttataagcaatgtgccaatgtttggttgatgtgcatgaacatctggtgaaatatttcaaattgtttgagttcatgctgtgaatgtttggttggatatataatacccaatatgataatagtttgggcctgagatgaaagttcatgtccaatcaatcaaacatgagatgaatgagatttgaaatctgaggtgaacaaatattttatgcacaacgtacagtttgaatacaccatgtaaaaattgtggaatattaaatgttttgataaatgtgcaaacataaatatgtaaaatgatcatatattgaacaacgtttttaatgcgttgaacggctcactccagaggtaccaattttggtactccttaggtttcgttagttcccgcataagtactgagctctttaagtggcgaaaaaaaaaacccggagcaatcaattaatacataatacattaattatagatttgaaaaatgggttgtttgagtttttaaagaaacttttatataatacaatttaaaaaaatgcaccgtttaatagctttggaagcatgataacggaaaatgaggaaattcaagtttagagttggagtttagaactggggcttagtacctcttaaggacgactgtaaattttatccaatatatttcaatgttgttaatctatccaagctttacatgtggatctaatattctaatcttacactaaaccatataggcctcagaagacactactaatcaatggatgggctattacaaatggttacaatgaaaaaaaactagccagaaacttccaactgctaattaaggttttaatcactcttctcttcccgcaaagttattattagtactcttcatcttttcattagtgcagaaccataggtctcacagagttgaattctgcaatggcagagcaattgagttcgctggtcagaacagagcttggactttcatatggtttgcaaactgcacattcagatattacgattatgatatatttctatatttgcatgtgtcggaattgtagattttctcaaataggagaaagaaaacctatagatacatcgttgaattttcattgtgtttcacaatgtaggtaataaaatatattcttcccttatcttaactttgtgctttggttctctctaaaatttgtctgggtccaccagctgtccaaaacatgatataatcaaatcatgagcacttggcgtactagagatagaccactttgtccctttatgttttttttttgtaagctacacaactgctttaatttctttgtgtgattgtcgtaatattccacttccccatgtgtccgtgataatgtcgaagtcccttgctttttacaaagaaaattccgtgcccctaaccctgtaggtttattttcattgctgcacaccatttcgaagctattaacctgcaatgtactccaagcaatacttacttttgttgaaattataagcacataatgatttaatttatttcataaataaatcatgatattgcagatgtaaactagcatgaacacatcattagatctacatatgtaaactaagcagtaaaatatgaacagaccaaatatgcgtaacatatcgaacccgtaccgaggtggcggaaagaccggttactcggcagaaactactcgtggttgtgggcgtcgacgaaggcgcgcagcacgcgagcggagaggtaggcgagccgtcgcggacgaacagggagcagtcgcgcgaagcgcttcccaaaaaccttactgccgccttctcccggtgcaggacgtcgaaggcagaggttctgaagacctgctctcccgatcgccggtgcacgccggcaagcgggatggagtaatctacgagcgacggcgcagtacagagcagcaagcaaaccctagattgatttcgcgtgagttccgtgaaggcggcggctcggtttatatagtgataggtcgcttgatcagggcgcccgtgtaactgaaccggataagtcacgtgtaacttatccggactccacgccgttttcacgcaccggatttttcggaatgtttctaaaacaaaacaaatccgaatttcccgcagcaaaacaaaactgcaaaaggaggctgcatctgcgcaagggtgaggagccaattttgcggaccattcgacgcgtacgtcgtgcacgcgcgccacctgccctgccaggccaggccaggccaggctaggcgagcgagcgcgtgcgtgtgtttcccctcttctctcctccacacacgcttcaagtggctaggagagcatcctcccttttaaggaggtccccctctcctagaataagcaaggtagtactaaacttcacatacataccatcccatgaggtgggcttttatgattttccaaagaattaatcttcgaatgggccttagcccatctattaattccatcaatcccccaacaaatctcaaaatcccactgagatttgccttttccaatgtactgtttatatactagcggttcgatggagaccgattaaggttgaacatccacctagaacttcaagctacacttactcacaacttgaacaatggactacgccttgaattgcaagtcttgtgcaagcaagtttcactcagagtcttatctggtactagaccttctgtagactacccctcgggtggagcgtataagtcatactcctaggtctttagtaagcttcctagaagattcacccaaaatctccatagactgcgaccaacagtcaagcttacaaaggtgagttctttcaagaatgctctgcaggacagcatcttcgctaattaaagccaacagaactcattaaggcatagccaacctgccttgtagctcacgagagtacatgcatcttcacttagagagggtatagattggtactctcctgtagtttattaatggtttgttcttcccaggttctaattcacgggatctccgatcacatagactgggttaccaccatagtataactcacatgggtctcaaacccatctccttcgatgcattgtctatcacatttcgtgatagtcccttcgtgaagggatctgccaggtttctagctgtttggatgtaatccaatgttctaactccggagtttctcaatttcctaacagacttcaatcgtcttttcacatgtctagacgatttcatattatccttagaactattcactttgacaattaccgtttgattatcatagttcataaggatagccggcactggtttttcaacaataggcagatccattaatagatcacgcagccattctgcctcagcagtagcagtatccagtgccgtcagctctgctttcatggttgacctcgtcaaaatggtctgtttgcaagacctccacgaaacagcaccaccacccagtgtgaagacatatccactagtggctttgatctcatccacatcaaagatccagttagaatcactatatccctccagtaccacaggatacctagaatagtgaagccccaattccatagtacctttcagatagcacattactcgctcaagcgcacgccagtcatcatctcccggattagaggtcaaccggctcaacttgctcacagcaaaggagatatcaggcctagttgcactagccaggtacatcagcgagccaatgatttgggagtattccagttgattcctagcaattctcttgttcttgcgaagcaacaagctaggatcataaggtgttggagaaggcttactatcaatgtagccaaagcgattcaagatcatctccacatattggggctgcaagagtgtacccctattctcacctctaattagcttaatgtttaagataacatcagctactcccaaatccttcatatcaaaattttgagacaagaatgatttaacactacactggacaaggtcacctgtgacgggcccaaaccctcacctttgacggctttgggcttggtcagtgatcagtggtcactggtgagtccaatcacctttgacgggtgaaggaccgtcactgatgacagtcacctctgacgggctagaactcttccgcccgtcagaggtaagtgtctgcgctaacccatgccattttgtaacccgtcactggtatggttacctgtgacggctttttcaatatgaaccgtcagtgatgaggtacatccagacaaaaaaaatttctaaatattggctagcaaatcgctagccaatatttagaaattatatttcagtagcagtaaacagaagcatcacaaaatatatccatcacaaattagccaaaatataacctaaatttctcatcaacaatatatccatcacccataacagtaagggacaaatccatcacacacatgcacaaatccatcacacacattcacaaatccatcacacattcacaaaatccgtgccactgccgctccaagaatcaccgaatctagaaattagagaagggggaggaggatggggatggatgcggcgccgctgccactcacctcctcctcgccgttgcacgtcgtcgagccctcctcaccgctgcgtcgagccgctgcaccgccgcgcgccgttgagccctcctcgccgctgccgctgcaagaacaaccggcggcggcgggcgggcggatccgtgtcccccaacctcgtggaggctagatccgacacccagcagtcgggggacggcggccgtggcgcccggcggtcggggaggggggcgaaggaggcggcgacctggatctggcatggtggaggcaggaaggaggaggctacccggatctggcgtggtgcaggcgggaaggaggcggcgacccggaggcggtgggcgaaggagctgac

SEQ ID NO: 13726 - DNA, 1359 bp, Oryza sativa
ccgctgcatttgtaatcttttctatttttgtaagacgtggatctgtatgtcaacaattatcgcttgtgtaccctggctggtcctggacagggatttaatgcacattcagcttagaaattctggttcgagaatttctgggcgtgacaaatttgtacttacccaattgggtatttggacttttccctatgcgatagtgaggttataggtgcaatattcctgttgttcgacaacacaactatatacaaagacctgatgataccagtaggttgcaacagttcattagaatgcacataaatgagtcaaatagctatagcttccaatgatcgatgcactctttgaaaatgaaaaaaaaaagataagaaaattaacatacagaatgaaagcaatggcaacgtaagaggattactgagtttttacacatggagtcagtatttgtggggtcaattgtagcaataaaaaaagctttgtaaatcaagaacctgattaattatcgattcaaccattcacagttacaacagtgggcaggatatttgttaattccattataaaaaaagggacatcacaaataacatggcagaagtagcacaccaaaacttacacgggacggtttcatgaaggcaaggaaaacatcaaaatgaaataaaatatcaaaacaaattagatagaaacttccaaacaccaggacatacaaacagtctgagatgaccggtcggccattaaaggaagtagtgaaattaccatagtggaaggtaagtgtcttcctcattctttgtttgaatcttgtgctccttgtgtcttttcttcctctttctcaggctcaggtactggcctttgaagcctgtctgccattgtctccatgcccaggtagcactgagaaaaccagactagtgtgagcggctctataccgctgcctaggctgacagcgtgcaggtaccccccgcatcggctagcggtgtagcagagcatctcaatccacacatctcgcaccattttctccaatgtagaatggtcgagcagctcctccatgaagaagatgagcgcgtcagcaagctcgcatgccttgggaatgaggggtcccacgcaatccccataaacccagcggtgtcgcgccgtgtgaaggattcctttggcgagctgctgtgccggctgcgctaaggtgatgctgtgcccgacgatgtcgctatacttcgccatgaatgtgatgtcatcacaggcattggcaaacaggtgcgatcgggtcccaggcatgagcatctctggctgcgatgtgaagaggtacatcatgtagcgggatatctccagaccaagaggcacagctgaatctaatgaggtgttgtcatcattgctggtccgggtctg

SEQ ID NO: 13727 - DNA, 5361 bp, Oryza sativa
aaagcacacaagcaaaacatgctataagactactgaaataggaaacaaaactatttttaatggattctttgcatttttcttgatttactgagacttgaatggacttaaacggagctcggatgaattacttatgaattttaaaagataaactgtgtttttactaataaagaaaaagccttaatcactttattgcgcaataaagcccagggctaacgtcagcgaaaggggggcgccggcacgtgggccccacgggtcagcggctccaaagggagggaggtggcgcctggcaggtgggccccaccaggcggtagctcaaaggggaggcgagggaggcgccggccgggctcggctcggactcaaggccgaccggccgaccaaggtgaggcggcagcgaggcatggccaccgacggcggtgaccggcggtgcaagaagcggcggcgacggccgaaaggcggcggcgcatggccgaaggcgacggtggcggtcgaagacgacggcgcacgcgcggagggcggcggcgctcatgagagagagggaaggagggaggaaagggactcctcaccggacgagcggcggcgaccggagtggaggatggaagcgggggcgacggccgacgaacggacggcggacgggcggcggcaacacctaaagaaggggagggaggagttagggatggagaggacgaccgcgacgacccataatggccggccggagatggaaacaatggcgagctcaccggcggcgcgagggaatcggagctccggcggtgattcgcggcaacgaagcggcggtcgaggtgcgggcgggctcggtgagcgcgacggcggcgactgcgcggcgcggcggtggctatagtggcggcgggcgcgaccggagatgggcggcggcggcggagctcgggtgtgacagcgcgggcgcggtaagggatgtgggagaggaccgcaaatgggggaaacgagagaggggactcgggggagcgatttataggtgcgggagggggcggacgtggccggggaggtggccgaaaccgccggcgacgtggggtggagagagagagagagtggggtgggattcgaaatcgaatcccccctctcgagcgcgcgcgcggggcaggagcgacagggcgtgggcggcgtcgtggggaggacgcgggaacggcacggcgtgggcgcgggaggagcggaggaggtggggcggcagcggcggttgccggcgtggggcggcagctggaggaaggggacgacctgacaggtgggccccacctgtcagcgtcccgaaaagagggggaaggggaaacgggccggcccaaagaaggaggccgaacgcggctgggcgagctggattgggccgatggcccaagaaagaaaaagaggaaaagaaaagggaaaagggaaaaaaaaggaaaaaggaaaaaaaaggaaaaaggatttttcctgggattaaaatattgcgcttgcttatttttaattggttaaaattatttccaaggctctgaaaattccactaaaaatcttgttaatgcattggagcatggggaactcaagaaaaattccaccatgctatttccgattattaattgcatttattaattagggaattagctctaggttaattaagataatttcttcggacgatttatttagccaatttttaaagcaaggagagggggaaacttcagggcgtgacaaaattaccccttcagacccgaaaaccataaatttttcacgcctctttgagggtgttggcgagggcctccatctccaagttcttgcggcctatttcttcatccttagcccgaagacggttcttgaatccgtcaagacgggcccgcacggttcgttctgtcgaacaatgagccgcaagaatctggatgcaagataggagtaggcgaagagaacaaaatgtcaattatgagacatgtaaaaaaagaagagtggaaaatcaagaagagagaaaaagcatacccgaaccgccaagcttttaatagcggaacacccctcatcgaactcgttcagttcggtgaataggcttggggtgctggcaggcaagacaagattgcttactccctcgacaaagggaataaggtctgcccgggtcttgaaatcgccagaggcgaagtggggcgccgcaagggaatattccgaggcggatgtttcggcagccgcacccttccccttcgttttgaccataggcgaagcaaccggttgacgtggagggctgtcgaagatcctcgccgcagccgtcacgatccgttctgcggaagctgaaaccccggcggcggcgctaccacctgccccatcggcaccgagtgaaagaatgggggcggtcaaaaggtccaggctgcgcctagtgggcgaagtcggagtctcgtcggaagactcgtcgtcgctgaaaacgcgagcgatatcgatgagtcctccctttttggagatcttcttgaccggacctcccttcgccaccctgcctgacgaaaatgcaactagcgtcttcgccccctccaaatccttttgtcgaaggggggagctgttcgactccaccccggtctcgttgtgaactggacttggggtaggagtgtagccataggtgtcgacgcggtcttcggccgcctcgttcacggccttttcggcaacggcctccgcctcttcttcttcatccccttcctcctcctcgtcaggctcttcggcatcgtcctcgtcgtcggcgtcggaatcggaggaagcaggaacccttcgcttcctaggggcaagcttcacctgtccgcgcgttcgctttcgcgaaggtcctgtatcgtcatcggctttgtgggggttcgcccgaggaggcaattcgccgttgtaaacccggttcgcccggccggctgcctgtcgtgtcagcaactggctgtactcgacgaccgacacgtcgccgatcatcctatgggcttcggcttcagcttggtcgagtgtcaacactgcaaaagtaaagggtgtaaccgcgttgagcgtcaaacaaagcaaaataacaaagcgcaggagtgcatagcgaaagagcagtcttactattcgttccctcagggagaaccaacttcggcaaaccgtcagactctttgccttgatcaactgcgacttgccacgattgggagaggggaaagatgcgaagcatgcaaaattcctccaccaagtcgtggcagctaaggcgggagcaaaccttacgcagcagagcgaaccgcgcctccatagcgccgtccacggcgatcttgggtttccggttcggtgcgatcgccctgcgccggcaccggagggccttcgctgagtcggagccagcctcgaaggggatggtgtggtagaaccacctcgccatccaatggcgatcccacttcgacatggcggcgttcactggccagagatcgaatcgctcggggcgaacattaaagttcacgctcccaaacactgtcttcttcgtccctaccggggtaatcaccgtcttcgagttcacggtggcggacaatatggcaccgaagagttcggcgctaggctcgaatccggaagtccggtacgcccagtcgaagatagcgatccggaccagcgccgatgggctcaattgtgggagctccacctggaaaaggcgaaggatctccggcaacaacgcgttgcacggaaaccggagccccgcctcgaaaaacacggcgaacaccactgttcggttgtcgacgggcttcggtacaacggctttccccggggcgaaagcctgtccttcggctaacgccccagcactgaccaacttcgccaactcgtcgtcgtccatgagagaaatccccaaataagcagtggagtcgtcgtcgatccggccagggtcgggccctttcaccaaagaagggttaggcttgcggggagccatgacgaagggtgtatacagcggcaaacagtgtgtgcagtggcgaacaaagggagcgaacgaaaggtctaaagagccaaggagtgccaagagaagaagaacagaggaagagcgcgcgcggtgaaagtgactagcctagtagtaaaaagagaacgggggggggggagaatatatagctcacccggacgacggttcgcctacccaccagtaataaagcgccacgtgtcgcgagggtaggcgaaacggtaaattcccatcgaccgagctgcacagtaaaaagcccaattatggagaaggaaaagcccacgtggcccattactattcatagtaataaaagagactaaaatcccccccttcgacgctttgcagcagatgcgaagaggatattttctcaataaatttttctaagcataaaaacaaaacaagctttacttgcaggaatgatgtaggtttcggtaggagcaccagtcgaaagggggcgccacataccatattacatggtttgcacggtctcggccgaagctcctatctcacccttgcccgtgaggggcttgttggcgatatggcatgaggcctttcgaccaaacctgccgaaagcctgcgaccggcgaagattcaagcccgagacgttaggggtagtcaagacgaacctttcccatggcgaagactatggagcaaggatggcgagaggcaaggaatcgcagctaggctaaaggcttcctgggcgaagggcgcaaggcgaagagcatatgccgaaggggggggggcgacttcgccgtagcaggttcggccccggaagggccgaagaagctatcctggcccaccaagcctaggggtcaattgggtcggcaataatccgtcagcccactaagggcccatagaccgcaattacgttatatacccatgtaaatgtccctttcataagggcaatcatgtaaattcccctgtataaacaaagccctagtagaaagaacctgtaatggggctataaatagccctatagggccatgtaatagggggatccgagtaaaaaattctcaaattaatacactttgttttccaaccactgttgagtaaccacgtctttcgacctatgcggttgtcgtttcgacaacatacttaaaagacattgattttgaatttctaaattatgcactcctagacctccctgatctttgggttggcatataatatcccatcttataagcctatacttcttcttgtgctcatctccttgccaaaagaaacgtgatccataataatcaattttttgaagaactccttttggaatctaaaaaaaaatatcatcaatatagctaaactagagagcacagaattaatcaacactaacattcctcccacagacaaatgtttacctttccaactactaagtttcttttcaattctttcctcaattattttccagtccttgttactaagtttcctaaaatgcatcagaataccaagatatcttgtaggaaaactcc

SEQ ID NO: 13728 - DNA, 1087 bp, Oryza sativa
accgatctagcggccaactgtctcgacagataatctagcaaaaccaaaaagctaaagatgtctgcgggtactgataaatagagttagggtcgtacaaacccctctcgacgcacccctaatgggttccacacgatacacgggccaaaggcccaaatacggtgacgtaataccgggacagattctggccatcaaattgttcggtcaattcccattgactcggaaataatttgaacgtgggaccaaaaccattggaaatgatatcttcttagctttccatccatataaagaacgccccaatccgagcacgtatgcgacctgggcgcatgttttagtgcagactggtcctggactccgaattgcacctgacgtcgacttggtttgggcctccaccttgacttggacgtcccggatggtcctccatgggtctaagtccttctccaagtgtctgcttgtcccctccattgttactaatcacaatataatcattaggtagcaatccattctcgaattcatacaaagaagaacataggaacgagctcacctctaaatttaattgtcgctcacgagctcttgttatcggtccttgaatgaccgttggaggattgttgtgtgtatccgaggtagtgatgtccgcatcatcctccccctcttcaattgaagtcgtcctcgactcaagctcatcctcttctcccaagtatggcttcaaatctgaaatgttaaacgtgggactaaccccaaactcgggaggcaactcaagtttatatgcattatcattaatcttaacaattttaaaagggccatcagcacgaggcatcaacttagactttctcaattccggaaatctatcctttcgcaagtgcaaccaaactaaatcacccggttcaagattaacctcttgcctacctttactaccagcaattctatacttttcagtcatcttttcaatgttgaacttggttaactcatgcgttttcaaaataaattcagcgcgtgccttagcatcattatgaaccctctcacttgtaggtaaaggcaaaatatcaattggagcacgagggttgaaaccatacactacctgaaaaggact

SEQ ID NO: 13729 - DNA, 660 bp, Oryza sativa
cagaggtagacgacgggcctgacaggtgggccccacatgtctgcggcagcgagcgcgcgcgagggcagctgcggctggacttgggccgacttgggccgagaaggacagagagcggttatgggccgactttcggcccaaagccaaaagagacttttaaaatcctttttcaatttaaattattcatgaaatgcaattccatttattaaaaatacttccttagctcaaataaatcccaaaaaaatctaggaattatagaattaagcaaagtatttaataaaattttatctggccccattttatattggaatttattaattaaaattagatcttctcttctagacttttaaaataaattctaataattccaattaaacaacaatttatatattttggatttttagggtgtgacaaacctacccccttaaacagaatctcgtcctcgagattcggaagaactggcgaacagatgcggatgagctgacttcaattcatcttctcgttcccaagttgattcttcttccgagtgattactccattggactttgcaaaaacgaataactcgatttctagttcttctctcgtctatttcctagatacggattggtttctcaacataggtcagatcctcttggacttctatctgttcaagattagcttctt

SEQ ID NO: 13730 - DNA, 867 bp, Oryza sativa
ccgagctaagatgaattagttatgaatttttaaagattaaatcggattaaaacacttatatggattttaattgaattatgacgcaataatgaattatttttgaaaaggaaaaagggatttattgcgtcagcggctagggttttcggtggaccgggcgcatggcgacggttcacggaaacgaacggctgagatcgatccatccaaaacggacggccgagatcgatcgggtctacagcggctcacggcagacggccccgatgacatcggcgatgacgtcaccaccggcggcggctcgggcggcgcaaactcgccggcgaacaacggcgcttcggcatgaacggaggacaccaggacgtagagggcgacgcggcgaactcaccggtgaccaaaacgtcggcggaagagcaacggacggcgacggcgacgaagaagaagcggcggcgaccttcggcttgacgacggcgacggtgctccggcggtcttcggcagcggcgaaggggcggacgaggacggcgacgacttggcgaccacaatggcgacctccccgagcgacgacgatgaccggaacggcggtggcgcacggctggagcgacggtgacgacggcggctcaaggttgcacggcgttagggcgcttccgacggcgagagacgaaagcaagggtggcggcgggtagaggagacaccgggggtccttttataggggcaagaggcggcggcgagggcccacggcgaccggcgacgagaaggaaagttagggctcggagagagagagaccaatccgaatcgacctcgaatccaacactttccaaacgattttagccggggattccaaaagagaaaaggtagaggagatcccgaagatcattt

SEQ ID NO: 13731 - DNA, 2672 bp, Oryza sativa
gctatttttcttccctcgcggaagcatcggtaaaaaaaattactaacagattacttcacccaaccaatcttcatttggtaaataaattattggcttttagtcatgttagatcttttcagtaaatcagttactcacgaatatatcactagattaatttcttattattagtagattagttccttattattagtaatgatattagtagataagttccttattattagtaatgattttttagttattttcagtagctcgatgccttatttgtggtagtagtatttttactgccaagtgatttttatttttaatgctatgtatcaatctattagtatttttatcatgaacgcttattaacgcatagtaaatgttttacttgatgacaatatatgagaagagtttttttttcaaattatatatcctacacaacatgaatacaatattacggtgttggctggttccttaccaataaaaattacagatgggaaatagacatacacatattcattttgataaaaaaaatcaagaagattgtaaccaatgactactccctccgtcgcaatatgttacaatctaggatgagattaaaccaatactagaactacaaatctggaagaggttgctacatattgagatgaagcgagtacatcccaactcgccaaataccatcgccggtgccgaagactcacggtcgacgtcaaaatcccactgccagctacatccatggtggagtcggtagcatcggcatgctccaccgaggatccaaccttcaccctggaacccgccaacatatgagagaacatgatgatgataattcagatgagagcagatttctcagaatactgcacacacaaatttgcaaatgacatatttctaattgacatttagagcatgatttgtctataaaccccataattttcataacatttcagagcttttgacacaactgtaagtatcaaattgtccagccgaccaaactaaaatttatgagaagggcatgtacttgcaaactgagagaacatgacactcagaactctgaatataatttctctgaacgaaaattctcccatctttcattcagcaataaccactgcaaatcaacaggtgagttgagagcagccactggacggattaaaaaattatcacttctgcacatgtctgtgtgaacaaaaaaaattcagagaactgtattgcctatcaagtaatactcttccaagctaggaaatttcagaagctaatagcctaataaaatatcaactagaaaatctaagaatctactagcacatcaaatagaaaatttcagaaactattggcttatcaattaaatgttgtccgaagacttatgagccgatagcccaaaagccaagcactaatcatattccccataccagtcatgccagaatcaaatctctaaactaggaaaagctgaaattgtttgtactgctagaacaagtatgccacctggaggttttatgaagcaactctttggtgctgttatttggaaccagaacaaaaggcatgcatcaaattagtgctttattagtagccatcaaattagtgtaggtggggactgaaccaacagatttttatggtggagatcaatacatagtcatctgttaaaatatgaacatctctaaattgacagataatcctaaaatatagttcacctttaatatgagttattgagaggattgatttcatcctaaaatacagttcaccttcaacctgagttattgagaggattgatgttatcattaatccgagcagcatctttgaaattaacaggagctggactgctggctactacttactgagttactggtaactaccatcatttgcaaaaccactggtattagcatttaatttgatgaagaagccatcagagaggagctctgttaattaccttaaatgctacatttagacttgctgatgttcttgatcttgacagcactccagatcgacttgcttcccaggctcatctgtacctatcagtagagagcaaagtcagagacaagcaaggactatgtactgtatccatcaatcgtgctgattcaatctattccgtttgcgagcaacataataatcatatgcaattcgtttcgtttttattgtttccagttttgcaggtttttgagaaagccaattttcttcgtggagacagaagaacgagtgcacaaagcgaagaccattcttaaccaggaatcagtatgcgaagagaaacaaggacagagccttggactattctgagccaagcaaatcaatcaagaacaattgcaatcgcgcagcaaagcgaactccaattaatccaaccaaaactgaaaaggattccaaaggaggagtagtctctagacagagcaacccgccatgagaggggaaaaaccagagcaagaagacaggaaagcagcagcagcagcaacagcgggcggggagcagcgaccggatcaccgcggcgccgctgccggatgacgtgccggccccatccccttcttgttcttcgtccaccggcgcgggaaggcagagaagacggccccgccaccgacatcccgactcgccgcctggctctcctggagacgcgcttcgacgacgggaatgttgaggagaggagggaagagggcggcgacggcaggagctagggttttgctcccgagccgcccaccgctgccgcaggccgttgc

SEQ ID NO: 13732 - DNA, 690 bp, Oryza sativa
  unsure (1)..(690): unsure at all n locations
caatggtggccacagtggtcactctttaaaatcctagtctttctcaactccctccgtagatgctgcatccgtcagtcggcccctcatcatcgacaggtcgtggcaaccacattcatcttccgctatgtggtccatattcgcaggtgagtatccccctttctccctgttcccgtgtttatagtttgtgccgcctctgtccaggcgatggccgttgcctttggttgacgccgcagtcctgtacgcagtctgccgtcgtttcttgtgccgccgattgccgtcgccggcgaccgtgcgcgtcaccaccggttgccatgaccggtcggccggttttgaatccaagtcgaacagtgcctacccgccgccgtaccgtccgttcggcttcccagccgatccggactgtcggtcctgtggaccggcggtggaccacccgtgtggtcccggtccacggtagaccggccaccttgagccactgccagtgggcccacatgccggcgcccccttcctctccctttgagccggtgacccatgggccccgcctgtcggcgccgcccctccccccttggatgacgtcagccctgggtattattgcgcaataatttattaaggactttttctttattagtaaaaacacagtttatcttataaaattcataagtaattcatccgaggtccgtntaagggctgcaggaa

SEQ ID NO: 13733 - DNA, 1338 bp, Oryza sativa
gggtagggatgaaaaaggagcggatacggacggataatgctcataccatattcgttttcatattttttatcggatacgaaacgaatacggatagctcgaatatggaaacaaatacggattatcttgaatacgaataagaatcgaatatgatcggacacgaatacggaaacaaatttttctcggaacacgaaaaccaactcaacttctaatagaaataaatatcaacatatataattagctcattttatataaaatgaggtataatttataaatattttttaaaatttaaataatattaatagtatggactaatgttaagagataaactactattaaaatctataaaggtatattgaaggttatagagttagaaagaaatggggtatgtctcatgggtcctgcggatatccgaataacactgttcaccggatatccgaattattatccgtatccgacggaaaccctgataccatattcgtattcgtatccgggagaaaatattcgtattcgtatccgtatatgaaatatccgagaattatccgatccgaaaggtatccgtatccgtttttatccggagcggatggaaactatccgctccgttttcatccctaggtgggggtagggtgtgagggggagtgttttagttattactcacaattggattattatgtctatatatatatatatatatatatatatatatatatatatataggaattggattatttgcacccgagtgcacatgcactcgcaatctacaccctcaattcccctgcacgaatcttgggactgatgataataggatgtaccatgcctgctttcctccctttaggcgctgcggaattgctgatggatggtgactttgtaccgtgtctttcccaaaatgcccttcatccactgaccccttcatctccatggggaaattgtggagtgtggacgcccctgttcttcaatcatctctctacccctctccagttctcaaatgcccttctgctcccgatcccccacggtcggacgaacccggtgagaaagtagaaggaaccagccgaggtcaacgtcgacgggagcctcgtcgccggatcaggcagccactttcatggccgctgcaccagttgtcgctctgcaatggcttcatagacatggggctcggctcctaggacctgcgggattggcggctggcgcggttgagctcccaagccagaagggaggaggagcaggctggcgtttttaccatgtagcactggcacggcaagcagcgaggtggctgcgatggtgagggcacgcgtcgaggcggccatgaggtgaggcatgtggtggccgcgttcctactttctgcg

SEQ ID NO: 13734 - DNA, 2620 bp, Oryza sativa
gagttctacagtgaagctgttggtgtggaggattaggtgtaaccctggtcaagctgcctgtagagtggagtcgtctgcgccgtttatcttatttttccgctgcatagatctttattgattgagaggaactatctacctctgtaatgacattttattcgcttattatttagagtaataattgaactctattatcaatttgttattgtgtgcctcggctgattcctggacgagggttcacacagatgtaagcgtttggaattttggatagaaattccgggcgtgacaagttggtatcagagccaggttgaccctaggttatgccaaatggttacccatagaagccctctaaaaatattggaaaagtagaactgttctcctccccttctcttttaattaaaccaaactaatagcacatgcacttcataatctcttttagtggttttcattcgaaagttattccagtgttattagtactgtacatctattactgtactaatgactcatttaccagcaaaagttttacaatattattttatttaaccttgctgcaatgaaataaatttagcatgttgattttataactttcttttatttcttttgaaacttgttgttcaaaagtacaaaatttgtgaccttgtttccaactgtttcaacttatcttgcaagtttggtttactttatttacttaccttttactttgattttctaactttattcaaattaatccaaaaacttgtgctattaatttgataaatgtcttaactccctcctttcacttgtctttagatgccgcgctacaagcctgagtacctctttggtgttgagggatttgtccaggagttgcgtacgatgtcctttgccataggatttgggacagcccctttttatgcccagattcctcatgatcgtcatgaagagaagtgccgagtcaaagtcaccttgaacagtaatagtgaagatatcccctcagtgatgtttgaagctggaggaagaaactacatccatgcatgtcaggaggtggcaaggatcgctataggagaactccgcgatcgctattgtgatcagttggccgacactgagtatcgctaccatcctcgccaaccacagggaagtgatcgtggcagctaccttgagattgaaggaattgagaatgatgctaccacaaggcatttggttgagatgctgtgggctatggatgaaacccgtgcggagactgtgttagcggctcaagatcgtgaagaccggaatcgtggtaagatttgcaaactagaagacaaggtggatcgtttggagaaggaactagccgcgttgaagggagaagcaccaccgcagaaggccagggttcgtcttaccgcaagaaagagagctctatttgtccctcgttaccaattggcgccaaaggtccgtgtggtggagaaagaagttaccccagccctagcagatcctccggtcgtcattataagtgatgatgaagaagaagaatccaagcacgcccattccaagatcgagtggggagccactcaagatgatgaagacgagccgaacgagccttcaatcaactccgatgctcggaagaactagaatgccatgtcaagtcgttgtcttagatcgttgtgttagtttgcttgttttaagtttggttgtgtgtgtctcgcatgtgatttacatcagtggtgggatgtaagtgcatgcgtttgtttgctttcgagtgttaggtagttggtgagtttggtggtgtgagagtcttcagtttgtaataatgaaacccacttaagatcaataaaagttaaattaattctctgtcctaagtagttttccccggtttctcttcttgtggtcctgtccatgccagatggtgctcactcgcagcaacgggaatggccctaacaacaataacaataacaacaacaatggagagaatcccacacttgcccaagtcttggctcaacaggcacagcttatgaacatgatgatgcagcaactccagaaccagcagaaccagggaaataaccatgcacctccccagaacaagttagcaaaattttttcgtgtgaggccgcctattttctctagcaccattaatcctgttgaagctggtgattggctgcatgccatagagaagaagttggatttacttcaatgcaccgatcaggagaaggtctcatttgcatcacatcaactgcatggccctgcctctgaatggtgggatcacttccgccttaacaggactactgctgaacctatcacttggcttgaattcaccgctgctttccggaagacgcatataccatcgggagtggtgtctctcaaaaagagggaattcaggtcgctcactcaggggtctcgctctgttacggagtatctgcacgagtttaatcgtcttgctcgttatgctccggaagatgtgcgcactgatgaagagcgccaggagaagttcttggaaggacttaatgatgagctttcttattcactcatgattggggattaacctggatttcataagttagtggataaggctattcgtcaggaggacaagtacaatcgcatggagcagaagaaacgccggattgctcaattcaagacacaacaggggaataatcagaagccgcgtcttacttta

SEQ ID NO: 13735 - DNA, 656 bp, Oryza sativa
gcagcccttgcataaacagcatttaataaacatttcagaatttaataaagcagttaataattaagcagtattaatccaacgctatacaacataccctgttctataggcccaaccattctgaacaaccatcccggctgcacagtcctatctccaaaccaggaatgtaccattccaaaccaggagctaaacaaattattaccatttaaagcatttgttatcatgatgagaggtgtgagactaatcacgaaaaacattgttagacccgcccataaccgcgggcacggctattcgaatagttttactctgatcagaggtgaccactgtacccacaagacacaaccccacatcatgtcaccatgtgcctcaataccaccacggtacctcggaaaggagttgtgacaataccccttgcataacacaatccaccgcagcgcacccttctggatcataatcacccccttataaacaaggcatggactccccagcgacccccgggggcttatctcgccacttctcagtctggtgctctgcaatgaaccatgctatacaaaagataaagccgtggccacgctggcttgttggttggcacggttattgtttcacaaccgaaactcgtgaaccggtccttaattgtcatgagcacgaaccatcaaaac

SEQ ID NO: 13736 - DNA, 8811 bp, Oryza sativa
cgacagttcccattttccctcttggccttggaaaagcgaaacagtggttttatgccaaccgcgctatgatcaacaattgggataaatgttcaacggcattcttatcgaagtttttcccgatgggcgaaaccaacgcccttcgcggaagaatttcaagtttccagcagacgagagatcagtctatttctgaggcatgggaacgactacaggagtacatggctgcctgtcctcatcatgggatggacgactggctgatcctgcagaacttctacaatggactcactcccatgtcccgtgatcatctggacacggcaagtggaggagccttcttttccaagacggtcagaggagcaatcaatctcatagaaaagatagtctccaacatgagctggagcgaggaaggagtccagacccgtcagcgtggcatgcacaccgtaaaggaaacggaaatgctcgttgcgaagctggacctcctcatgaagcgattggacgaccacgagaagaggcctcaaggcatcgtcaaggccatggactcacactttatgtgtgaaatctgcggcaaaatgggtcattctgggaatgactgcccagaaacccgtgaagaggcgatgtacatgggcaacaacaacaacaatgggttccgtccacaaggaggtcaggggtggaaccagccacgcctatatttccaaggaggcaaaataatggtaactattttaaccaaccttccttgaaggatcttgtttttgccaagccaaaaccacagatgctcttagctaaaagctggctactaatgacaagactttggaaaacataaatttcaaattagatggctttgcttccgttttccgaaaccagcttagttttaataaaatgattgaaacccagctggcacaattagttgttctagtacctgctaatgaatctgggaggattctggggcaacccgaaccctctgttgagaatgttaaggcgatcacgacgaggggtggtaagtccacttgcgatccaccgtatcctaacgttgtaggaacaggcaacgctctggaagcaccatctagcaacacggctgtcgaagaagtttggccagaaaggaccgggccgcaggaatgttgtgacatgaggctgctgccattcccccaaaggtataagaagccatcggtggatgaacaatttgctcggtttgttgaggtaatccagaagatccacatcaacgtgccattattggacgcaatgcaagtgcccacctacgcacgttatctaaaggacatccttgacaacaagaggccactaccgacaaccaagttggtcaaactgacagaggaatgcagcaatgttatactccacaaactcctagaaaagaagaaggatccggggtgtcccacgatcacctgctcaatcgggacacaaaaattcaacaaagcactctccgaccttggtgcaagtgtgagcgtcatgcccaaggacgtcttcgataaactcaacatcacggtgttgacaccaacaccgatgcgcatgcaactggctaattcttcggtctggtacctagctaggatagcggaaggcgtaccggataagatacgggatttcttcatctcggtcgacttcgtggtgttggatatggattcggagaagaaaacgtcactcattttggggcgaccattccttagcaccagggacgccaacattgatgtggggacggataaaagttcgagtttcaaccaaggatggaacaatgctccatggtgaggatcaaatatggaccaaacacgcaaaatattcaagtggccgaagtggagccacccaaaatggatagcctggggaagttcatgcggaacttcctgggagagggagcacccgttcctaggatccgttattggaagacgccggcacagtctaaaacaccagccaagaaaccagaggagacggctccagagaagccgccgtccacaccaaaaccaaagaaggtgtggcaagtgtagcaaaagatgctcgctccatgacatccgtagacggttggaaaattagcaatctaaacgaaaggagaaacggtcttgctcgtcagatccaaaatgacgcggccctcaccagcaggtaaattggtatgtacctacatatttatttctatcaatttggattctttatcaatgcatgtttgagtttccaaaaaactacatttagatttgagttttgaggaaattacttcaaatgattttttcagagcaaaacaaaataaaattttcaacaaaaatttgctatgccacgaccatactggccattgggttccaacggtcgaaagtggggccagttgggcccaccaggggttcggttgaaccggccagggcaacggtcgggtgcctctttctttgaggcaacaactagtgggtcccaacggtcggttatgaccgttgtgggcagcctatttaagccaactggccagttgaggaaaatccatcccatttcaactcattttcatctcctctccgaactttgctctcaaaattcattcacgctttgcaagtttacctcaaatttaagccattagttgcattcacaagtttccttagtgaagctaaccggtgggtaaatatctcgctattctaacccccgcccgagttagtccattcttattcatttgtgcagaatgaagagacgattgtcccgctagttcaatatgggagccggctctcgatcaagtcatcatgacgagtctagcactcgctcatccaccgatgcctcaatggaggatgccgacattccacatctcttgaacgacgccgacctcgaccttgtcggtgactgggaaaggcaagcctactccatgctgaaagaccgggtgtttgctcacacgcgggcatatgatccggagctgctgaaaaaaaataggtatggatactgattttcgtgctatttgaaaagctgttggatggcagagatttgctgtagtagatgagcctggttctcgtttgcttactttgcaattcctgtgcaccttgaaagaaatagaagatggaattttcttttgcttttttccataaagaatacacacttacatggaaaggattaagtacacttctttgttttcacgattcctgtaaaatcaatcttaagaatggaatttctgggttcgagaaaaacagattttgggaagacatttctggtgctccaatttgcaagaaacctaggacgaatgacatccataatcctacacttaggcttatgcacaaatggattgctatgactttgtttcctagaggtgatcttagacctataagagaggatgaattgattatcatgtttgccatggttaggaagattaaagttgctcttgtaaaatatatgataagtcaatggttagagagtataagatttactgctcctgttgagtgcacttctctggttactcacatagcaagaggacttagggttattgttaatgatcaaattgcttatattttaacccctcgttcctatgttgatgagaattatctagtgtaaggtcatattcttaagcatatagtagatggatctttcatattctttttcctcagttgtatgaatgaaatcctgttacctaatgcgggatatcatttgtacaactgtcatgagctaaccattcccctataaaccatagaagaatctcgtgtaggtggaccatacagggagacatgcaacatggcaagaatggaacgcgaaggttcaacatcctcaacacccgtgcagatgtatgtggccggttgggagccatctggggatgcgcccagatggacccaagctccaggccattgcattggaggctcgggctgggaaagtgccagtgagagccgacggcgggcgtatcatgacatacaatggggtgggttgaacactcaatcccccggatcaagcagtatgcctccatctcccgctgaatggcgctcaagttcctctcgttggaacttgggtgaatcaccaggagaatggatacccttgatatgcaaatgggagagatcaaatacaacctcgaggaacacatagcacagacgcaagaatagcagcaaaatactaatgctcagttcaccaacatcaacaacctgatgcagcaacagcacgatgatcttcaagcttacttccgctttcacggattcaatccttatcaaggactctgagtgaaagccaagcttgggggagacgtctctcgccccactgaggtaacttgtatcattacatatttccctttccatatgcatgtttatttttccaattgcatcctataaactaaaaacatcataaaattttgaaaatagaaaaataccgaaatgataagttagattttattatcctaggtaagacaacttagttctctttgttgaaataacgaatagttgctctgttttttatctctcatatatgggttcatggttaagtactctctcaaaaattgaataagagtagccaacaattatccgggaacctgagggaagtgagctgcacttgctaatctgagtttaagttgctgtgagatatgagatagtaataagttgctataatcctagtctgagtttgacttgacttacggatgttttattttcaaaaatgataaactttggaagttcctcacttgatataaattcctaccaaagccaaaaatattcatattgattatgccatatacattttggttatttgcaatttcattgaactttgtcaagtccttgtgacttgtgttgatactttccatgctctataatcaagatcaaacatccacatatatgcacatgctaaacttctgcactggaacctagcagatgtccattccatctccataccaccatcaaaataaattctccatgcttatatgtgctttcttctcctagaaaagaaaatcatttatgaaaaaaaagagagaaaaggagggaaagtcatggttataaaaataataaagttatgctctatcaattttgaacatgatgttgaaaaaaaaagaaaataatgtgtagccaaaccctctccttatttataaaggaaggattttggagaaggaagtaagcacaaaggagaagcacaaagtcatggttataaggaagtatgtttagttatctattttagtctaagtttttgacttagtaataaatgtgaatgcaagtatgccatgtttgattgctaccaagctccatatatcaaccgtagaataggaataaaaaaggcaaattgctgaggaattcatattcatatacttggagagatcgagtgaatcatttgaggaacttggatttcttttgcaaaatcatttgaaaaactttcggaataattgttgaatgtagattgggtaattagtgctctaattgatgttctgtttctcaaccgctctttacaaagaaaggcagtgtcttgtgggaatcaggggtaaggataagccaccgtgccaaatttattaatttgagagagagagtacacataccttgcacctgtacatttgagatatacagcatggtagcaactcctgatcaacaatcaagtttttttttgtgagtccttcactcgggacgagcaaaggttcaagcttagggggttttgttgacggttgttagcgatcagtttcgcccgtcaatattacctttaaataaaagagaactagttatgcttgcaatgcatatttgtgtttaaataataaatattcaactagtactaggattattaaccccttgcagagaatgagcacaaaatggaggagaatcgacaacaaaacaggcgatcgatcaatcaggacaatgtcaagaattagacttatcaatgaatgggccaagaactcagaaatgacaggaccaattgggccaaaattcacaagtctgcaaaatatatcaagagacaaggccgctagccgaaggtgggctggattgggccagcccatggttcgaccaaaccctcgctggtaccattggatgcaggttttgtttttggacggcgtggatcactacccaatgacggttggagggcaattccgaccattccaacttcacaaccatcattggcagcctttttaaggagctcctctcatcacttcttccacacacctcaagcaagaagcttcatacatctctcaagcttagtatagtctctagagtatagtggaatagaaatagaatagaatctttagtccttggagtcttcggaagaattcaggtatggctctagtagcttttccttcttttgtaagaattgtactttatttagaatattcttctttatactactttggtattgtactactttccgagtatatgagtaccaactttattatatatccaagttatattcattatgatgctagcttatctaggagatgcaatgatgtgggtataatgatcgtatttacgatgactctatatcatgactctatatctaaaagtatattaataggatttttctattttcctttccactttgcttagataattatgaatgagagtataaatgcttctgcttagtgtcactctaccctttgaaatatattaaccccttcctagactttggttattacaagtaatattaaattattagtatggttttctctattataatcttcccacgagattaaacaaatatgatacccttggaatactctcagttgaaatgctacaatggtatatctgtgcgcttgttggtgaataaccataatatgccagaagtatttctgcgccattgctaggaattatatttctagtaatgtcgttaagaaatagtaacacttgcccgctgtgttgggctgctaagggggtggtgatatgccccttgccggcctaggtcctaggcggtcgcacaaccagcctaggcccagggccagccctgatgatggattttcttttgtgggtacaattgtataccttgaccagagtaaaactattcaaatagtcatgcacgcagctatgggtaatcgaccagcttcaccacgattagtcctactctattgcttaacttgacatagtgaacttgtgtagttcaggtggtatggttgggcctattcaacatggtatagcattgtttagaggatatttaatcttgccttaattaattagtagttttattgttttcaactataaatgtttacaaccgcctttatgcaaccgccttgtctccccttgcatgtatgcatcgttggtgtggcttgctgagtatggtggttgtactcagtcttgctatattccccattttcagaagtgtagtgcttatgtgttgaagatgaatgtagaggacgaaggcttatacctcagttgtgtttttgcctgtggggtggagctgaagtcccgctaggatcgcccgaatttttgttgttattgctttcttttcggtttgaggactaaatgcgtcctttgtaagcatttacaggttatttacgtttggatctatatattaatttgtcattttgtgtaccttggcttaattatggacagggatttatacacaaaatagtctagaaattggccaaatttcatagcataacatcgttgcaaccttcaatgaggggtaaaatgagagaagggagccggttggtatttcttaacgacattactagaaatataattcccagcaatggtgcataaatactctgggtatattatggctacagagttcatccgcaagggcacggatattccattgtagcatttcatccgagagtattccaaggttatcatatttgtttaatcccatggaaaaattatagtagagagaaccgtactaataatttatatattacttgtaataattataatctaagcatgtgttaatgtaattcatagggtaggaagacacacaagcataaaactactcattctcatattattctaagctaagtggaaagtaaatagaaaagaatctattcctatacttcttctagtatacgtattatacgtacatcctagttataatattaactagctaatatcctcttttcgatgtcctcctggtacttcgagaagccacccctgactgtcgagttccatacgacagcccatcatgaccatacaaccggggctaaatacggaggagtaccgtccccaggaaattaacttaggaatatatacacgagcgaaggaatacccatactgagctgtcaccatcagcggcccacctctcttccgcagcatatatccctaaataatgatacccagtaatctagacaccacgccaaaactactatatactactctaatatcatcgtcatgacatagagtaaatgcataagcaaacattatacccgtacctatccatctcccagataagctagcagtttaatcaatataacttggatataaagtaaagttggtattctaaataaaattggaaagaattacaacaccagaattgtataaagaagaatattctaaataaagtacaagtcttacaaaagaagataggagagctgctagagccctacccgaactcttccgaagactttcggactccgatttctattatattcctactccactagcttgagaatactaaactaagcttgagagaatatgagagagttttgcttgaggtgtgtgttgaaatggaggatgagagggctttatatagcttgagaatgacagttatgaaggttggaaagattggtaatgccctccaaccatcactggggagccatctcagccgtccatccaagcctcgaatcaaatggccgtgagaaaggttcggacgaacccgagccaggggccggtccaactagcccatggtgtggctggtggcctccactcttgatccctgttgtagacttatgaattttggcccaatccgatgtgacatttctgagttcttggctcattcatgcat

SEQ ID NO: 13737 - DNA, 525 bp, Oryza sativa
ttcgatttgtgtttcaccgggtttcggcggtctaaccagcggtgcaccggcggtcagaccggcgggcacacggcggtcagaccggcggcgacaggagtcggcggcaggcattctcgacagttcgaccgatcgatctacatcggtcagaccgacgttcatcaggcggtcagaccggcgcaactacttcggtcagaccgcgatccatcgatttcgagggtaacttttattttcgctaaaagtttttggtttttgggtataccaaccattcacccccctctggttggcttagttcttgtgattcgttcctacaatatatgttagatattgtagaaatgattaaatgatttgaattgaaatattttgaaaatgatttaagattgatgatttagcatgtgtatgtttagctttagaatgaaataaattatagatataattactatatgcttgcatgttgaactttgtgtgcttagtgggttttataaagataatacccactaaacacatgcaaacatagtatttattagc

SEQ ID NO: 13738 - DNA, 543 bp, Oryza sativa
tcacatcatctggacgtgctgcaaggtagaaagactgaatataagataagtttgtatcttaatggaaaactaatatcatctctaatctggcatctgtactatctgcaggctaattgccaagtataggccaaccatgcctgttctatctgttgtcattcctcgtctaaaaacaaatcaactgaggtggagtttcactggcgcatttgaagtacgtgatcagcctttctttttctactatgtccatgatctgtttctaactttctatacagatgtttagcttgtcttgtttggttaacgcttagctgttgtagctcatatttcttgtatccttgttctgcaggcaagacaatcgctcatagttagaggcctctttccgatgcttgctgatccgaggcatccagtaagtttggcttctttgttgactacagaaattgcaaaaatattcatgcaaaacatacttggtggatttattttcttgcaattgaaaggcttggccttgtcatgggggctttttcagatttctaatacattacaatataacaa

SEQ ID NO: 13739 - DNA, 1018 bp, Oryza sativa
atttcagtacaaagacagccactccagatattaggtggtggtagtacttgtcagtactgatagctaaatacagtgacatatattaactatttctttatgtcttattcactcggctctaggcatcattggtattctgatctagacatattgtaaaaggaaaaaaggaaaaagaagcattgctaaggcctagttcgcgaaaagaaaatatttgagtgtcacatcggacgtttgaccgaatgtcagaaggtaatacacgaatgaaaaaaaataatttcataactcgtctgaaaaccgcgagacgaatctgttaagcctaatttagtgcagcacttatagctaatcatggactaattatgctcaaaagatttgtctcgcaattttcatgcaaactgtacaattaattaattagattttgtttttatctatatttaatgcttcatgtatatatctaaagattggatgtaatgttttttttgttaaccaggcctaatactgatattctggccttgaaatgtactagcccatgctgcacagtgcacagctagcacgataaaatataatcttgacacagctgcacgttgcgccattagccatggagtccggcggcttccttgcacgtcgtcccgagccatgcgccgccgccgccgaccccgacgacggcgacgcccgccgcggcggttggcgcgccgccttcttcctcgtcggtaagtggcggcttctcaggctttagtgatgacatcatctctctcagccaggcttaatttgttgctgacgtgtgcatgcatggccatggcgcagtcgtcgggttcttggagcggattgggttcttcggcgtgcaaggcaacctgatgctgtacctcaccggcccgatggccatgtccacggcggcggcggccaccgcggcgaacgcctggggcgggacggtgctggtgctcacgctcgccggcggcctcgccgccgactcctccggcctcggccggtaccgcgccgtcatcgtcgccagcgcgctctacctgct

SEQ ID NO: 13740 - DNA, 663 bp, Oryza sativa
attcctgcagcctgaccacctgcctatctttgttcatgttgggttgattgatccgcatccatatccgctcgcgcgagcccttcttttgatttcgattctgtatctcgtaatttggtcgatgcgtaggtggtcagtcgtcttgatgtgatggaggatataagctttccctacatgacacgcgagatggccgccgtactgcggcggagccgtgttgccgctgtcgaacacaacaattttaacatcaggcagcttgctaatccttaccatgggtatgttggcttctttcctctctctctctctctctctctctcttatatatataactggagtatctcggacgcaacagcacaatcagtttatgcatattgatctaacctgtctcaatttgcattgttcgtaggccggctgatggagatatcctgtatgacagggcatggattaacaatcttgctctgctttttactctctccacgttatttggggcgtttagtactctagccaagctaaagcagacacggacagtggaccaatgtgtccagacccaaactagttaaagcaaccactgaggttgtatggattccagtcccaaacttgttaaatcaaccgctgacgttgtattggatatcatactctgtatgtcgtaatacttaatttcatatgcta

SEQ ID NO: 13741 - DNA, 513 bp, Oryza sativa
tcgttcagaacggtgtttatcaggtggggctctcatgcgagcttgagccgttaacagatgatcacgaatcaaattctgcatcttatctggttccagtagccaatccgacaactctggtgactgacagagagcattatcagataaaccaaaatatttgggtttgcgaccatatagcacttcaaaaggagtagttcccaaggatgagagaaagtatgtgttgtaccaataatcagccaaagccaaccgtgtactccatgagaagggcaagcatgcacaaagcaacgaaggaatgtttccaaacattgatttaccctttccgtttgcccgtcggatgatacgatgaactcatacgcaattgagagccagccagtcgaaacaaggtagtccaaagagtgcttgtaaagattctgtcgcggttggaaataagggattgaggcaatccatgtagcttatggatgttttgcatataagcttcagccacatcgaaggcagtaaatgatgaactacttgcag

SEQ ID NO: 13742 - DNA, 2411 bp, Oryza sativa
acttgaactgtttttctcaggcaggctggctgacggaacaatcaaaactagagggcatttccggacgtgtgattgcgatgagacgtgttgcaatatccagaccagtggctagacgtgttaattttaacttgatgaaacgtaagaaggctggatccaaactttaattcttttccatcacatcaacctgttatacacacaatttgttatacacacacaatttttcagtccaaaatttacgctgaactaaaaacagccgaagtttgagttggaaaaaaacttttttggatttgttgtgatatgcccattaaacaacttaccaagcgattaaagactgtgctatacgtgtgatccagttgtatgatttatgtataattagagatatacaatcatataattagagacaccgtccatttttgtccatgtgtcataagcataccaattttcggtgattaatcgctaatcgacaaggcgatcacatcaaatatttagacacatgcacggagtattaaatatagaaaaaaaataattatatagattgcgtgtaaattgtgagacaaatcttttaagcctaattgcgccatgatttgataatatgatgctacagtaaacacttgctagtgacggattaattaggcttaatattttatctcgtagtttgcaggcggaatatgtaatttattttgttattagactacgtttaatactttaaatgtgtgtccgtatatctgacggagcacacacaaacttttcacctgaactaaacagtgcctaatttatcggactaatcggccgttttattgcgtccatgaaacaaaaaccgttctgaactgcctcgactcccgtctcctcgccggaaagccgccgccgccgccgcccttctacttccgccgcctcctccttcttctcgagaaggctctgcaccacagacgagagctgagccgcggagcacaatgtcggcggactcggcggcggcggggagggacgctctcctggacgagctgcgcgcgctcatggcggcccactccccgtcgctccacgcgctcgtcgtcccgtccgaggacgcccaccaggtccgtccgcgcccgctgccacctcccgcggagtcgatcagatcagatcgggcttggatttttgttgttgttgttgttggattttccgttttgcgcgatctcttcttcctctcgatgatggttgaggatttgggtgtggttttgtgggtgattgattgattgattgcagagcgagtatgtgtcggagcgggacaagcggcggcagttcgtctccggcttcaccgggagcgctggtatgttgcttcctcaattcatcccttctcgtttcccaggcgatgaacgctgtgtattgtcctagaccaccagccatgagtctgttgcgatgagttcattatacaatagtgcattttgttttatgcactgtttgtacagggtgccaatttttcccttttgtgttaacacaaaaagtggttttttttttgttcgcccgaacttgattcagaaagcggttgcctagtaatagaggctaatggttgaatttttaggagcagttatgttttatgacactgttatgtttttggaaatttaggtgattaacagacatttttggactggattgttttatacattgcttcggccaaacaaatcgtaataaaattattgatagcttcgctaccatttatagttatggtttaatctagctggactaaagtatggaatgataaccacctttgtactgggaggagcttaattgattcctattttgtagtaggatggagttgaatatcataaaatgtggatgtaacatattgaacttgttgatttcttttgttttcccccagttgtcgtaatcagagagttgcattaatttctcagaccgagctatattgcgttgctacacaggtttggcgcttatcactatgaaggaggcgctactttggacggatgggcgttacttcttgcaggcagagcagcaactcactaatcgctggaaattgatgcgcatgggagaagatcccccagttgaagtttggatagctgatgtaagtgttgacatctcttcttgatcatgttcatgagtttaatttcccaagtcttacataataaaaatattggttcacaaaacttgtccatggaaatgaatttatttggttataccctctcatttttttttgaacagccagatcaaaggtttatccttgctttttgaattctgccacagtttttgtgttgtgaaatcccaaaagtggttttattcttgttaattttagctagttttatctcccaaatatggtccttttcattttgttaaccatattcagttgttttgttaataccccaagcctactatctttcttcctgtctgctgtagattcaaggaactgcatgatagttggtttg

SEQ ID NO: 13743 - DNA, 3001 bp, Oryza sativa
aaaagtaacaatgtccaatattttttaaaaaagaggtacttcatattataagtagtctaagtttaaccaaatttatagaaaacttagcaacatttccgacacaaaagaaaaatattatcaatatacataaatgttagttttagtgaaaccaatttggtgttgtagatgttactaatttttctataaacttaatcaaatttaagtttggatataagaaaagtgaaaacgacgtaataataatataaaatgaaggaagtatgattaaaaaaaaagaaatcgaaacgatttataatctgaaacgaaggaagtcacttgcctgccatggttgatgcactgggacttgcactgctgggtgagcttgaaggcctcggggcagtaccaggtgatgtagtgcggggtgaagagggcgtagccacctctctccatgatctgggcgtggccgcggaagccgcggacgaactccatctgctcgtcgcaccgggcgccgcactcgtcgttgctgttggtccacagctcgtactccacccgctcgtcggggtggggcatcgactcgcgccagtccagcttcaccaccacctccaccgccgcctctgacgacggcgacggcgacgacatcctcttgagggactcgccgaacgcgcggttgaccagcgcggacgggatgctgatccggtcgatgtactccgtctccggcgactcctccggcgtgtccatcgtcagcagctgctcgtccacgttgtccgcgatcagcaccgccgccgcgcccgcctgctgcgcgttccacgccttcagcgcgaagtagcactctgaatatcaacaaacggaacagtttgtcaggctcacatacatacagggggcgtaagtggctaacccggcgtaagcccacttataggtcaaaataaacgggctcgtggtttattttgatttactacagtggatttcgcgggttggtcacttacatcccacatagtcatagtatgtaaggttatcaccgacaaaagaaattaaaccataatgtttattagcgattaaaaataatttattggtaaattttttatatacatgttcttagcgatttaaaagttaatgctgaaaaataaattacggtaaaaaataaccaaaatatacttaaaataaagatttaaaattcaaatagttgactgataagttaaagaataaaaattcaaacgatgaagctgattatctgcattaaaaatattaaaattgcttcttctttattgcaactaaaatgcactgaattgagtgagaatttcagtatattagtacagaataagtgggtcaatttgcaattcctatttcataatctgatggtaaaagtgtcctggtgcagagttcagaatctgatggagagtggcttggaaacgaaggatgaacaggttgttcagtgctgcctttggcttgaaggaattgagagacacctgctgattggtagtggaggagttgtgatcaagtgcgttgcagtggttggatcaaataccgaatcaggtatgagattcaaaattcaaagttgcaatggataaatgtacggcatatgtatcaagaacctattctcgctttccttggttcagagttatctgaaactctgacggaaagaaaggaacaaactcgtcgaaatgcttaaagttgagccgaatcccgaaagtaattaaactaagtgtgtgtttgaatcttataagtagtgaataagaagtggttaacatgtcttcaataatggctctgaactaagattccgtcctagttattggtattatgttaggtagtattctgcaatattggacttgtttttccaggcgaaacaaacaaaacaatttgattcagagtaagtgatctcagttctcaaacaatttcaaaaataaattaaaaagttttggtctaccatcgttcaactctgctttcagaactgaattataaattcccttccctcgccacaataaaaaaaatatatatgaatgcaatctttcagacttctaaagttggacaacaatccacatcaaagaattaaaatactatacaacttaaccatcatgcctaccttgatactctcttgctaaccatttcttttgttgtttttttaatcagtggactagctaaccattggattgacacaacccattaacagaacaaaaattggcatgacttagaacattggaatcaaatcatcaccaaaccaaactctcaaaatccaaataatcatcaaaaactaatactacttctcaagtttgttcagttcagacttgcagactttggaacacaaatttcttgaaaaatacttatgcaaatcaaaacaagcacaaactaattgaatcaatcattggaagtttgaaatcaatctcctacctccacggtcgagcaggaggatgaccgggcggcgagacttggacttgaacttggcgtcgaactcggcgcagccggtggccttcttgtcggggtagacgacgacgccggtgagcgtgccgccgtagtccggcacgccgaagttgccgatggcggcgtcgtggtgcccccggatgtgctccggcgagagcaccctcacgctgctcttctccaccacgaacctccccatcgccggcacggcggcgcccaccaccgccaccacgacgacgatcaagaacggcacggccccaatcccggcgagccatggcgccctcctcgccattgctgcaactcgatcacctctctctctctctctctctctctctctctctctctttccaagaggcgacgagaggaggagggaagaagacgacttcaaagaagaagaagatgatgaagcttatgcttggtgggcaccaagattaggtggctctcgctcgcaagtagtataaattaaatagaaatttaaggaaaaaaatgttcttgctgttaattaacaactgtgagacgagctcaaccgtgcaaaggggaatggatggatggatgaaaaaaaacaaaggatatcacgagaagaagatgaaaaaattgtgatcttttgagaggaaaa

SEQ ID NO: 13744 - DNA, 2935 bp, Oryza sativa
  unsure (1)..(2935): unsure at all n locations
attcctgcagcccgcccatcaatcacttgatagtccagtagtaattgtatgccaatatgtcagtttcagaagttatttttcttcagagaagtttcagaaatatgtttaccttcacatttgtggccatctccttggaaacccggggggcatcggcatccagtcaatgcagtgtcctatgaaattgtgcagagagtgattagcaaagatcataacaaacaacgagaggtttttctgcaagtgaaggctagagagttacagagcaagcagagaacgtctgatgacccctagtctctgaccagcagcctccgttgtccaccgtacacctgcctggcccaacagctgaaacaaaaagaacaaacatgcaattacattaaaattcaaaacatggtgagcctgaaatcgaggttcctttggaatgcatgaattttacagaattttcatggcctatcgaccaactatacctttgcaaccgatgtacccgtcgccctcgtactggacgccattcaccactgggcactcgcacaccctacccctgaacgtgtcctgcgtattgttgtgaacacgacgccagaaaaaatcagattaaaaaagctttatcgatatcagacaattacatcgagatgatacaattaatctataaaaccatgtagtaccttgcaagccgtaacgttggttttctcgtctctccagcaaccgccgttcctgtgcaggcactcgttcgtctcgatatctacagttgaagaaatgaaaacagagatttcattagaatttcattccaatttttcagaattccacgaaacaaaacaatatgtttctctgcgttttctacgcaccattgctcaagcagacgcgaggttcagtgccctccttgaagccggcacagacagctttcagcacggccgtcctctccagtttcccttcatttttcacaaccatttttgtttttttaataatggaatgtaacatctatgtctttactcaaagagctacagttaattattacagaaagctatttttattgttgttaggaatctctaatcagcttcagtgtttgcaagtaactaatttgttcttaattatcattcttggcgaaagagatgtgccaaccaacctctgtactggacgttgttgatgacgagagtaggcaagatggtcacatcccctcgcgatccacggccaatctgatcaaaggcaccaaaaccaccgacgttaatggcttaacacatcatgtaatgcaagagacctgcgagattgtgactggccaacatctctgacacctgaagattaaaacgctaaaaaaaattcttctcctaatgacaccatgaacagtatagtttcagtcactttgcatatatacctgatcttcctgctctttggccaagacggcgttgtcggtgtcggcctctggatcgcccatacattccagcaccttgtcaagcgacagacctaaggaaagaaaaaggtcaagaacaaaagaacatttgctattataaaagcaccaaattcaaattatagtgtctacagataatacgcatgtgcggatatgtttttaatacggagttaggaaagtggatcttttttaaaagttacatatgaacaattgcacatatgtttttaatatggagttaggaaagcggatcttttggaaaagttacatatgcagtatgtttttaatatggagttaggaaagtggatcttttctaaaagttacatatgcacatactacatccgttctaaaatatagtaaccgacgcatcctagtattcatatttatccagatttatagtagtaagatgtgttcaattcagctttagtttgatacacgaaacgatttaactattttttgataaaaaatatgacgtcataaatataaaccactcccattagtgaatttaagtactttttgctggcctctatatctttgtagacatactcaaggtacatgcgtgtgatatgcataatactccctcctttttaaattgatcatcatataaagaaatctaaattttcttaaattgatcatcatataattgcatggacatgaatttcatcggaatacaattaatatagcatgggagaatctgtacatactagggtgtaattgatatggtgttttaatcgatacatacattgtgagagaatgtgtatatgatgtcttgattgatgcaatttaaattatccttgatcttgatgcataagcatatatgatgatcattttgggatggagggagtataatactcaaggtgcgtctttcgtgtaatggcaaattagagcaagtaacgaagaacgatgaactgatcgatgagcatatgcacactgaatgtatggtaccatggatctcattctcacctagggccttgacgacgtcctcggcgcagcccttgctgtacttcttctccttcatggagcacctgatcttgtagtccatgacgtagtcccaccacgcccatggccgcccggtctcgttgccacccggtgcacgcacagctgcctcaggttctccaccaccacgtccttcccctcgtacccctccccgaaatcctgctccgggtccggcgcacaatacctgcacgcacccatcctcaccggagctcgatcaaccactccatcgattcatggcgcatgatggtgtccccaccggagacgaagaagaggatactatgatactctttccgtttttcagtttttcagtgtatgacgtcgttaacttttttttatatgtgtttgatcatacaccttattgaaaaaaaaatgtaatcaccatttatttcattgtaaccttaatttgtcgtcaaatgttttgtaattaagcatgtcttaatttttttaggcaaaattggttatatagcatcgaaaggncacatttttggttttatagcaccgaaagttaccggtcactttaatagcatccaaagttcaccatgttcctatttt

SEQ ID NO: 13745 - DNA, 7598 bp, Oryza sativa
ttggaagtacgtctacgcagtttctagattttttttatgatattgttatttggtatgcacgatgtatacacgtaaagatttgtgtgcacatgatatgttcccatcattacacactttatccataccattttacgtgtgtaaagctcgaatccaaaattttaaaactcgtgttcacattataaaaacgtttcaaattgggttgaattcgtagaaatgatttattgtatatagaagcactttttgcaagttttagaccatttctatatagagcccacatataaattacctatacccattggataattttcatacccaataggtatgggaaagctaattataaaatagatatgggttacccataccctccccagtgacatctaaaactccaatttaaactcgatgaaaagatgaggaatgtaaagtagacttattccgttgaaaaatggccgcttgaagctgatgcggcccgtgtcacaggcggcagcagatgccgatcgagaccgagcaggagaagcccatctgtcccgtttgtttcgtgctgaacgctcgcgtcgcgtagcgtgcgatgaggccgtggaagtggaactgggcttgaatcaaggacaccaccgttgcaggcctcgctgatatgggtttagttcgcaggcccacataaaataggcaaaacctctttctttttcccagacaacaaaatgctcttttgcactaataaataacggaagcatgaaattacatttcaaattgctagttttaattaaaaaaacaaaaacccttcaaattgcgcttgcaaagccaccgatataaaacgtgtttgaagaaaaggtttgggaaccctttacgtgaacaaaaaaaaaactcattagagcatgtttaattaagtattagctaaaaactttaaaaattaattaatatgaatttttctgaagcaacatttttatagatttaaaaaaagacgcaccatttagctgtttgggaagcttgcacgtgaaaaaagataagttaaaaaaaaggagagaaatgaactcaccccaagtcttgcttatttgcaatcttaatgctaaagacagtctacattgcctatgcgctgatagtatctctaacagaatatacaaattagactatccaaacacctatacagctatatctccaattgatttggtaagccaaaatcgttgctcacgccaacagcttcttcatctaccctctccactccaacccatatgacactgcaacccatatgtcagcctctaacatctcttcttcttcctcctatttctccattcttcctttgcttccgctggggccaccctgagctactctccatccctctccctccgtgcggcgacgatgtttgtgtgatggcggatggcgacagcggatccgtgagcgcgctaggcggggtggctgacgcggatgaaaggaaggccgtcaacaaagcgcgatacccatgctatagtggcgcttgagctcactgacgtcccgtacactccccaaccctgtcgttgccgtgggcttcctccatgccagcggaggcaaaggctgtaaaaatcgccgttgagaggagacaacgagagctgagggcccccgagtccatgcagggacggaggctgtgaaggtcgtgtggggttgaagacggcaacgacagagtagaggccacggtggcgaggaggtatgtgtaggctgcgacggtggagtagagggggaggtgcgggatgtggcggtgacgatggcggtggcaaacgatgaagacaatgattgtctcgttagggggattgcgagcgggaaaccatggtggcgaggaggtgcgcagcggcaaagttccacttgatctgcatcgcaagtgggaggaaagataataggaggtagttagacccacatatggcaagtgtagttggctcaccaagtttggtaagtaagggaaggagtttgtccagtcggatagcttgaagagtgggatgaagagaatgcaatttttatccactgttgctaaactttggtttgaagagtaaaatagaaaggctgttgaagatgttcttacgctgttacacgtccatgcccatttttctctctgtcaagattcactggtatgcttacatcaatacactttttcttgttatatgtttgttaccttattagctatagccaatatttatttttttaatttaattttgagttttttttaccataatttattttcttctttggcttttaaatcaacaaagaaacatatacataaaattgctataaatcattttaatttcttttcactttgttcatttttgcaggtaaaacgatcataacaatggaaaaatcataggggaaaaaaaagaaaaagtagagtcgtgagtgcatgattctatccacgaagactgaaattttggtgcttacgaatattacacacgtatagatgattttttaacaggattttcatctttagagcatatgttacgagacgtattcacgggtgtgagtgtggtgttatgcgtctgccatacaatccaaaaaaaaaaacaaaaatcatggagtaaaaacctgattcacgaatcaacggtgatgataacgcgcaagaacaaggaataagttcatctaaggtcccttaacttatcaacgaatccgattttcgtccttcaaccacaaaaccagatacaacgggtcccttaactatcaaaaccggtgcatattaggtccctcggcggttttggctgacgtggcgcctgcgtggctaattttgactcggtctcgatctgacgtggtatgacgtggcccttacgtggcaatttgacccgggaaaataataaaccccgtgggacccacatgtcaatttcacacacaaaaaaattaataataatggtggaacccacgctgccccacatgtcagtctaactcacccctcctcttctgcttcctctctctctttctctcctcttttcatctctctcttgtgctaggggatgcggccggcgatgacgatggcggcggaaatggagaagagtgactgccaggggcataggtgtgacgtcgctgggggcgctttgaggcggaagtagactcttacgacgtggccgtcggaggtgagcgaggtcgtcatggactcacgggattggcggtgtcgtcggcagcggtggagcaggagttgtagttggagtccttgtcgtcgacctcgagttcgtcaatgtgctcgagcatcacccaccattagtagtcgccggcggcggaaggtagcgccgccatctcctgttgggtttccatgggccgcggcgagcggatcgatatgggttcctcgtcagtccggccggaacagtgttttcttgcctaaaacaatgatcattcattcattcatcaaccccgtcataacacaagcaaatgatgatgacgaagcaaaatatactctagtcagctagtactagtcgctattgcttctacctttgtatgattaggcacataaacgcggagcggaggtcgtcggctttggtgccccagccgaggccgtggacgaagagcttcctgctcacgggatcggcctccgccgtgcgccgcacggtcgtcatcatcactggggtcgtcttcgcagtcggccgcctctcccctctcccgccggcgaggtggccccctcacccgcccacgtggacggccgccttcgaggatgcgcgcgtgtgtcggccggtcggcgggacacgttcatcccgccgccgaggatgccgaggtcgacgtcaacatcgtccgcagccacggccgcggcggcgctgcctccgccgccgggctggttcctttctctccgctagtttccctcccaccggccgccgcgccgcgccccttctcccagccggacaccgtcctctccccggcgcccgtgaaccggagagaagagaaagaggagaggggagagagatgaagacagagaagatggtgaagaggagaatcagaatgacccagcgcaagagagagacgaagagaggggaggaggagagagaggaagcagaagaggaggggttaattagactgacatgtggggtccgcgtgggtcccaccattattattattattatttttattgtgtgtgaaactgacatgtgggtcccacggggtttattattttccggatcgaattgccacgtaagggccacatcagtgccacgtcagatcaaaaccgagtcaaaattagccacgtaggtgccacgtcagccaaaaccgccattgaaaccgccgagggacctaatatgcaccggttttgatagttgagggaccaattgtatctggttttgtggttgaaggacgaaaatcggattcgttgacaagttaaggaaccttagatgaacttattcccaagaacaatcggtacgatccaacggcccagaaaccaccgcatcgcaccggaccagcccaaccatttcgtcgagcacctcacgcacgcgctcccctccaagccctaaacccattccccaccaccatgcgagccatcggcccgccgccgccgccgcgaggcggcacgcgcacctccccacctcctactccgccgccttctcctccttctccggcatcggcggcggcgccgggcgcgggcgtgggcgcggcctcccgccctccgcgacgccgccgcgcgcccccggtagccccgtcccggacgacgacgacggcggcggcgcggatcccttctcctccccggcccccatcggccgcggccgcggggaggccgtgatcccgtcggtctcgtcgccgccgcttcccggcgccggccgcggccgtggatcgccgccgcccctcggtgaggtcgcccccaagcaaccggtccccgccaagctgttcgacgcgccggccgccgaggcctcgtcttccgagccaccgccaccgccgccgccgcgcacgctcccttccgctggcgctggccgcggcgtgccgcggatgcagcagccgccagtggagatgccgcaggaggagaaccgattcatccgacgccgcgaggagaagaagaaggccgcgtcggcggcgcgtcccgctcccagcgggcagccgaagctgtcgcccgaggacgccgtgaagcgcgccatggagctcctgggcggtggcggcgacgacgatggcgggcgtggcggcaggggtcgtggtgcccgtggtagggagcgcgggcgcggcaggggacgtgatggcggccgcggccgccgctctgctgatatggaggagaagcatgggatctacttgggggacaatgccgatggcgacagactccagaagcggctcggcgaggacaagatgaagatttttaacgaagcgtttgatgaggccgcagataacgcgctgccagacccgaagcaggatgcatatctggaggcttgtcacaccaataacatggtctgtgcagcaatgcggttgaatccgcaaaattgttagagttgttagatctggccgttcatgcaaggttcctgaattatttgtttcctgtgggtttatgtatgcagatcgagtttgagccagagtatcatgtgaatttcaataatccagatatcgaagagaagccacctatgtcattggaggatatgctacagaaggtgaagccattcatagttgcgtatgagggcatccagaaccaggaggaatgggaggtgatttctttgatggaccttgtactatattatttttctccacagaaatgtttgtgcgagtagatgttttggtacatatgttctcttgcagcattgaggaaccagattgcattagaaaatgccggagaaagcctgcataaatagtgtaaatgatactttgtttttccagcaataggattatagcatgctcaacgggtgcaacgctgcaagtctatagttggatggcattagaatcctagctgcattatcaagttttcataaataaactgatgaactcgagcatgttaatagacttgttccctgtttggaataatcattcagcctgattgaggcttcagaaataattctaatgagtttgcagatgcatattgctgtggtacgtaagtatgttcacagccagattggcctagctttgcactgatatacctagatcgggctgaaaatgatattagtagattttgtgttgtttcacctttcagaacatgttatttggtaagctgatttatgcattacaaatggagcggatataaggtttatacaaaggatttattatctttgttgcatgaacgctgtccagctgattacttagtaattgtgcctgctcctttctgatgaggttaaactgtaatctccagataagtttcaacttgttctaaaatccaagtaaagagggactgttggctacgttagattagagattttaacaggattgggtcattctagcttttatgtatttcctgcagtcctggacttattgaactaaaagaatatctattattccgcttccatgtttctgctaatcagctttaagtccctgtttggaaattcctgtatgacaccacattagacacttgtctcataggcttctactattacatgaaccagtacatgcttgaacttgcagctgtattcgccttgctgctaaaatgagtttttttttttttggtgatgtatacaactgacccagtataatgtaccgtatcactaataggaagctgtgaaagatgtaatggcaagggcaccccatatgaaggagctgatagatatgtacagtggccctgatgttgtaactgcaaagcaacaagaagaagagctgcaaagagtggccaacactctcccaggaaatataccctcttcagtaaagcggtttactgataaaactctactgtctcttaaggtttgttttcttgttataattgatgctctgaacagtatacacatttttatagagaacattattcataatattaatggtctgatatttgaatgttgtcatctttataattcaacttctgatttctgaatctccagtggtgatagaataacacaattcctgtctaattttctaacttgatagacatgtgaaattatagtatcaccctttctaagcttgctttcaaaaatagagctgtattcaattagcatttgaaatttgaattctagctacacaaatgatcaatttagctttttttaatgcaatgtatctacaatttaatggttcgttccaaccatcaaggcataaagtccctctgtagtctgacatgccctgtggtctggtcttactaagctagttctataacatgtctgtgtttatcatcacttgccatctgagatgatatatttgatagtttcttatcctattgctctcaaagatggcgaagtgcacatgctttaagttggctagttcacctgactgaagtactctacatgttggagattctgttatcatcacatgtgcaaaatttaccatactggttgtcatcatcttgtttgataaaatattttcatagccattagaactttttacctgtattcatattacaaaaagaagtctggagaccctgttcagtgtgtttatgtattcctatttgtttcaccttcctttgaagaaacacaaggtgctgcttattgagatgaattcgttcttgtttctccttatatcttttgcagaacaatccaggctggggttttgacaagaaatgccaattcatggacaagttt

SEQ ID NO: 13746 - DNA, 7939 bp, Oryza sativa
attcctgcagcccaaattatggtgaatttatacattttttaattaaaaaatggtgaaattttgctacctgcctgttcatgcattcgtgcatgcacgaattcctagtgaattactggactagtacatgtttgatttgcaattaggacagaacatgcgatcaataaaaggatttagggagtaatggaattttgttgagatcatggtggtgttcttttctcctgaagatgaagattaatttttttacgtaaaacgaggtggtattaacgtatgattaattaatttttaattattataaatttgaaaaatagattgatatgatattttagagcaactttcatataaaaagttttcgcaccaaacataccgtttacctgtttgaaaaacataccacgaaaattcaaaatttcacccaactttcatatgttgctgttttacacatttgtctagtcaattaaggatttctttaagcaaatccagattgatgtctcactgtctcagaatccaagaataaaatgggctgcaagaactatgtaaatacaaaataaaacaaagtactattcctaccaactactgtaagtggctctttcgaggttgtacagtacgtcatgaccaattaagaaacacttacatgaagatgttaaactcagaagtcaacatccaacatgatcaaacgtgctaattaaactaaccacataaaagtattagattagtgcactgtaatataatactatccttttgctagtgtacaccaaattgcagtattcctgaatgcattgcaatattctacctttataattcttcttttttggaagaacaaaaactatagagcatatttatcaagcacatcgattcaatcaaaaatccaaacccttgattggtcgcactgtttgggctacttgtgaacgcatgatttcataggattttcgcacgaattagttcaattcctccaaaaatccaacaaaaacggattatacaacataccatgataccactgttgttctaaaataagtttatttttcacccttcccatacatatatgatatatataccaatataaaaacaaaagattaaaatactgtcactttataaaatatccatgcaactgtcccatactatctctactacaattcatttgtcttttacttttacaaaccacatcaattcgtactgcttgggtactttggaaaacacgaatttagttcaatttctccaaaataaagtcctctaaaattagtttatttttttgctcatgcaccatctgatccaaacctctccccatggaaatattcaggaaacaaaaatctctgcggcccgccggtcggcgccccgtgccccgaagtgccaatcctcgcgtcaccttcgccatcgccgctgtcgtcgtcgtggtggtcgcctcgcagcttgaagatcctcatgatcatcgccctcgtggtggtcgtcgtcggcgcgctcctggcattcgccggcgcgttgacggcgatgctcgcccgacgccgcgaggccaccaccgaaacccagggcggcggcgtcggcggcgccgccgccaacgccgccgccgccaggatgaaggccacgcccaatccggccgtcaccgtcgcacacggcggcggcggcggtggcggcgagcagcagccgcacgtgacggtgtcggccgtgccggcgaagcgcggcgggcggcgggacgaccacgggcggctggtgttcatccaggaggggagggagaggttcgagctggaggacctgctccgggcgtcggcagaggtgctcggcagcggcagcttcggcgcgtcgtacaaggcgacgctggtggaaggccagtccatggtggtgaagcggttcaaggagatgaacggcgtcgggaggcaggacttcaacgagcacatgcggcggctcggccgcctcgtccaccccaacctcctccccgtcgtcgcctacctctacaagaaggacgagaagctgttcgtcaccgagtacatggtcaatggcagcttggctcacctcctccatggaggtaattaaccacacaatccttcccatcttgacacaacctgcattgcatttatttgatttatgttaatgtcgccggcgacgcgtgatcggtggcgtacgtgcagggtcgagcatggcggcgctggactggccgcggcggctcaagatcatcaagggcgtgacgcgcgggctggcgcacctgtacgacgagctgccgatgctcaccgtgccgcacggacacctcaagtcgtcgaacgtcctcctcgacgctgcgttcgagcccatcctcagcgactacgccctcgttcccgtcatgacgccgcgccacgccgcgcaggtgaggcgatcgaacgacggcggcggcgacgaacgcccgcgcgtataggccggcacgcattgactggggatggttcgtgtttgcaggtgatggtggcgtacaagtcgccggagtgcggggagacggggaggccgagcaagaagagcgacgtgtggagcctggggatcctgatactggaggtgctcaccggcaagttcccggcgaactaccaccggcaggggcggacggggacggacctggcggggtgggtgcactcggtggtgcgggaggagtggaccggcgaggtgttcgaccaggagatgcgcggcgctcgcggcggcgagggcgagatggtgaagctgctcaaggtcggcctcggctgctgcgagagcgacgtggacaagcgatgggacctcagggatgccctcgcccgcatcgaggagctccgggaacgcgacgccggcgccggcgccgacgacagcagcgccgcctcgtccgtggccagcggcggcggcggcggcgaggcgtcgcgctcccactcctcgtagcgaaacagcagcgatctcaccttgtgtacgcgcgcgtatgtttcacagctttttcggtgcatctgatcagccctacgattcgaaagggacggaggagatcttccgggtatgtgaacgtgtgagataatactgttcagtgcgtgtaaattaattttcttagatttattaaaggaagggaagggttgtggtgaagtttttttttttaccttttgcatacgtacattttcacaggtgatatacgaagattgttggtagaaagagagaatccattagagtttgtaacaggtatacaatttacttttgcatatgccattgacttttttcttaccttctacgatttttaccatcgccgtccggttagtctatgtgtactgtacaattttatctaaatgaccaaaatacccctgggacaaaaacttctaaagtttgataaaaaaattctgaattatcatattttaagtttttgacaaaaattggatgtttacaatcttatgtttataatattgatatttcgaaatttttgtccaaattttggatgtttttgttccaggagtattttgatcatttggataaaaaatgtataatactagggaaggttaaccagacggcgatggtaaattgtagaagttaagtaaaaaaaaagtgacatattgtaaaacgtgacaaaatcagtggtaaattgaagacatgtaacaaactcagtgacatataatggattttctctagaaatattgtgaaagtatagtggtgatatgagtgagcagatgaaaggccaagggcctttgcactcgatgaatttgcatatcatgattgcattgatgacgcagtagttacgacagggactcaaacaaaggcatgcagaaactgctgactttcgtatgcaatttaacacatcactccttacaccactgatctttgctcgggcgtcaaaatcagcaaatatccatgcaaaaaaggcaatattgcaaagaaaataaaacggtactccgtacttcattagtttggaactcggctagccactgccacttggctataattacggtgacaatactttctagacaggggttggtaagctgctgctatgtactgatcatagccttgcaagtactaaaatccaacggtggcaaacaatcttgatgacgtgatgcaccatataggatgaaatggaattaactacatttagtatggaccaactgtatagatttataagattagcaccggccccatcttgtcattgacgctaacctatatccccaatcgcagagctgtaacaggccagcacctaagcccctccattgccaccatggtgccagaaacatcgagctgttgatggccctacttccaagtctacaatgtgtgccacacggtccgcccctatgtgccttgccatcacttccaaccattggctctaacaacacagccctctggctttcactagcatcttcatccctaattcgttcatgccttcgtccacatcctccacgaacgaaacataaggaggtgattaatattcattatttgcaagttaaaaaaagaagaagacaagagatgggacttcatagctgctttttgagaggtctgcatacgctacgcaagcgaaacaaccgggactatccaaatcacatatatttatagcaattgtataaaagtccctcggcgaaaaagtcagccaacgatctccatgctgcaccgtcagtccatgcctagttttcttgcccccctaccaccataaatacgcacctagctgtaagatggatcacaaaacacatcgatccatccctctaccagtacataaacaagaaagataacaccaaaaaattagctagctcgccaatggccttgttgtcctccttccggctcgccgtggcagtggcggcattgttggtcgtcggctcatgcgccactgaggtcaccttcaaggttggtgagggctctagcggaaaaagtctagagctcgtcaccaacatcgccatctctgaggtggagatcaaggagaagggcggcaaggactgggtggcgctcaaggagtcgtcgactaacacctggtcgctcaagagtgaggcgaccctcaagggccccttctccgtccgcttccttgtcaagaacggtggctaccgtgtcgtcgacgacgtcatccccgaaagctttacggccggcactgaatacaagagtggcatcaacatctaattcatagacatgcgtactcttgcattgggttgcatgggaatcattaacatctatataattttgtctaaaaagagatcgcgtcgcatgtgagcgagcaaacaattaatttcctatggttatttttttggtaataggccaatggcaaaataaggcataattgcgtggttccaaaatattgttgtggagctgtatgtgagcacgattttaaatatatgttgtttatagaagatgtatcgaaaaaaatatatttggtcagctttcattaagatgattgtgtggatttgatttcccaaagtttgagtacatatgtatgtccaaatcaacgtagtccatttctcctttttagcttgtcaaaaatgttgtttgcacttgttttttcattttgtggaaacaaattgttgaatcaatcatactgtgaccagactataagcataaagcatttttacatcatttagcttatttagaggtcagaaaactggaagtcacgttatcccatctctagcatgaatatcatatagaagcacacatgtattgaagcgaagccaactttgagaggagctaagcttcatatcatatagttggccaagaccccaagctatagtcaacaacaaagtttatatagtactacgagaatatcaatctattgcaaaggatctaaagtaaatacacaattggttccaaactttaaatagaagaaaaatctttacactgctagtgtgttagaaggaacaagaaaacataccattagttccaaactatatatatgtaaagaactaataaatccttaagacctaaaaaatgtagtggtggtttatggtcccttgtccaccgtaagcccatcctcactcccacgccctctcgagcgagtcccgcacgcatgatgtcccttctgctgcacgaatggaagaacaccctcgacccccaccacctgatcaaaatcaatcaaccatcattcctcggcgcttgcccatggacctcctttcacgtctagctctcaacttgcatggacgtaacagcatgtgcacttgccaataaaaaaaaaggaaaaagtacgaattacccccccccccccccgaactatcgaggtcgaacgaattacacccccgaactcgaaaactagacattctacacccttaactattgaaaccggacaaataacccccctactcattccggggtggttttgggtccacatggcagtccagtcagcatttttttaaaaaaaaaatcagtgggccccacctgtcagttctccacccctctctatctctctatactctatcccaatctctccctctctctctctcatctcaccagcacggcgccggccgtgcgagggcgggagcaggcggcgctgttggcggcggagggcgccgggcggctgagatggaggcggagcgggtggctggcagcgggaggcagagctcgcccgcgcaggttgccgtgcaggttgaggcggcggaggagcgctgtcgttgtgtgttgctgccttgtcgtcataaaacaagcttctcttccctcaccttttgcgtggccttgcctgcccttgttcacctcacctcagcttgtctctctgactttgatctcgccatcccgagttcgccggacacgcccacggccaccacggcggcgatggagggcgccgtgctctgcgccgccaaccacgcgccgctcacccccatcaccttcctcgaccgggccgccctcgtctaccccgaccgccccgccatcgtcgcctcctcctctggactcacgcgcacctagtaggagaagcgggaccgctgcctccgcctcgccgcctccctcgccgctctcgatgtccaccgccaccacgtggtaagattgaccttcgcggtggcgccaccaatcgctacaataattggatttttctcccgaatctcccccttcttcaatttttcatgcttaaaaaaaccaaatcgcttagaatttacttgttgaatcttctaatttggttccaaattagcagctgagtgattcgcattttcagaagaaatcgttgccttgttggttgtctctgtgtgcaagtcgcggtgttcacgcagaatattccggtgatgtgtgagctccacttcggcatcccgatggccggcgccgtcaactgcatgctcaactcccgcctcgacgcttcccgatgctctccgccgccggcagcaccgcctgctcccgccctcgcgcagccgccgccgtgctggtgagaagagagagagagagagagacattgggatagagtagagagatagaaagggatggagaactgacaggtttggcccactgatttttttttttaaaaaaatgctgactggactgccacgtggacccaaaaccaccccggattgagtcaggggggttatttgtccggtttcaatagttgagggtgtagaatgtctggtttcgagatcgagggtgtaattcggtcgacctcaatagttcgggggggggagtcattcgtactttttccataaaaaaatatcaattgaatttatagtgtactcttttttattgtacaatctacaccgagacctagaattgttggattattttcataaggccacgtgctcctccccacatacgcctcgtcgagttgtcatcttgtattcctatcaaatgtattgcatcaactgccgccaccgctcgatatccagctagctgcctagctgtgctctaccaatttacttagcaccaaccccatctcaccataaatgctaacctatgtcccctatcgagcagagccgcaacgggccagcacatgacccatctgtcaccgccatgattccatcaacatctagctgttgatggcccctctgtgacatatactatggatgctacacggtgcccctctatgtgcctggccatcactcctgaccgttagctctaccac

SEQ ID NO: 13747 - DNA, 703 bp, Oryza sativa
  unsure (1)..(703): unsure at all n locations
attcctgcagccctgtaggttaagacctaagaaaaaaataatttgaagttgtataagaacccagactttcacttcaatgggctggtttagtttccaactttttcttcaaactttcaacttttccatctgtcggtgatatgggaccgggagtatcatgaccagaggcttgaggcagacgcaatcgcccacgtggcctggcaccttcggggacgtcgggcccgagggtgaggtgtccgccctcctcctgatttcccccgagggggggggganagccgctcctccatctatgaggacacgccccaacttcacgttgcagatagtgggggaaaccaccatcgcaatctgccctccccgggcaacgcacggtgggtggtcggtctgatcaaaggtgagggccacctccgaccaccgcgcccgacgcgtcgcctcatgagtaggggccgcggctagaagctctcgcttcatagccttgaagctccggcgagaaacgtgagcacacgctcccccgtcgacagtggcaatggtggccccaggttcttggaaacctaggtcatcatcaccgtcatcggggtcaacggcgggggccttctgtctggcctcacttcgccgtctaccggagggaactgcccgcgacttgccctcaccgcgttcctgctcctgtgctcctcccactttctcggtcgctcagcccaaatttttgact

SEQ ID NO: 13748 - DNA, 676 bp, Oryza sativa
attcctgcagcccttagttttacgagtactactaaatacactgtaggttaagacctaagaaaaaaataatttgaagttgtataagaacccagactttcacttcaatgggctggtttagtttccaactttttcttcaaactttcaacttttccatctgtcggtgatatgggaccgggagtatcatgaccagaggcttgaggcagacgcaatcgcccacgtggcctggcaccttcggggacgtcgggcccgagggtgaggtgtccgccctcctcctgatttcccccgaggggggggggctcctgtcacgccgccctgtctgagcggcggatccgggggcggccgaagctgccacaccggaaccggaggggttccaggtccaggcctcctccttacgagccactcggtccgcgagctgaaaaagctctgcggtagtctggggctctttggaggcaatcttttcgagcatgcggttgtgccgcacaccccccctgaacgcgtagatcaccgcgtgtgcagggatgcatggtatagtattgcggacttggcaaaaccgctgaatgtacgagcgaagccactcatcctcgcctcgctgtactgtctgcaggtccgtttctttcacctgggcgcggatatgtgccttggaagttcatggcgaactgttggcacaaaatcttcc

SEQ ID NO: 13749 - DNA, 1378 bp, Oryza sativa
atttctcaaagttttagtacatatgtatgtccaaatcaatgcagcccatttctcctttttagcttgtcaaaaatgttgtttacagtttttttttaaaaaaaaaaatttgtggaaagaaattgttgaatcgatcactccgtgacatgaaactacaagcataaagaatcagcacatcgtttagcttattcagatgctagaacaaaatgtaagtcgcattaataatatctccaacatgaataagtggtaatggatagaatggaagcgaagccagctttgagaggtgctaagttaagcttcatatcatatgaggtcaccttcaaggtcggtgaggcctctagcggaaaaagtctggagctcgtcaccaacgtcgccatctctaaggtggagatcaaggagaagggcagcaaggactgggtgacgctcaaggagtcgtcaactaacacatggacaatcaaaagtgaggcgccgctcaaaggacccttctccatccgcttccttgccaagaatggtggctaccgtgttgttgacgacgtcatccccgaaagctttacggccggctctaaatataagagtggcatcaacatctaagtgatagacatgtgtgtttttattttgaaataattcttaacctctctataattcttttttatttcaaaagagagatcaagtctgcattcggggaagccaataattaattttctatggttattttgtgaaatatgccatcaacaaaataaagcattccgtatgccatgtctgcatgttgctgcagaggtatatatccagacgattttgagtatattacgtatataatatttgtgggaaaaagtatagttggtgaaacttcatcgagatagtttcttacattttatttttctaaagtttgagtacatatgtatatgtatttccatatcaatgaagctcgtttatcttctttagtatgacagtatgacaaaaatgctacaaaagtcgcatttacaatagtgattgttttgtgaccacaaattgttcaactatgacacctacagatactataagcatgatgcattggtacatattttagcttactcagaaggcagagtgcccacaaatcatgttcatcccatctccagcaccgaatgtgtggccatggataaaatggaaatgaatccaacttcgagaagattaatctatgcttcacgtcgtacaattggccaacaattaaagttttatctaatatcagttatccgtgtgttgcttcggataatagaaatatatttaatattatctgaaaaattaaaatttgctttctattaaatgtgttaataatatgtttggtaaagggaatattgatcctaatttaattttatactccctccgtattttaatgtatgacgcc

SEQ ID NO: 13750 - DNA, 2514 bp, Oryza sativa
tcttacattttattttctaaagtttgagtacatatgtatatgtatttccacatcaatgaagcttatttatcttcttcagtatgacagtatgaaaaaaaatgctatgaaagtcgcatttacactagtcattgttttgtgaccacaaattcgttcatgcgttggtccacatcctccctaaatggaaaatgaggaaatgattagttttcaatatttgtaagttaaaaaataagtagaaaaaagatgggattgcatagctgctatttgagaggtttgcatgctctacgctagcgaaacaaccgggactacccaaatcacatctatttatagcaattgcataagaattcctcaacgaaaaagccggccaacgatctacatttgcaatgtgcgtccatgcctggttttctaaccccaggcgatataaatagatgtcgtccacatcctccataaacaaaacatgatgaggtgattaatttttattatataagttaaaaacagtagagaagatatgtgaatgcattgctactttttatgaggtctgcttgtcctgcgccagcgaaacaaccgggactaccaagtttgcatctatttataggaattgtattagatttgctcgatgaaaaagtcggccaacgatctctttgcagcaccatgcgtccatgcctgtttttctttgccccccgccaccataaatacgcacccagctgcaacatggatcaccaaacatatcgatccttccctctacccttcaagaaacaagaaagacaacaccaacaaacaatctatcttgctaatggcctcgttgtcctccttccggctcatgcgccactgagcttgccttcaaggtcggtgagggctctagcgacactagtctagagctcgtcaccaatgtcaccatctctgaggtggaggtcaaggagaagggtggcaagtactgggtggggctcaaggagtcgtcgactaacacctggacgctgaaaagtgaggcgctgctcaagggctccttctccgtccgcttccttgtcaagaacggcagctaccatgtcatcgacaacgtcatccctgaaagctttacagctggcactgaatacaagaatggcatcaacctctaattaatagacatacgtgctcttgtgttgggtcgcatgggaattattaacctctaaataattatgttttagaagatatcatgccgtgtgtgagtgagcaagcaattaatttcccatgattattttgtggtaataggccagtggcaaaataaggcataaatgtgttcttccaaaatattgttgtggggctatatataagcatgattttgaatatatatattgtttatagaggatgcattgaaaaattatactccctccctcccaaattgatcatcatataatggaattcaaaatttctcaaattaatcatcatatacctgcatgtacacagatttcatcagaatacaattactgcagcatggcagaatatgtgcatgctaaggtgtaattggcatggtgttttaatcgatgcatgcattgtgggagaatgtgtgcttgatgtcttgattgatgtgatttaaattatccttggtcttggtgcataagcatatatgatgatcaatttgggaaggagggagtatttggtcagttttcattgagatgattgttggtgtttgattttccaaagttttatagtatgtccaattcgatgtagtccgtttctcatttttagcttgttaaaaatgttgtaaaagtcaaatttacacttggtttttctttttcatgaaaaaaaattgttgaatcgaccatattgtgatctaaaattataagcataaagcatcgatgcatcatttagcttactcagatgcgagaacaaattgtaagtcacattaatcccatctcaggtattaatgagtggtaatggatagatattaatgagtggtaatggatagagtgcaagtgaaacctgcatttggaggagctaagttaagtatcatatcatatagttggctaaggccctgagctatagtcaacaacaaagtttataaaatactaagagaataccaatctattgcaaaggatctaaaataaatacaccattagttccaactttaaatagaaaaaatatttacactaccaatgtgttgcaaaggatctggaaaatatacagtttattccaaactttaaatgtaaagaactaataaatctttaaggccaaaaaaatgtagtggtgatttatggttcctcatccatcgtatgcctagcctcacttccacgccctcttaagtggttcccgcacacatgatgtcccttccccttgcacgattggaggcatgccctctaatgcccaccaccccgtcaaaatccatccaccatccttccccggtgcttgcccatgtacctcctctcacatgtagctctcatgctgcatggatgtaacaatgtgtgcacccgcccattaaaaatcaattgaagataaagtgtactgttgtatgaagtacaatctacactaacatctggaattgca

SEQ ID NO: 13751 - DNA, 4162 bp, Oryza sativa
tacagagagaattgcaacgacgagagaattagagcaaaaggaattatggcaactcaatatagtagtcttctccgattccaacaggaatggagccgccgccgcctacgccaccgtggtcgccattcaagttgccctcgagctcgctatatatatatatatatatatatatatatatatatatatatatatatatatatatctcctatctctctcttctttccccttgttcacgctagcctattacaatatggacttctattacatggtccagttaggcccacagtacttgggggttttgcttaacaggccttgtagtacgacgcatattgcctccctttgactgcacagctccaacttgacgatcttcagcttcgtcagagttttgctccccaactttagtcaatggaacatcgtcaggtaccgcctgatccttgacaatcccctccccttggaatttggaaagtcgctggaaaacgagcacggagttcctccaaatcctcctaggtggcatcctctgctgcagtaccagaccaatgaattagcacctgagatacagctgaattacctttattgatcaccctggtatcaagaatttggagtggcacttgaaggtcagaaagagctgaaggcaaagtagactggatgtctccttgaaaaccacaagctgccttaagctgggacacatggaacactgggtgaacattactagtctcaggaagctgtaatttgtaagctactataccaatcttctgcagaacctggaaaggcccaaaatacttgaaggaaagcttgtggttagctctagtggctacagaagattgcacatatggttggagcttgagatatacccaatcaccttcagcaaacgacctgaaactccttttcttgtctgccatgtgtttcatttgttgattagctctattcagatgttgctgcactaaggcttgcatcaactttctttccttgagccattcctgcagatctgggattgcacatgcttccacagaaataccaaagtgacgaggagcatgaccatataagacttcaaacggagatgccttcacggaagagtggtaagaggtgttgtaccaatactcagctaaatgtaaccaagtggcccatttggagggatttgcatggacaaaacaacacaaatagatttcaagacattggttaaccctttcagtttgaccatctgactatgggtgataagatgtactcaaatgcaattgtgtaccagaagatgtaaacaggtggttccagagttgactagtaaaaatcttgtccctatccgagataatcaccaaaggaagcccatgcagtttgtaaatatgcagcataagagttttgcaacttccagagcagtgtaaggatgtgcaagaggaatgaaatggccatatttagagaacttatccacaattaccaggatgcagttaaaggacttagacctgggcaaaccttctataaaatccatggatataacttcccatgatccatcaggaacaagcaggggttggagaagtcctgggtatttagctctatctggcttagcttgaatacaaatttgacactgctgaacaaatttcttagcttgagatttcattcctggccaggcaaataatttcttgagtctgctatatgtgactgggaaaccagagtgaccaccaagtgggctggcatgaaattcagttaacagtttccattgtagctgagcattattacctatccatatcctccccttgtatttgataacaccagattgcagttggtaacctggtttagagtcagcttgcagagccaaagctgtcagtaattcggtagcgtgggaatcttgttcataccccttaaccacatccagtaaccaacttggagtgcagttggatataatagacaattctgcatctccttggaacttccttgacagtgcatctgctgcagcattgcttgtcccctttctataacagattatatagttgagtcccaaaagcttagtaaaagctttatgctgccaaggggtatgtagcctcttgtctgataggtgcataaggctgtgatgatcagtgagaattatgaactctcccaattgtaagtaggacctccaatggtcaacagctaaaagtatagccatacattccttttcataggttgacaaaccttttgttctaggaccaagtgccttactaacaaaagctattggatgtttgtcttgtgacaaaactgcaccaatccctgaatctgaagcatttgtttctactgtaaatggtttgctaaagccaggtagtgctaggactggtgctgaaactagagcttgtttgagctgttggaaggctaattctgtttcctgagtccatttgtaaggaacccctttcctcagaagatttgtcaatggtttactgatgataccaaatccttggacaaacttcctgtagtagccagctaagcccaggaatcccctcaacttcttttgattggctggagtaacccaattaacaacttcctgaattttaattggctcagtagcaaccccagcagcactgataatatgccctagataggtaagttgttgctgagcaaatgaacacttggagagtttcacctgccattgatacttctgtaacagggacagtacttgctgtagatggtccagatgggaagacagatctggactgtatatgaggatatcatcgaagaatactaaggcaaatcttctcaatactattttcaaagtttcatttattgcactctagaaagtggttggtgctcatgtcaatccaaatgacctaaccttgtactcataatgaccaatgtgggtctgaaatgttgttttgtattcatcaccttccttcattcttatctgatgatatccagccctcaaatccagttttgaaaaccacttagcacctgacagctcatccagcaattcatcaataactggcattgggtaagaactcttaactgtgatagcattaagctgtctgtagtcaattactaacctccaagttccatccttctttctaaccaataatgcaggtgaggcaaaagcactttggctgggttgtatgacccctgtgtgtagcatttcagagatctgggactctatctcatctttaagggctggattatacctgtaaggtctaaggttgacaggttttgcactaggtattagaggaatactgtgatcacaaatcctcttgggaggtaacccttttggttcctcaaaaacactcttgaattgatccaaaatttttctgacagaatcaggaatttctgcagattcagtctgaaacatagaattcaactgaattaagtacattaaggatccattcctggccatgcctagacactgatcagttgatataggagggcaaatagtagtctgagttgtgatgccttgtagggtgatcaactttccttccaacataatctccaaccatttgtttacccagtcaaccttcatgggactgaactgctccaaccagtccatccctaaaatcacatcatagcttcccaagttaagtaacttaaaattacttttgaacacatggccttgcatccaccatttgcacccccagaatttgttggttacaggtcatggtacccccatcagctatctttacaattacaggttggcgcaaattagtaatgacagagagagtgctgccaatttctatatcaatgaaagagtaggaactccctgagtcaaccaacatgagtatctcagtgccttgtatccatcctctcaaacgaatcgacttggaggattcagtaccccacagagcctgttgggatatagccatcaaagtaccttcatcttgctctttggttccttcaggactagtatcattttcagaataagattcagactgcagagcctctaacaattcatgtacaacatgtaaatgtactgtagtggcacatttatggtccctaccccatctctcaccacaaacaaagcacaaccccttagatcttctgtaggccttgagtgaagccactctgtcctctttaggtttggttgattcagtcaccttaccaccatcagaagaactaccaggaaaaaatttatgccctggagtggcaggaatgaagctagagaatcttggaacttgtttatagacagatggtgagtcggctcttttgctaacagtgggtttgcaactat

SEQ ID NO: 13752 - DNA, 7818 bp, Oryza sativa
acaaataaatcttaccatgtgcccttcccacatattgcagcgaagctatatatgtgcacatgattttgaatatgttgtttatgtaggaattatggtaaaaaggtatattatttggtcagccttcaccgagatggttgtttacatttgatttttccaatgttttaatacatatgtatatctagaacaatgatgttcatctatcattttgcatgtaaaaaaatcttgtaaaattcgcatttacacttgtgattttttttgggatttctttttgggaaacacaaattgttcgacataccatattatgacctgaaactataagcagcattggtggttcttttagcttattcagaagttaaaacaaactatatatttgtggatgtgttctagtgttctaacggatgatggattatatatgaactatgtttattacaataattcaagggcacaacaaaagaatagataatcattttccgttaaaaatatattatagtgagtgatgaacctatcatcgcttactcccaccaccacctgatatgtgggttctattgaatagtgagtcatgcaaacggttccttctcaaacctaaacatgttcaaatattgtttgtagcaacgcacgggtgtatttacctagttaacaccatgtgtcgaaactcgaaagagtttgcctatgtgacatatactttggatatatatatgccaaaaatctccacttaaatactatgtttccctattttttcactctcacttacaaactagtacatatacaatataatagtagcatgacatcactatagagtataaattgatggccggtgatcagtggcatgtgcatgttatattatttattcgattccactcgtttgagctccaaaatatgccaaaccgtcatcaaaaccatattaggggtaatataagtggtgttgtaaagtttttttttttggagagcagaccatgggagggggtgattggatgtccgatttaggactttttcctatttgaattatattaatgcactttgcattttgagaggtctacatcattacatgtcaagacaagactaccaagctcggagctatttatagaaattgtacaagtggttgtctacaaacaagctggccagcgatctccatggtgcaccacacgtccataggtaagctttcttgccctcgccacccataaatacgtgcccagctgcaacatcaatcaccaaccacattgatccatccctctatcaatcaagaaacaagcaagattattctagccaactagctagcttgcgaatggcttccttgtcctccttaatgctcgtcacggcagtggccgcattgttggtcattggctcatctggcactgaggtcaccttcaagatcggtgagtcctctaccacctctacactggaactcatcaccaatgtcgccatatctgaggtggagatcaaggagaagggtggcagcgactggagggggctcaaggagtcatcggctaacacctggaaaatcaaaagtgatgcaccgctcaagggccccttatccgtccgcttccttgtcaagaacggtggctatcgcatcgtcgacgatgtaatccccgaaacctttaaggccggctccgtctacaagagtggcatccaggtccagtaatggacatgcatgtccttgcattaggtcacatggaaattattagcctctaaataattatctattcaaaagagagaccgagtctgcatgtgaacacgtcaatagttaaatttctattgttattttgtgacaacagactattgacaaaatgaagcataccatgtgcccttcccacatattggtatggagctatatgtgcacacgattttgaatatattgtttatgtaggatttatgggaaaaggtatatttggccatcattcatcgagatggttgtgtacatttgattttccatagttctaatatatatggttgtgcactaaactacaccttggatgcgcaccccaccccctctcccctcccgcaccttttctgttcccacatcttcttcccgcaccttcctaccatatatcttccagcttttgttaataaataaattactctaaactagtctttgttaagtaaataaattacttataagcaattgatcttgccataaaatctgcatttgcgtccctttcaaccttcattcagtaaataaattactcctaactagtctttagtcagtacataaataacttaaaaacatattggtcttaccacaaaatcttcattggcatcccaacctttcttatcacttggcaaactatctgcattggcatcccatcatttctcatcactcggcaaaatatcttctcattatgcatcgttagtaaatattttactatcgagattaatatcattagtaattcttttactaacattttatcaatcgggcccctcttgtaccttctatctgtacagtaaatactttactattgatataatatttgcagtaattcgttcactaaaagtattaattattcttatacctcctactatccatattagtaatacaattattaaaatggcacctattaaaatctacatgacaaaaaggtggcgctgaatgtttttccaccgcctatatgggaaacaggggaaaatcacatctcaatgcctatgaataaaaagatttactcttgaatcacaccagtagaaattacactcaatcaactgcctccggtgacacactggcgaaggggcaacgtcgacatgcaaaaggaaagttacactcaatcagattgatgcctgcacgaatccggcaagcaggacataaggacattacaacaccaactagctagacctggtttagttctcaatttttttttcgaaaagtcacatcgaatctttggacacatgcatggagcataaaatatagacaaaaataaaaatcaatttaacagtttgcatggaaatcacgagatgaatcttttgagcctaattaatctatgattagccataagtgctacagtaacacacatgtgctaatgatggtttaattaggctcaaaagattcgtctcgcggtttccagacgagttatgaaattagtttttttttaattcgtattcgaaaacccctttcgacatccggtcaaatgtaacacctaaatttctcttttcgcaaactaaacaaggcctgtacacatagacgtcgaggtgatgcagcactgcagcttcctagagacccagatcctcctcgttgacagatatttgtcacccacagtcgcctccaacacgagcacctgcatgggctgaccctgctggctgtccatcttgctgcaaacaaaaagctataatgtaatacatccaaaatctgtaacttaacgaatcaagaatcagctcgtgaagtgcaacgacgggatgcggatttccgatatccaacgggaatacaatcaataagctgctgacgctagtggccacaagtaaaattaagaatatctagtctaaaaaaagtttattctgtcaaaacattcagataaaaaatcaacgggaccatatgtaatgagcagttcaggaaaaaaaaaacaatccatctgctttcttgaaccacaaaattcaagagaatcgccatcaagctccttgagttttcatgtattgaaaatttcagaaggaacaaaacaaaggagctcaagaaaaacatggctcagttgcaagcaaatgaacctctcaactagcggacccatcgtgctgcccgcagccccctgcccatgtgggatcgatatgccatcgacgaggctgacccatcgcaacagaactaaagcttgtatacccttcatcccaaaataagctcatttataggtttctgtatccaatcgagcttaaaaaagtagctcagttgcaaccccaacaaagcaaagcttcacatacacacatacgatgcgttaattacgtttctaaaattactcccgcatgacacaaccgtgattagatttgagaaagatagtgatgtgtgtatgtgttatattatttgttcaaatctgctcgtttaaactccaaaatatgcagatctgccattaaaaccacattaggagtaatataattggtattgcaaagcttttttgggggggagggagggggtggttggatgtctggttttattaatttttcctgtttggattagatatgaggattgcatgccctttacattttgagaggtctacatcactccatgacatgtgctaattttgcctgacagaaagacaagcgggactacctatcttagatctatttatagcaattttacaagtgtttgtcgaagaacaagccggccaacgatctccatttgcaccatacatccatagcttagctttcttgcctcgccacccataaatacatgcccacatatgcaacatcaatcaccaaaatcatcgatccaatggcctccttgtcatccttcctgctcgccacggcaatggccgcattgttggtcatcggctcgtacgccactgagctcaccttcaaagtcggtccaggctctagcaccactagcctgaacctcatcaccaatgtcgccatctctgaggtggaggtaaaggagaagggcaccggtgactggacggggctcaaggagtcatcggctaacacctggacgctcaaaaccggggcaaaactcaagggccccttctccgtccgcttccttgtcaagaatggcggctaccgcgtcgtcgacgatgtcatccctgaagccttcaaggtcggctccgtctataagagtggcatccagctcaagtaacgtacacttgtgctcttgcattggatcgcatggaaattgttgatctctaaataattcttttttaaaaaaagagagatcgagtctgcctgtgcgcaagccaataattattttttatggtccttcccgcatattgttgtgaagctatatatgtgcacatgattttgaatacgttgtttatgtaggacttatggtaaaaaggtatattatttggtcagccttcaccgagacggttgtttacatttgatttttccaatgttttaatacatatgtatatctagatcaatgatgttcatctatcatttttacatgtaaaaaaaatcctgtaaaattcgcatttacacttgtgattattattattatttgtgaaacacaaattgttcgacataccatattatgacctgaaactataagcaacattggtggttcttttagcttattcggaagttaaaacaaactatatatttgtggatgtcatgtgttctaatgttccaatggatgatggattatacatgaactaagtttattacaataattcaaggtcacaacaaaagaatagatattcattttcctttaaaaaatatattgtagtgagtgatgaacctatcaccacctactcccaccaccacctgatatatggggtccattgaatagtgaatcatgcagacagtcgttccttctcaaacctaaacatgttcaaattgtttgtagcaacgcacgagtatatttacctagttaacactagatttgaaagattgatttaaaaggctctctaaatattgatgaagaagacttccgtataaatcgtaccatttaagaaacaccatgggatattttggccatgtacaacactccaccgtgggtagtggccacagcactctagctaagcgatgggtaaattcccttaaacctactctattcatcatgcgctaatggcctaattcgttttacgtattttcacagccttctcctctcctcttcttttatactcccttagtttcatattataagttgctctaaactttttagtagtcaaacttctataaatgttatcaaatttataggaaaattgatcagcatctataacattaaattagttccaattaaactaacatttaatatttttttagtatgttcattttatattgacaatgttactatacttttatataaactgaaccaatttttttaaaaaaatgactagcaacaaacttaaaattaaattaaaattaaagtgacttaggatatgatgagacgaaagtaacagctctttttctctaacaacgaactggcgtacgtggaaggaacacggccacgatatcgtacagacaagagaagccgcttcgagaagacagccgctgtccatgccgacgcgactccacgcgcgccccgcgtctccctccgccgcagcagcctcgtcagctcgcgagatcaacgccggcccagtcagcccagccacatcaccgcccactccaccaccccaccccgcatggcccggatctaataaccaacggacgcggctcgcgggcccaccggcccacccacgcccgcccacgggatctctcgctgactcggacgacgacatcgccttcgccgctttcacagtgtgggccccgcatgtcggcgccacggggggccacgcccgcctgcgctggatccgagtcagcctcgcgtcgctgtcacactgacgcagccgcgtgttatcttaatcagccacaactttttaatgcctaacctttaaattaagccgcgacgagcactgcacggtggtcggaggaaggcgatgatgaagaagtgcccgtcggagctgcagctggaggcgttcatccgggaggaggccggcgccggcgaccgcaagcccggcgtgttatctcccggcgacggcgcgcgtaagtccggcctgttctctcccggcgacggcgagatgtccgtgttggatcagagtacactggacggaagcggcggcggccaccagctgtggtggccggagagcgtccgtacgccgccgcgcgccgccgccgcctttcggccacggccgacgagcggacgccggcgtccatctccggtaggtacacatgacataatttgagtttttttgagttacagagctattgtgcaaacagcccattttctatgcgtttatttggagttatgaaacacacccaaatttagtcaaattcatcacatgttgggttcattttggttgcagatgaccccaaaccaaccacctcagcgaaccacgcgcctgaaagcgactcggactccgattgcgattcgctgttagaagcagagaggagtccacgcctgcgtggcacgaaatccacagaaacaaagcgaataagaaggtacatagtgatcgatcaatcttgatttctagcaaatgcaacaaatttgaacagagaacgcattcttatgaactgcttgttcgaatttcaggatggtgtccaacagggagtccgctcgacgatccaggaggagaaagcaggcacagttatctgaactcgaatcacaggtattataaacttcaaagttcaaatttccagatgcgttgatgcaaatatcagtgtgatcttacagcaatccatctatgatcaggtcgagcaactcaaaggcgaaaactcatccctcttcaagcagctcacagagtccagccagcagttcaatacagcggtcacggacaacaggatcctcaaatcggatgtagaggccttaagagtcaaggtaattagaaaccaaactctccttcagccaccaattatcggcgcatttaacttttcgccacttttaagatgaggtaattaagaatttaccacccatagtctatgacaacatatgggtctttatcactttatgtgtctatgacatgtgagtccaattgcaaattgtcactcgtaagagtggtaaatagttaattgtttctgatgatcggcttccggcatctctccaaacttaccaattcttggcttcgatcccaggtcaagatggctgaagacatggtcgcgagggccgcgatgtcgtgtggcctgggccagctcgggctggcgccattgctcagctccaggaagatgtgc

SEQ ID NO: 13753 - DNA, 3940 bp, Oryza sativa
ggaaaaacaagggaaaaataattaattaattttgcatgtctgatggttcacaagttcgatcatattgtccatatggaatatatgccttgtagtgatacgatatttcttcagatgtaacactgcacttgttctgaaactatattatttgagggggtgttatgtgggtgattgcttaccttaatggacacatcatgcccaactaaaatccgtctctgaactttcaatttcttgttgaggacacagtacgtacttgcattgcttgcttcaaagacaactcttgtctgagagagagaggagatccagcagcagtgttctgcaattctatgcgtatggtagaagggaaaagatcaacacacttcctagtctgttcttctggatgggcatattgcaggaattgtgtggatttcatcagaaacaataggtgaaaaatgttgttttttttctggtaaaaagggtcgctttggtaattaacttggtcggctgagtcttgatcgggtttggtctcctgttattagtgcaaccgggcaaagcacggcaggttagagtcgagactgaccgattcttcagtggacacgagtgggttgacggtcacgcgtgctcgttgggtttgggtttgtactgctccgtattcactatctattgacattttaggaagacttgcaaaaagtgatagtatactactacctccatcccaaaatatttgacgccgttgacttttttaaaaatatttgaccgttcgtcttattcaaaaaatttaagtaattgttaattcttttcctatcatttgatttattgttaaatatatttttatgtatacatatagttttacacattttacaaaagtttttgaataagacgaacggtcaaacatatttaaaaaagtcaacggcgtcaaacatttagggaaggagggagtagttgctgagttgagttaggaactccacctccacatacggaaaacaaatattattattaacacatgattaattaaatgttagtctaataaatttaaaaaaatggattaatatgatttttaaaacaactttcttataaaaaaacttgtgaaaaaaaaacatatcatttagcaggttgaataaacgtgtgggcggaaaaaaaagtgtgttgggaaagaaggacgaccatagccttaaaggagattttcttccttctttctcaacttatctccctcgttttctatgcgcgtgcttttcaaactgctaagcagtgtaatttttttttaaaaaaagttatatacggaagttgctttagaaaatcatattaatctatttttaatgtaagccagctctcttgcacactgctatttctaaaagtctggtctcattctaaatgttaggatttgagtttaagattaatttttagtggattttttcggcgctcttaaaaaaattctacctaaacttattctcaacaatcacatttaaaaatgttagcatttgagaaaaagcattgtcaagcgacgccaatgttctaggtatgattccttataatgatcgaatggtagatttttagatatttttttaagaatggttctaacttcgaaatttaattttaggtctagaatgaaattttgaagttacctaaacgcagctatgcctatctaatttattttgtgagagctcttcagccaactccattctatttttgagtgaagtttggttaagcttatgatctaagagtgatggagctgaagataaagccgtgcaaaacgggcctaaatatgtcttaaaaaatactacaatgaaacgtcttattaaaaaataaaataaaattttgtaatatatttttccaatttttgcaatgaaacgtggagggcaatatccacacgagccacgcatcatccagcaaccaaccaaccactactaccactggctacactatgccgttatcctctctctccctcctccccctccaccgcgctccgctcccgccaacttcaaattacccgccaccgccgcctccctctcgcgccctcctcctccccctcctccgccactcgccgctcgcgcgccgctcgcccgtctcccgggcgcgtgccgtagcagccgacggcatggccgcggcgaccgcggcggcggagacgccgcccacgctgctcgagtacatgggccaggctggcgcggccgacgacctcgtcgtcctcgtggcgcacgtccagagcgcgtgcaagcgcatcgccgcgctcgtggcgtcgcccgggaacgccgagctgtcgcgggggaaggcggggggtggtgtggcggtggcggccgggcgggacgcgcccaagccgctcgacgaattgtcggtgcgtgcagtgtcagggttgcgtgggttattattgtctgcattctggttctcgcatctatctacatgcatttcatccttcttcttttttttaaaaaaaaaagaataggtccattttttgtgagattgttatcacatctcagtcatacgcttagcagctggagtagcactcatttggagtgtaaaatgttcatttactaattaagtttacttgaggtaagttgtgcaaagtgcacacaagagactttccccacattttcattcttgcattctcaacaaaatactacttgcatttgtggtgaaccatcaacagaagcacttcctatttgcaaaaaaaaacagttattgtttgtctgatgctactaacttgcattatagcttccaacaacatcaagactaacatatttttcaatttagaatgagatcatcttgtcatcactccgaagatctggaaaggttgcagtgatggcttctgaagaaaatcatctccccatttgggtttccaacgacagcccgtatgttgttgttacggatccgcttgatggttctcgcaacattgaggtatccattcccaccggaacaatatttgggatatacaataggctggcagagcttgaccatctacctgaagaggagagagctcagctcaattcactgcaaagcggcactcaccttgtcgcttcggggtatgtgctgtattcatctgccaccatattctgtatcagcttcggtgcaggtacccatggcttcaccttggatcacttgactggagaatttgttctaacacatccttccatccaaatacccccaagaggtaactaataagctgtaattcaataatttgctaattcccttagtcttcattaaatgttaaccagatgtcacctaaattcacttacactagtagcgcaagttttctcaatttatggattggtggatgaacagtttatcaatgtcagtaatttgaggagatgttttagttgaacagcggcaagagtgcttgcattgtgtttgagaacatgacgtagagaaatttcttataactgaacgactgaaatattaactgtgttgaacttagaaatgcatgctttcatctttgctgaaaagctgtaatcctgagctatgccaggacagatatattcggtgaatgatgcgcggtatttcgactggcctgagggcctaaggaagtacattgacacgatcagacaaggcaagggacagcatccgaagaagtactcggcacggtacgtgtgctcgctggttgctgatttccaccggacgctgatatacggtggagttgccatgaaccccagggatcaccttcggttggtctatgaagcaaatcctctgagtttccttgctgagcaggcagggggcaggggttcagatggcaagagcagaatcctctcgattcagcctgtgaagctgcaccagaggctgccattgttcctgggaggcatggaggacatgcttgagttggaaagctatggagatgtgcaacagaaggttaatcctggatatgaggtgtgaagatatataaccttagataatgaggtctgaagataatgtagcatgcgaaaagagaacagggggacctactggagaactctgtatttgcaaaaccgatgtttttacc

SEQ ID NO: 13754 - DNA, 2388 bp, Oryza sativa
aaaaagtttagaactaacaaaggccttagggtgtgtttagttcacgccaaaattagaagtttggttgaaattggaacgatgtgacggaaaagttggaagtttgtgtgtgtaaaaaagttttgatgtgatgaaaaagttagaagtttgaagaaaaagtttggaactaaactcggccttattatctctacttccatcctcacattcaacattagcagaatgacaacgcaaaagaatcgattgtgatgttttctgctatatattcacacttattgcaagtaattaaattgagggatagccatttatttatctacgcgcatggcatgccagaaatcatctgcacatctagcacgaatagttgcaaccggttgggaccctgtgtcatgtgtccatgtagcgtcaaccagctagttgattgatggcttaacagctcgcagcgataggttcagtagctttcctcagccattccttctcctgctcattcaggtaaggttgcaaaatttttctgcaatccgagtgatacgcatttacccattcaatctcagcaggggtaagtaaggtggtgtctatcagttttgtctggtacggagtctgcatagcacaagaaattcatcaatacatgaacatgagcaaaacaaatgacgcagatacatggtgagcagcattttgtatttagagatcatgaaatgccagtcgaactggcaacaaaggctgactttaaaatggtcatacaggtataaacagagcaacaaaacaagaatacaatgtattatcaaccgggatatcttgtgaaattgatacggagacttggagattaccaaagagaaagttaataatttaataaaatggagattgaagaaacttacccatgttatatgttcaaaagccaaataacccttatctccaaaattaaatttagtattggcttctttaactatcagaacattctccaaccttataccaaagcttccgtcttcatagtaaccaggttctgcaagaaaagattgtgcaagttgaactttacatcgatcattgcagcaagagggactatcatcgaagtaagaattacaaagtagtttcacattaaactgttgatagtcctattaaaataaatagtggttaatttaggatatttactgaccatctgttacagtcatcgatgcttgtagtggtacatttctagcagaaggtctgaagctaattagatgaggacctgggttgtaagcacaaacagaatggattaaacatttcaaggtagcactacaatcagataatttactgtcatagaagaggatgaaccagcaattgagtatctgaccttcatgaacattcaaataagatccaataccatggcctgtaccgtgccggtaatcaagaccacttctccaaagtggtgttcgtgcgagaatatcaatagcatgccctgttaaggtttaagtaacgcacaaatatcatggattttgttgaaatataacttgaaaaagtaagtataacacaatgaacataaattggtgtcaaaacatggtagtataaatcattttcttcatcacttgctagtttctgtcatctttttttttttcaaatttagtgagatagtctatcactaaataacattagtgattactggaatcttcttacagtttccaaatgttaaagaaacaatggagtctatcactaaataacatttgtgattagtggaatcttcttacagtttctaaatgttaaagaaacgatggacatgatctctgaggcaacgaggctttgagaaaacatgatgtcgcatgtttataagtaaatgcactcataaagaacaataatgttatcacatactacactattaggtgatgttaaaactccatggtacatctggcagctattttatcattgggacacatgatcaatgttaaatctcctgagttcatatagatggaagtataaaagctcaaaacactcactcacctgtggttccattgggaaatacagcagtgtccagtgcaatgtggcctttcaaaacctatttccaatgttcgatatcacttgcattagaaatagattaaatagtagcaaagaaaattaaaacctcacagacaatatcttgtaaactattagattcaagcatttaatatgatgtttatttctacaagagaaataaagtaacaagtgtgtaaagaaaacttgaccagccactgttgacataatattcaacaatggaattttcagctccattaagtaggggcaagtaatgcaatacaggaaatgaggaaaccaataacattgcaacgtgtcagaaaacaaactttcaacatgttgcatgtcagccactaagctcttaaattcatggaaaataatactacagttgtcaaataaataaagatagctagcagttatgca

SEQ ID NO: 13755 - DNA, 2924 bp, Oryza sativa
ttgattgctgccacgttttagagcaaacatgatccataaactttgccgactttctacaataaaatagtccactgcattttcattgttcctttcaatacacatgcttgagtataattttgaaatttgatttttttaaaaataatttcaggtataatttttactcgtcttcatcgcaattatgaaaagagagttgggtaacaaaaaacaagcgaataaacttataaatttggttctaaaattgaaaatctgaagaggtggaattgtgagaaaaaccagatcatcacaaaatcttccaaggcctcacctaaaatagagccatagcaaaattagcaaaggacaataaatactccactggaagagaggctctctaatttgagagatatttatcctccacacctaccaaccctactgtcactaataaatcattgtttattacttaatcacacgacatcaacctcattgtcccctaacagcaacatccaatcccatgcaccacgacgattaattactgaacaggaggaggagtagtagagtacagagataacacacacagacaaagacacatccaaatccattctttctccaccaccaaccagatgatctcctcttctcttctccaagagaaaccattccattattacaaagctcatttttctaattacaaagtccatttctttttatgttttctgaataatttttcttcttctccctttggcatgttgctgtaggtcccctacaaaggtctagaggtcactagtagtacacactcctacaaaaggttgtaccaccacaccaccagcctcattgctctcattgcattgtctcctcttcctactgctgctgctgctttctctctctaggctgcttgctttgcttgcccctctctctctctctatctacaaatgttctcttcttttgagagaagagaggaatagctgcaacacaaaggaaggcactgcttgcactgtgcagtgtgcaggcacagccaagttttcaaaagaacccgccatcttctttctctctctactgtcctagcaattctctctctagctccagtattaatttctttccatcctccattttcttgggcaccgtgcgagcttagctctgcactgtttgcctcagttgggttggtttggtttggttgcttcttctctgcttcaacggttggtcgacttcaatgcaagaaagcatcggcagcaattgctcctcccgttgagtttttcgtcgtcgtttgaaagcgaaggagacggcgacggcgacgaggaggaggaggagggattaatgtcgtccatggcctccaacgaaggtattcttctcttctctctcaaatattctgtttctcgcatacaagtttgctcctcttttttctttcttcttctgctctcttctctcttcttcttctgtccgtcttggggaagagagagagagagagagagagagagagagaaattcagaagaagaaattgttggtgatgacgaaactgaaggagtatttggtgattgaatctgcagaggtcggtaatgaagatgggaggcaggaggatctgcttgttaaggaaggttagctgtggtgattttgattattttttttactgcttaatttcctcatctctttgctgcatgtgtggcacaattagtgcttgtctgtatcttctctttctttcttgctttagtctaagtgctccattagtcctggaaaaatcatggcttttttttccaggcatgctcacagctttgaagctctaacatgtcattttctaagagggcaacaagagattaaaaaaaagagagatgtcagctgctggattctggtcttctttgtaacttttaaatatgctattatgctgggcaggcttgcattccctatcatcatatagaagatgggtagattgtcaagtccttccaattcttctcaccaaacccaaatcctttgacatcgacatttatgttgatttaagcaccctcttgatgatctttcgcaaattgcaagcaaatcacagagatgcacgggttattttcagacttagttgtgtgtctgtctgtgtgtgatagatagaaagaaagcatcaattttggaagggtgcagagggtggtgcgcatgtcaattcttggtgcaaatctctgaattatagaaatgcctcagatactgtcgactggcagcatgtggttttcatgggaaacgagacaaacacaagcctctccccccttatcatccactgtcaagggatctgagagcctgtgtttgtgtgtgtgatgatgatgtgtttcttgccttgacttgctttgcactttgtttgtcttgatgtttgtagtagtaggtagttaatttgtcttcttgataaaattcagttttgtagcataacaaacctatgataatagcccatgctatgtctacatctcctttgctgtgttcagggccaggggagcaccaagaaaacaccatcagagattccgacgaagcgaaaaatgaggattgcagcaatagcgggtcagtaaccgaagccgtcgtatcaagcgaagaacccagtgacaggagcagcactgaagaacccagtgacaggagcagtactgaagaacccagtgacagtagtagtggtggtgacagtagcagccaatctgctgattctgatggaggtagcaaagaggcgcctaagatggattcgaaggccggtaacgatgacagcagcgagtgcaccgatcagagctctcctcgcgcggtgctagacatctcggtatccggtagtgtcgactccgatgagagctcctccgttgagcagccagcggagtcgaatcacaatacgcagtggaggaacctgatcagtggattgatactcaggaggaggaagtcgatggcgagagcggggacattccctcagagaaccaagaccacagggcttaagaggtacctggaaggatgcgga

SEQ ID NO: 13756 - DNA, 666 bp, Oryza sativa
gctctgagctgctcgttcggctatggcgtaggcctagtccgtaggcaggacttttcaagtctcggaaggtttcttcaatctgcattcgcttcgaatagatattaacaagttgtttgggtgttcgaatttcaacaggtaagttagttgctagaacccatggctcctttgccgacgctgagtagatttaggtgacgggtggtgacaatgagtccgtgtcgagcgctgattttttcggcctttagagcgagatttatacaatagaatttggcatgagattggattgcttttagtcagcctcttatagcctaaagtctttgaggactagatgacatatcatgtaagttgctgataggtttccagttttccgctcctaggtctgcatattgtacttttcctcttactcgacttaaccagtaccaacccagcttctcaacggatttataccatggcactttaaagccagcatcactgacaatgagcggtgtggtgttactcggtagaatgctcgcaaggtcggctagaaattggtcatgagctttctttgaacattgctctgaaagcgggaacgctttctcataaagagtaacagaacgaccgtgtagtgcgactgaagctcgcaataccataagtcgtttttgctcacgaatatcagaccagtcaacaagt

SEQ ID NO: 13757 - DNA, 3827 bp, Oryza sativa
agtgtaatgatgactgattactgattagaagttagaaaagtgagaagtattaaagtataagtgcataacactgtaataccaaatcattaacaaatagggcctgattttgttctacattgcggtaactctagcatataatacagaaatctagctgttatgctctgcctctatatcatagctccaagggtcatgtgatacaaagtacagcttttggcctaattatattatcttcatctatgttaaatattctctgaatcttttgcttcatgcttgatattactagaaaatttgatcggaaaaggcgggcatgctgaggtgtacaaaggacatcttgctgatggacaatttgtagcagtgaagagactaacaaaaggtggtaacaaagaggacaggattagcgatttcttatctgagcttggaataatagctcatgttaaccatccaaatgcggcacagctcttggggttcagtgtggaagggggcttgcacttggttcttcagttctcacctcatggaagcctggcttctgttcttcatggtatggtttcctctaaatattctttacttaatgaatccaatttctgagagatatgctgcattgctgctatgtggtggcatgttacatcatatatcattttttagaaaagtaagaaatatatagaccttactattaggaatcaactagagaacagatatctcttgacattcatgctaccatgtagtacaacatattcatttaggcagtatctgaactatgaaatgtagttctccaataagtatgtgcgaatttgtgatttccattttggtaggcttcatacaaattttacattatcacttcttgtagccctcatttcaattgcctcttaaatgcatatactataggccgtatcacatatctgaactcaagcatcatcctctttctaaaaaaaaaatcaatataagagaatacttagaatacccttagtctggtgataaaatggagttcagctgaacaggcacaaagggagccctcaagtggaaggctaggttcaatattgctcttggaattgctgaaggactgctttatctacatgaaggctgccatcgacgcataattcacagagacatcaaagcatcaaatatccttctaactgaagattaccaacctcaggtatgtattctactaccagtctcttgccgtagtcctatctgttatatgattcctagggttcttttaaatgcaacagtttttactccctcattgcacagatctcagattttggacttgcaaagtggcttcctgacaaatggactcatcatgttgtgttccccattgaagggacattcgggtgagttcgataagtttttttcagtttcatcacaatgatttaatcgtacccagaaaaagaaacaatgccattgttggttttaacttagactttacaccctttcttaggtatatgtctccagagtatttcatgcacgggatcataaatgagaagactgatgtgtttgcatatggagttttgcttcttgaactagtgacaggacggaaagccgtggattcctccagacaaagcctagtaatatgggtaataaaagcaaatctctaatatgctccattatacaaaaattcaaatcagctcattttatatcattgtctggtcatattgagagaggcaagtgatgatcaaaagttaattctacaatacttgaatggataacatgaactggtataatcacatacatctgaagcccttgaattcacaagctgttgtttgtcatgtgcataggcaaaaccattgctcactcgaacaacatgaaggaactagtggatccttctcttgatgttggatatgatccagaagaaatggctcacatcctagcagtggcatccatgtgcattcaccacagctcaagctcgcggcctagcatgaaatcggtgagtgcgatgaacacgctaactatacggccattgtaaaggctaaaaaagaacaatttggattgtaaactgacctgttggtttgatgcctgtaggtggtccgtttcttgaagggggatagggaatcactcgaaatgatgcaaatgcaaagaccaaaactcatgaaacccctcatgttcgactccggcgattcagaggattatactcgctcaagttacctcaacgatctcgaccggcacaagaagcttgccttggagcagtgatacttgagttgattttgactgccatcttttgtacatcatcatcattatcaacattgtgatcctcctcctttccaaaggtgtagtagtatgcaggctgtatggatggatgtaagggttcagtttatcagttgctccctttgttgctgatcaccatggtgtcattttggccaaatgcatgttgtgataccattattcgatcgatggaccatttcagccctcgcctgtgtgttctatctctgcatgaaccttgttcaccatgtcaaacaaaaaaaaaaagctcctagatccaatcaagtaacctgaatttcaaaaaggtaaatcagttcaatagaagagatgcacttgatattgtagcggtaaggggggtgattccgtgtttaattctaaacacactcataatttcttctaattattggataaaaaagctccttctcgatttcaattctctagaatgctaatcaaccaaccatgattatcacaggcaacaccaatttcgaatggatattctgaatcctaggttgcacctgtactccactgtacctttttttgtcgccgccgtcggatcccccagctgccccgcggactccggcgcagcaggcggaggctcccccgtcgcctggaagcctctccggcggacgagcaggcgaggcgcagcaggtaagagtgcgctcgttaaccctgcatggctgcatcgattcccgtggaccggcctcgcgcggcggggttcgccggaggtccgccgccgtgtggagtagaggagagaggaaaggcaaaaggaggatcgaaatgcaaaatgcgaatagttggagggtcagtcgtgcaaatatcggcccaagtaaaggccccattagcttctgattaggatacagattctatgcgtgcgaaaaaactttttgtatgtaaatttctttaaaacatcaaataaatctgtttcaaattaagcttgtaatgattaaaatttaattaattatgtgttaaaatttaattaatcatgtgttattggtttgttttatccatatcctaactttcatttttattagaaacgaatggggccaaggctcatcttttattaaagggtaaatttcacatctggtcatttattttgaccaagagttaaactaacattttcacttaacactatgcatcattttgtttggattaagggtaagggtaccgacgaaatatgtgagggaacttcatatgagatttacacagggatacatataaaaaacaaagcattgtactatgtttttacattctatttagtttgagtggtatctaattaagttatactttctattctatttttattcagttgccctccgtatagattaatttgtgacacttttaaacatattcacatcaccattttagtgtgattttttttaaaaaaaaggttgttttctgattttctaaaagaccatttgatgggattttctgagtttctaaagatatttatcgtgatactacaacactaagaatgatggtttgaaccatttctttgacattctctgacaaacacctatgatattccaaactgcaactgtaaagatatgtggtgtcaagtgaaaatgttggtcaaattccaatgtgatatttactctttattaaacttcagtgtgatgccgcccctgggataggaa

SEQ ID NO: 13758 - DNA, 3084 bp, Oryza sativa
cgatcgatcaagcacttgcacttaattatatccttaaaatattttacccatgagtaaaaacatgttatcacatgcatgcatgccgtactgtgacacgactccaaatacatatatataagaaaactttcgttaatgttcagacaagcatggatgaattaagacaacacaaaattaaaatttacaaactttaagccaaaattaagaatgtaggcacgactaattatctagatcaccctcctctctcaagaacttaattaattgcatgcatggatgcatcctaattaattgaacgatgcataatgcaatactacttttgtatactctcccaactaataacaagacagttacatatgcttattcagtgatcttgcaagatcagttcagcctgcttgctggtttcaccacaaaattaaacatgcagttaatataattacctcttcaattcatcatcaattagtttacccataggagatgttcctagccttggctccaacaattggactactcatcctctcacttcctacaggtagcactgtttgctgtggaggtggtgatctcatgtcaagcttagagctcatctgaccctcaaaccccttactgcccatggagtctcctcctgacatggtgatggcctccatcatcatcgtcgtcgtcgccggcgccgccatctggagctgatgatcgccggagatcttcgccggctcgccgccgccgtcgtcggcgccgggccacaccattgggctcttcccagtactggagctgtaattgaatgccaagaaggtatcaattgatggcctgatctccatctgctcatgctgctgatgcaggtgatctagatggcttcctccatataactgcagatcatcttgcagagaagggaagctcatggagctgccaatgtcaaggacagcttggctgcctagagatttgtatcctgcgtgccacgtggcgcaatctcctgaggacgagatggcttggtatgctttctccaggatggtctgcatgtatttcccctgggcctcaaccctcatctgaaggtgcttttgcacctgcatgcaaagttagttatattcacttcttttgtgtccaaagaaaatgcatatatgccaaactcatgagtgccacagatgagtataggaaaaaaataaagttgtgctagctaggtaaacttcccaagaatgttcttgcatggatgcatctcattttcagaacatgtgaaggacaaacattgacatataagctgtccacaagcatgtaaacttcccaagaacgttcatgcatgcatgcaaaagttcaaaggcaacatgtgaaggagcatatgcagaataaagcaaagcaaattaataagtaatttcttgggctattaagttcagtatgtgattaatttgacaccatgctgaattacagaaaattaatttgtttctgacaatgctcttaattacctctaattgttcatggaatcttctctgaacttccatcttcatccttagtgcctcattcacatgcacgctgcggctaacaattcatagaaattttgaataataagatagttattaaaaaccacattttgaattaatgaacaacctaatctagctagggtactctatgaaaaaaaaatcaacttactcattcatgcttcttcccatgatgcccgaagaagacgctgcattccgttgcatgtccattgctgcagtgggaaaatggacgaatataagtttgaatataattcaccttttgattatattcagagaaagtgtgaaattaactattctgaaagaatcatggtaagtaaattaagctgtttaaatagctagctagtacaaacgaaacagaaattcactgctaacatatatcaagtcggtaaactttaacaagcggaattaaaggaaggaaaaacatgcatgtgcgaacaaactaacaagctaactagccagctaattataagaacacaattaggaatgtaatatgctattttaacaagtagatcgtgtgtttaccatccttaaccgagtggtcgttgaaatccttgtgctgcttcccaagtctgaatttctgaaaaaacaacaatctacaacacatgagagatccagagatacagaagtctgaatttctgaaaaacaacaatctacaaaacatgagagagagagagagagagagcataagctaaccctagttctaaccatgctagctagtgcaactagaaaaccatatatagacatggatctatatatgtactgcacacacacctgaagatggctcttgagatggtaaagtgtgagtcccttgactcccataaccctcatgatcgtctttggagtcgcctctacaattgatcaagagtttgatcatgaaacatacaagtaatttacaattgatcaagagtttgatcatgaaacatacaagtaattaattaagaagaaccgaactcgaaccaaataaaatcaaatcaaattctcagcatcaagatcagtcatgtatagagcgtagctacgtactgtccgggcctccgagctgggtgacggcgtcgacgaagcggtcatggagctcgacggtccagcggaggcgtggcttggggtcggtggtgaggacgaggccggagtcaccctggacgcacaacggcggccgatcattcgagctcgccgccgccgcggcgccgccgacgccgacgccgccactgagctgctgctgcttcttggaggaggaaggagaaggagaaggagaagaagaagggaacattctattctcctagctagctttcctcctcctcttaagaacctctctctctctctagactcactagatctcctccctctctctctctctctgttacagatttggaagagattcaagaacaaaggaatagggttcgatcctctcgcggcacgcggaacgaggaggggagggggaggaggagagaaaggactacggtgttggtagagaagctgtactgctgctacggcgacgaccacatcacttgatctctcttagcttcttttcttgatgatatgttctcatctctctctctctctacacctctctttgttgcttttaggtgctttgattctctctctttctcctttctct

SEQ ID NO: 13759 - DNA, 736 bp, Oryza sativa
gagctcattctcaggactcccctggaggctggctcggaagccgccgacaagaaccggcagcatgagcgcgtacagcgcggcacccgcctcgctcctcgactccaagagcagcatctgcgtctccgctggcacgccggcggcgtcctcgcccaccgtcgggatcatccaccagatcttgaacctgaacagggacagccacttccacccactgcacaccaaaacccaacaacgaatcagtaccaccgctgccggccgcggcgcacaccgcaatctctgctctgggggcgggggctctacctggcgagggtgccgagggagaacacgtggcggctggacggggcgggcgccgtggcgccaaggaacgcggcgccccccggggaggcgacgaccgcggggcggcggagggccacgctgggaggggcccgctccaggagctcccgcccgccgaccaccagcgacccgcgctccagccgcgccatctcctcgctccgcgggcacgcgacggcggcggaactgaggctgggacgcggccacggccggcattgcgccgggacgaggccgcgggggcgcgaattattcccgcgcgagggagtaggaggaggggcccgaagcggcgacctccagggcgccgtccccgtcatcgccatgtcagcttcgagctgggatagactaagatatccggtagtacttccgctgccatgatcgggacccccgcgtgtggatgggggcgctcgcc

SEQ ID NO: 13760 - DNA, 546 bp, Oryza sativa
gcgagcatggtgttcgtcgccgccacgctcctcgtgctggtcaccagcttgaaccactggctctccgggtcgcagctgttgtccgcgctcaggcaccggcacgggttggtcaccaagctccggccatcgtcgccgacgtccaggcagagcatgccgccgttgctggtctcgggggacgacgacgacgacgaggcgttgacggcgaggtgcagcttggagtccgaggtgaggctccaccgcgccagctcgtcgccgcacgacaggccgaggcgcgccggccggccggcgccctcggcgcggaggcacagcagcgggctgtcccgcggcgacagcctctgctggctcgccgtgtacgcccacgcctccgcctcgccgcaggaccccagctccagcgtcgtctgcaccaccgacgacgaccgccgcaccacgcaccgccccgtcgtcgggtggaacatcaccgtgtacggcgccgcctccgccagaccaggccctgcacacgccaaaccaaagtcatcgccggagaagatagataccggcggcggcggc

SEQ ID NO: 13761 - DNA, 2003 bp, Oryza sativa
aataataaaaattcagaaataaaaataaataatattggaagaagagcatagagtctatatagaaatacaatttacagaaaattcggaattaaatataattaataactgacacgtatataaaatacaatatgaatattacatatttgtattttcgtaaagctattgcaaaatttaaaattatgatgtaattttaatatttttgaataatataatgagaaaacatatatgctattatataaaagaaaatataatgatgctagccgcgcaatctgcacgggccaccatgctagttattatatattgggtatacttaataggggcccttaagatttggggccctgtttagtcgcacagtccgcactggtacaagacgccctgacaagatacaatgcctctaatcctcatcctctttcaccttcacattaccaattcatgcacttctctcaccaccaaagacgcacgtactcattttttttcctactcctccaaggaaaaaaacaaaaaaagaataaagatagtgattgaattgatgaatatgtggacggacgacaataccgccatgatggagacctttgcctctgcagacctttacgtggaggtagcttccatgccgccgcagcagcagcaggtggtgccaacagcgctcgcacccacggtgacgttcaaccaggacatgctattacaactcctccaattcatcatcaaggtcctattaagaatatacgtaaaacatttttttaaaattttctatgataattgtatacacgtaaaagacttatgtgtataggatacattcccgtgcaacccatggcaattatcaaccgaaccaattaaccattcgattattttgagggcgacccatgcattcgcgcgccgtggtcggcctgcgttgtctgatctcgatcgcgatggcccgtgacgcgaggcttccgtgacccggtttgtccaagtttactccgtacgtagtagtatatttgttgccgttgccaatggaacggtactcaggcgggggcggccggctagttccacacgctgccaccgctttgccgaacccgcgcgtcgatcgttcgtgcacgcgtctcgcatgcatcctccacaaactccggccgtattctgcacgttgatgttggcctctggcggtccaacaacagcgctgccccaagccatccagatacggccatacgggaaaaccaatggcgatcggcgaccgggacgaccatccgtttatctgtaccttgaaggtgacccgtgcgcacgacgctcgccgccgcttcctgtactgtctttacccaatcctgcaccggaaacaggagagagagagagagagagagagagagagagagctagtaggaaccggattaacttcacgacggcttccatatgctccccgttctagctggccctctctgtaatgtactaccagtagtactgtcatttctcaccaggacggctacacagctactgcgtttatctgagctggaagtaggaaattcgggaacccaccgagcttaaatttttacagtatcacttttgataactagatatatactccatagtaatgatactccgtaagttacatgcctgcatcgtcaatgagcatctctgttactcttgctcttggtggcgatgagcacgagagggttcttcttgcgcaccgccagcccgttctcctcctccacgtccacctcgcgccccggcagcgcgcgccagtcgaagcagaagaggaggttggccagcagcagctccgccgccgccgccgcgaagtgcacgccggggcagctcctccgcccgatcccgaacggcaccagcgcgaacccgtcgtgctcgtgctgctgctcgccgtcggcgtcgtgggcgcggtggcgctcgggcaagaaccgctccgcgttcgggccccagacgccggggtccgtgtgtatcgccatcgcgttgacgacgacgcgcgtcctggccggtatctcgacgccgtgcgccgtgcggaacggctccgtcgtctcccgtgg

SEQ ID NO: 13762 - DNA, 1485 bp, Oryza sativa
  unsure (1)..(1485): unsure at all n locations
ttaatgctatagacaccataggtttcgataaaaatttaatgagatgtgaaatgtgtagctagtttccgtctacgagttaggagacatatccgcgcggtgtgaaagtggtgcgcgcgcgcatatcgcgtcttccctatgtccaggaaaacgtatatcacagcgtgctatgctcttgtccaggtacgtaatatgtacacgtaccgtgagaatgcctttgatgtgggtgcggctgccgaacatgctccggtgagccggatcgccgtggaggcggaggagcacgtcgaccaagtcgtcttcctcgtcggatgcatgcttgcgcttgtttgagggtggtcagtcgtatgacggcgctcgttatgagcgcgttccgagctgggcgggaaaccggccgctcccaggccgcctacctacttgcccgctagaggagtgtcgcacctcacccggagccaacggtcatcggtagtacggcgacccccagatgatccatccaagtagagagacctgggtgctacgtatgtaggtaccagccttgtatcagtaccatgcnatnctcgctcagcccgtacgcccgtcagcccgacaggtcgtacgtcgccagccacgtatncctagctgtctggtgagcggacgatctcantgatcgctcaagggattgacgtggggaatggcagccggcgggaccgcccacgggccgacgacgaagcgacggcggtcctcgacgctcaccgggcggtcgacggagcctcgcggcacccgcgggcgggccgaggagctccgacatgcacgcgcggcgcgcggcgcgccagtacgcgccgtcgggcgcgaaggagatgctcttctggccgtaggagagccttgtggccgcgtacagcgccgggcgccccgacagcgcgcggtcgttgttccgggaacagcgcccgcgccgcgtcggcggtggagacgacgagcgtcggcacggagccgaggcggagcagcatgagcggcgccgcatgcctggcggcgagcgcggcgagggagcggtgcgggagcgcgccgacctggtggaggttgccgatgagagggaggcccttcgggcgtggcagcgacggtgaggcggcgcgcttcttggacgacggcgcgagaagctgcttgaagaggagaatggtggcgaggaggaggaggcatgacgcaaggaactcaggagcttggagagacgccatggacattgctgtcttggttgttctctagcttgtctctagggcggctgagtttatctatctatatatatgtcatgtcaggaggagatatcttagggcatcaacaatgtatccttaccaagtagtaagtaagtaaggttggaccaaccaaaagcagaaagcaggtaattgttattcaaggtgggtcccacatgtatataaatataaatataaagacgtagtgacgacgacgacgccgtcaccagcagcagccgccgctgcccacggccgtgctggcccgcgtccccct

SEQ ID NO: 13763 - DNA, 5344 bp, Oryza sativa
acactagaaaggtctcgcgcgctacgccgcgcgggtgtaatagacgtgtctaaaagagcctaagacgcatgttattggagcttactgaaagtgttatatttagctggcaatttagcctgtgtgggacaacagaacaagtagctcatttcaagctgtaatgagcttgattggttttatgtttaaatttaggctcttatagacgtactgctatgatttaaggatgtacacctcctgttagattcaggcactcagtaagtaagcatgttctcatgcttagattacatacagtctgttggaggtgcattatatccttacagagtgatgtgccatgctgggatatatagcatggaagaatcaatacatgtagtaactatatcgcaaaacatctccgatcacaacagttgcagctatagcaaataacacaaaggggcattttgtgccatttagtgaaagtagcctgcaggtttcagaaatggcaagcaccattgactgaatatgcacaatcctttgtagggataatttttagaagctcaatattatgaatcggcgatacgaatcatttagtgtttgcctattagacatggtgagctagcaatagctagaacatcagttggttgatccccaggccaatacagaagaacatatccttggtcttatcttcccaccacaaaacaaagagtggccgaagcgtgagcattgctatatttgagacagcctcttgccatggtaggtgggataatattacatgggagccccaaatataaagtgaatgggcagttagtacttgtttaaacaaataaccaaacaagtagaacataactgtttaaaataattacttacatttgagcgactccagtggcagtgtatctcagaatagctcgcacaatactgaagctctgggatgaccaccttcatcaggagatgagctacagatgcatgtcatttggcccatctgaaaacataattatattatatatcatatgcggctaacgaaggttttgtatgttattgcatcctaagcactctagtatgtccaattttcaaaacctaaaatattgtgaattgcatctttgaagtaacataaaagtaattatgtatagcttagcacctaaaagggtataggtttgtcttgccattccaaagatactagaaagaaatgcgcactacgctgcgccgtttgaagatgatgcacatgccaccattatgctacaatgtcatgcactaagcgtataaaatagcacctggccacatacacatgaatataactttattgagaaaacatattgttttatataaaaagtattattataatgcattagcagaacaaagaatatgcgtaagcatatttcagtatctgatacactacctaagcagaagatcataaagattatgcaatgtttgttgtacagtgtttgtaaagccgataaaccattggagtttgccaaggagtaacttacaactgtactaatgattttaatgacaaaataagagaagtaatatcgtatatagagaggcctcccatgtacagtctcttttatgtagcataaatcatgaccaatagagaaaaaatgtctcaattaccaaaacggcacaaaaatacacaccatgatatagtctaaatataggttttgggatacaaatatcaccaaacaaaaatagtagaaatagatgtgtttttcaagagcagcaatgctggctcagcttttgaaaggcgattctctgatcttttggcagtaactgaggtggtattgctcttgcatgagtttctctattcaccattatatacatcagaaaggaatctcctgaaaaaaaagaatagtcaaaactgatttgcaaaagatgatgcaatgttattgcaaaaattaatgaaaattgtgggaataatatacacacaacaataggttactgggatgtgtacttccagcgttagaggctactttatacgaagagagaagaaaagagaaatatggcatctatcaacacatgatggccatggattaagaagtggcacaaacagtaagcataagagaagtattccgtcatgaacttaagatagaatcttataattgcaattgctggtgaccggcaacatggagaatttatatgcatagaacattcctggtgcagctagcatattctagaggcccggccaaacccttggatcaaggcaaagacagtggtgcaaagacaaataagttgcatgtagtcttcatcatttgcacattacattataaaaataagagctatcttctaaaattttttttgttgggcagaatataagtttgtaggacagcattacataactacctgcttatgtcctatttgtcaaacatggagcagcaaagtcatctaaaacaccaccaagcaatgataaaacaatcataggcttcatttcctccatgatcttatcaaccttccttattgaactggaccgacacaacaaaccccataaactaatctaatcgcgcatcaacaatagcatgtacatcatctataatatctgcattgtacgcatcatgtcatttttggcagaaaccttagcaattttaataaaaagtatatcctttcaatgcatatcctgttggcagaatgctttcatataagctttttattgatagccttgtagtgatgcctagtaaggttttttttttttttttttttttttttttgccatcgatgtcattctatcaagctaggtaaggtggcaccaccatatcataccatatataatgtagcagtagaagcaataaacatggaatttctgacaactgaattcatatgaaataatctgaagtaaagaaaaattcccttaatagaagtgaagcataattgtatatgatcattataatataattaagcttttgttaaccgtactgtggtaaagaagatgaattgtgtcctgcaagatgaatctccctgctgaaactgtacctctttcagaatagaggtaggaacaacatgaagcagttagtgtttcctaaaattaaacaatgttgtacatgaacaatatggaaataaataaaaaacgatgcacctgcatattgtttgtgttcttcaaacttgaatccacaaaactgagcatgaacatgaatctgatcttgccacaaaccaaaagaagcaaacattaatttaaggaatatgatatcccttttaatcctagttaatcctagacagcgaacaatctagtcgagagagaatgaactaacctagtgcatactacataatcataagagaattgtattaacttatgacagaatgatttcttgccttactgcatgaaagaatattcttccccatactacatggaagcaataaaaggaatcactgggttgtagttaaaaacaaaaaaaaagaaggaaattgttggggtctagtagtgcatctaatattgttgacaaatttcacaaggagattatcgattgaatattgcatagtacataccatgcttaagagtgaggacaaagctagatgggtccctcggcaggatggcacaacagagtggtaccacacaagacatctctcttatctatgaacaacacctcatcgtaattcatcagtcactcgacagatcctaagggtaagatggtgttaaatctttcaatatgaatgcaggccaactgcagtaaaatgacagtcttaatttatactcccttcgtcccataaaaaccaaacctagggatgaatctggacggattcatccctaggacgtccctaggtttggttccctagggttggtttttatgggacggaggaagtacaaagcaaattcatgagcaaactgcaaactaccatccgaaatctctgacctgacagaatgttatttctaaaagatgaacacaattcctgataatttaaatgtagaagtaagcaagtaaatagcattttaaaccatggtctaatagtcaaatgtagaagtaggcacatcgcgtatgtgattacccaaaataaaccaataagcggtatgcacctatactattggaatagtatcaaccaaccacttaggaaaaggggaaaaaaaaccaggttaaacgatgtcaacaaaataaaatagttaaatgtgaaagcctaacagaagatagtagtattatggattactttcataagcatatgccacactacataatattaaaagagtggattggaagctgtaacctgaagcatggctacattatatttattttgcaacattgaatatgttgtggacataaccagaagcaaactggcataactgtgacttgcaacatggaaaatttatatgcttatatgcatagagtactttcagtgctgctaggacattctagaggcctaaactcttgtgtcaaggcagaggagaaagatgcttgcactcttcatcatttacacattaaattataaaaataacaggcacgctgaaagttatttttttttggcagaatgtaagtttgtaggatagtactaaataactacctgtcggaacgttttgttttatggatatatggcagcagactgagttgtctgaaacaccaccaagcaatgaaaaaataaccataagattcatttcctccatgatcctaccaactttctttgttgaactggacaaacacaacaaaccacataaatccggtgtagtaataattttgttgcaacaaattagacatcagtaaaagctttgcacactgtctatcggcgtgttatgctcccagtattagagctagggggttttgatgtcagtattgggctattggcaggtatttagcaaagttaataaaaagaatatccttccattgcatatcctgtttgcagaatactctcatataaccttatacttatagccttgtagtacctagcatggttttctttttccttcctgacgtcattctatcaaggggtgccatacaatgcagcaacaaaaccaataaccatggaacttctgacagctaaattcatatgaaataatctgaacccaagaaaaactcaccataatctaaatatcgcagccctgcttaagagaggatttgctcagtatgactgtagatgcgcagcataaaagtcgtcctctctgtaatctgcgaccaacacctcatcctagcccatcaatttctccacagaacctaaggcaagatgtgggatcatgtaaaaacaccagcaaacgcaatggaaatgctcaatggcgagtcaaaaccattgccttaccttgtggattttgtgctaaatgtatgcacaaaacaattgtggctgaaaggggtatcaaaatgattcaccaacgaggagaccaatggccgagaccatcgattccgatgacccccgaaccggatctgtagctcaccgaggatagggagaggaagagggaggcggtgggtggcct

SEQ ID NO: 13764 - DNA, 2591 bp, Oryza sativa
ttttttgtaaaatttgctgacgtggcggccctaaccttcaaccaatcccacggcttttaagtaaacacatatgactataatatctgaacataaaatgtctactaattctccatgatacaaagggcaaaaataattatcgtgttttttttgcattgattcaattcaagaagcgtcaagattgacctgatagtccatataacattactaatgccaccatgcaaaaatttaataagcacatctcagaaataaatcaaataagaaagttcataaggtttacctcttgctcagaactcagagcagagatcaatgcagtatgaatgttcactattatcttatcttgtgtttgtttctcagtggaacaattgacagcttcatccattatgttttcctgagctgaggatagtgcattggccctctagacaggaataggtattttgcaagaggaaatttgttccttcaaactgaccaacgatttttcacttgtctgaagatcaagaacaattgagaataatcagataccatggctgtcctggacgaaagaacaatttggtaaaatcctcttcagatatttaaagccgaacaatagctattgcaataggatgtttcatttgtataattttgaaatgggtaatctggcacataataccaaaccgcagttctcaatagtttaatgccatcatatcacttatatcgttatgtatcatacacagtgaagaatatagagaatgcatggcaataatttgtgttggtcctgcatgaactcgtgtataatgaggtgaaactaatctatacagataacacttcagcgaataaagtagcacatctaaaatttcccataagttttttttacaacaaaactgaaagccacttacctacaaaattgttgtgtaccctttgatgaatatctcttgctttgtacttgtatcttggatgacctaccgattataagtgtctggcaactatctcacaggctgagacacatcatatattagagaaaatcataatgaactgcacatatcgctgaaattaagtagaacatgactctagattcgttaatgcgaccaagtgaggtgccatgtcagttttcgaaaatcattgtcatccagtagctgatataaaaatattgaattgcaatatatacagaacaagaaaaacaagaaaccacaactctgttaatagaaaagcttgatacaataagtaaattaatacgcaaacattggattgaggatcacataccttacaacatttagttacagagtggcaatatttgaccatatagacaggatgaaaacccttgcaagttgacagctcgagttatggttgaactgcaatacaacagagttcagattgtgataacttctattctacttggtagatttccatgttctttaccttaatagagggcttaaggaaccctgtacaactctatagttatttgcattccttgatttggcctctaaagactgaaaaagttaggtatatccaaattgaacaattttgtgaaaataaaaacaaataactgaaattaggacaaagcacgaacctacctcctaaatatcaagccaatcatatctgaatctgaatgtacaccatacgatgagggattggaataggtagcctaaaaacgcattagcaaattacttaggtatcccagtttcctcctccctcacattttcccccttgttccttgattcctcctgttgctgcttgctcagcctcccaactcagctccatcttgcaggcttgcagccactgatgtagttgaccagagaagggtgaaggaaggggataaaagaaggcaaagaatgtagcagactcaccagagaaatccagagaagatgaacggagcagccgaggagggagcttgaacagaagaaaaccccactcccgtgtacggagatgaggcactggtcagtggccaatccggtcgccaccgtacggggagacgaacgccgatggatgcggctacacggattgtgccgacggaggagatcatgcatccaacatctgggcacgggatagcagatggcaagccgtcgtgggtgacgacctacgatggaagatcttggaggaggcgaggagcatcgatgccgcctctagacagaaatcaggaggaaggggatcgctcgatggggatgacgggatgcaacgtggggagatgagcgacgaccgattccacgggtaggtaaggacggagccatctagataggagacgaatggtcagattgtgtccacgcgtggggttgaacggctctgattcagtggactcgactggaaataccgaaataatgaggggatttctgcaaaaatcaatgagtgggtcggcggggcctgcagttaatctaacgcttattaaattttttttgcttgttatgacatgtcgatgtcgcagtgggcgctggcttcccaaatcgctaggagggcagctaatccagcacctttaagatatctaatactccctccgtcccaaaataagtgcagttttgcactattcacgttcaacgtttgaccgtccgtcttatttgaaaattgtttatgattagtatttatattgctattagatgataaaacatgaatagtactttatgtgt

SEQ ID NO: 13765 - DNA, 4356 bp, Oryza sativa
gatttttttttcttctttttcttcagaggggagaggacggtgaagaagctgcggctgacgaaggcggtgacgatcccggaggggacgacggtggcggaggcttgccagcggatggcggcgaggagggtggacgccgtgctgctcacggacgccaacggattactctccggcatcgtcaccgataaagtaattttcctcttcttattttatttttcaaatcaatctgtgatgtgttttctaagctggaggtggttgcgattggctaataagtgggttttggtataattgtactctacgaaactccatatagagttttgcttgtgtctacatcaagtgcctagatttcttaaagatggacgctttatgttattgcaactttttcttaggactgcacaactcctctttgccacatctgacttgttcaataatgaatcgttgagagtttaaatactttgactaatgctccatgaatcaattgttatttatgtattttgcttcttatgtattcgactgcggcccaaccatgttgtgttttctttttttcttttttctttgcgggtgcctatgttatgtgttcgactgtaagtttgtacaaatcacagcaatgatttaatactataagtacatgccaaagtatcttatgcttatggtacttaaagcttaaagtagatgctttatcttttcgcccttatttgcataattgggatataggacatggctggtacttctagcttaaaggagataaggagattctttatcgtttcgtttcttatttgcttaatttggatacaggacatagctaaaagggtgattgcagaggggttgcgggttgagcaaacaatcacctccaagatcatgacacgaactcctgtttatgtcatgtctgacacacttgctattgaagcactgcagaaaatggtccaaggtatcttgtaatcttaaagcatagacccagtgatctgcctgtttggttcagatacttcggacttgggtcaattgaactcacttcctttaactcctacaagctgctgtggagtatatttcatatgcattagttatctttgttgtagctacttattgtgagaatgttttggataataatgttgtgatcagtaaatccttgttgacaatgttggactagccatattgtttaaaattatcactatttttgtatttctgagaagcttcaatcagcattctctttccctgtttacagtataatctctttgaaaatctattcggtcaagactattaaactatttgagtacttccatttttttttctcttttcttgcagtcttttatgcattcatcagtttgtcttttcaagtttgttgcatttccttttagcaataatctaaattaatttcagaggaactttctaatttctagacattcttccagtattgagagtctcattggctaaatttaatttactataggacaactgcatatctttaacctctgaacatcagcattctacaatcccaatgacctgtatgcatattaagaaagcattattcacttgttaataaagcagtaacagctatgctatgaaatcaatggtcattgttagaaagtttgtttcttattttaataacatgggctcatcattccaattgttttatatactgtctctccgtattccaagtatgttcattttcctctccttagagctaatatgaaacactcacgttttaggaaaatttaggcacctcccagtggtggaaaatggtgaggttattgccatgctagacattgcaaaatgcctttatgatgcaatatcaagactggaaaaggcagcagaacagggaagtgcattagcagctgctgtaaaaggggttgagcgtcgagtggaagacaacttgccaggttttctgttgcatatggtgctgactagttattttcctttgtttcactctaaatgttcattgctacacaagaacagaaaatgtatactgcagtcagtagccatgtgaactaggttatgagcaatttgtaatacccagtttatcccaaagaataatgagatgattctcaggattggaactatgtttgatgtttgatgctttactgtatacatttgtacattattttctaaatagatttcacttaaccactgttttctggtcttgtttagctgaccaaattactgtgtttaccatttgcagatcattccagtgtaatagaaactctaagagaaaggatgcttaaaccttcattgtcaaccattatctcggagaacacaaagtacatgaaatttttattagtattccatttttgggataaatccacaccatgccactgagttttattcatatccatagtagaccactcactgtgaggatgacatgtggccatgtgggcagtgagacatcagtagtatattgtagacactgaatgaaacttggtggtataaaatggatcatccaacataatgtggtttgaatcatgggagttacctcttttttaacttgcagagtagcaattgtttcaccatgggatcctgtttgtgtagcagcacgaaaaatgcatgaattacgggttaactcagtggttatcactgcaggaaattcattgcaagggatttttacgtaagcatttcaatacttttatggaataattctttattctagagtttatattattttatatttcttaaggcactaatggctatgtcattgtgaaattcagctcaaaggatgtgcttatgcgcgttgtgacacaaaatctctctcctgagttaactcatgtagaaaaggttgtttctccagattgaatattattttaaatgatttaaactaccgatgggttatacaattcattctagactaacagcattactcactgttttgctcaaggtaatgactgcacaccctgaatgtgctacattagacacatcaattctcgatgctctgcatattatgcgcgatggcaaattcttgcatattcctgttgttgatggaggtaacacttgactcttcttcagcctaaggtttctctttatggtactagtattttatatctgactgaactttttaattttaaaaatgaacagaagggagagttgttgcttgcttggatgttctgcagattacccatgcagccatttcaatggtctctctgcacatgcgtattttttcgcttctcattccttgctttttccttatggtttccgttcatctaacatcattctgtgtgaaggttgaaggaggtcctgagaccacgaatggtgtggcaaacacaataatgcaaaagttttgggactcagctcttgctttggagcccccagatgaggaatttgatagtcgcaggttaattaacgcttccttttttgtcctttgtcctctttttcaaatttgcaattcttacctgcatttttgcattgttcagtgaaatatctttgctcatgccatcagaggctggagatggcaggagtagcattaatcctcctgttgttggcaattcatttgtctttaagattgaggaccagaagggacgtatgcatagatttgcatgtggtaggtgttacaagttggttgaatgttaaactatggttgtactgctctaactaacagtttggtttgttccgtctctgcaggttcagagagtttacatgagctggtgtcttctgtggtgcaaagattaggcattgatggcgaaaagggcacagttcaacttttggtaatttgttgtcccttattttatgtatttcgttagtgtttggaagcaaaaaaaaaaaaaaaggttgtcagtctgatcatcgttcaagaagttctgttgttttatatggaatgctaactgatgtaagaaagtacttaaccaccatccacttcaagaataagaatttatctttatcttatgtcaccccatatctgtatctcagtatcctgattttcttatagacattatattgaaccatagagactatatatagtgttgcctgtattatagaaatttataagttgactggcataaaacggtcttattttgagtagcgctggtaactaattatcccatgaaattgtgaatgcacccttaactgttacaagcacttcacttacagctcaattatcacacctcagccacaattacaagctaaattttgataatgttccgtacagtatgatgatgatgaaggtgatagggtgttgctcactacggatactgatcttaccggggctgtgctccatgctaaatcttctggattgaaggtttgtcttttctgtaatcctcaaatagattggtccctctgttttcacattgcgttctttttttgttcattggattatgactattgcttcaccggagtgaaattttcaatttcagtcattgaggttgtacactgatgagtcaa

SEQ ID NO: 13766 - DNA, 17316 bp, Oryza sativa
actgacagtctcaggttttctcaggaactgaggaactgggctggaagtggaactaacaaaatatggtattgctccatttttgtttttgcatgcagatttttcacagatgtagtgaaatgcatgttatgcataattgctatatgaaattatgaattactggtcaccacgaatctagtggattcttccctgacagaacccaagaaggcaagaaatgatatgaagaatacaacaatgtatgatcattctttactaatgtgagaaagaattaatatatgcagtataatcattctttattaatgtgagaaagaattaatgtccttttttttgttatcttcatctcttcgagcctggaaatactttatgcatgatgtggctgataagaagttatgataggattttgctccattcatcagtctcagtttgctgctgcaaaatttagctcaggaaaatgtgtttgtgcaacatttttctttaccttgttgcacctctagactaaatgatgcgttgccacttatttctatctgttctgaaagctatgtagcaactcgccagcatttcttctttggtcactttaatggtgtgttgaccattttttcctcttttttaatccctgaaaacaacattagatcttccttcttagatttaactaacaataattcgttgatctccttttctttttttttcttttttttcccttctttctttctttatcagccacatcatgtttcatcaggatagctgaatctatcataaatcggaataaatggctaatgccgacataatcattcgtctcctggaagaaaaataaattcaatgtagtttttatcaaaatttaacggcgcaagtagttggttttctcataatgaggctacatttccataagccagcctaaagttgggattagtggtaattccaggagggttgccagtgttatatgggttaaagagcaagtaaaatacgcgttgaattgctagccataagaatgtttatgtaagtttgaattatgaggtgaagagagaactcacagaagtgaggatgagctgctacctctcacaagagacctactagtagattgggagcaaatgaataaaataatattagtgtgatagaggtaatatactatgtatgctgtctcctaattactaatgagagattatgtggataaaattagatatatcaatcacctctacttttattaaccttgctcaccacacaaaaagaatagtacagtacgtagtgattcattattacaacatcttgattgcccaaaaaagtttactgcaacatcttagtactctataattgatgcattgattaaccaataatagatctaccttttgctaccttttctccaacagaactacagaagtgagatatgaactgttgtacgttatgctggtacaaaaacataaggggcaattgcatatttgagaagatacatggatggactaattgggtgttgtgattgatggcatctgtctatgtagttgcttgatgcccttgtgacttgtgactagaatcaattttccaataaaagttgtatttttgttctaaactgtgattaaaaagaacaatatatatggaaggattatgtggtgacatgccaaattcaccaccatcgcaccgtacttctttttctagaggagtttggatattgtccacagttatcgaattatgttgaacaaaaggtactttaatttcatataacaatttgggagtaataataggatgtaacttacaaatcaaactaaagtttgaggggtgaaataatatgtacatgaacgccttataagaacaaaaataaatagataaatagatcagattatctcgaataatactgacggagcgtggggctcctcaccgggagaccgcgcaggtccccctttgccggttcggccgggggccctgggtgaggttctaagctcctggtctgtggaatgttcgcgaaagtggaaacgcacaagacacgggcgatgtatacaggttcgggctgctgagaagcgtaataccctactcctgtgttatggtggatctgtgtatgaagaagctacaaagagctggagagcaagagggatcaaactctagaaaccctcttccttctttttgcctctcgtgggatcttctcctggattctccgggagtctccaacctctgatccccctcctaagtgggctaggtcctccttttatatctcaaggggataccacatgcaccacttctacctatttctcctttcgatggggacccatcctctttttactaaaacttggcccgcccttccttcatcaatgggcggagatttgcaatggttgccgtccgaatgaccttctgatgggatggcccatacctacctctactccgccggaagcaggtgcaacgtgggatcatggctgtctgccgacgacatgaccagggtcagaccggtcacaaatcggtcattcttgtccaccacgcgtcagtttatcaatctgcatgttcgtccttcttcatacaatgtcttgcttgtaatggttgggatgaagcctggcatatatctgaccgggaccaacgtgccatcttcaggagctagcacgctggctccggctagggacgagtgcctggaggctctcatcctgacgggatggggcgaggcgtgtgtcagaccgcctgttgccacctaacccgcgatctgatcggtctgtgaccggtcacagaccggataaacgagcgcgctgcactgcgttacatgcggcgtgacgcgctcgttcaaaccacaataaatgcggttaggtgagccccgctgtgctcacctaacccatacgcgacgcaaaacccacaaggggtcggggcgcgcctcggccctcggggccgaaacgggagcggtccgatccctcggggagacaaagagaggggcggtcacatcaccctcgggcccgaccccccgagggggtcaggccacgtgggtgattgctcctgcccaagcctctagtcatgatactcccggtcccatgtcatcgacaaatactatgaccttcggataatagggatagtgttttaatttcgccatgaaatgtggagccaaccctttgacatttgtactagccaaatgatacatagtagcgctcttagctactccctccgtcccagaaaaaatcaacttctggttatgaatctggacacacactacgtctaggttcgtagccagaagttagttttttatgggacggagggagtagctaggagtacaatactacaaaatgctccaacatgcatcaaacccaaaacttgtcatgttcctacgggtatccaatgctagagtagaaactcaaattctttagttttctcttttcgagaatgaaaaatacatatcattttgtttccgtcccgtatggacccctagaagggaacctactttggattttactttgaatcctttctcgagagcagaaaagaatttaaacaaactttcctttgcaaagggcaacatatatatgtgctagacaggaggcataggacacaagacagatgctcgcttccatgaaacgaaataagcacaaataccggtagtaaccggccatgtttcgagatttgtagttctgcatttctaagtagagagagagatagagaggggagataacatgtaaatgtaaaggtaaaatagggtaaatatccgttggaaatcctaactaaaaggtcacctaaattataaaaagaatcgcacatatagataagttgatgttacacaatattataaaaaatattatctaacctcaactttatttgtgagatataaaaataataaatttcaaacaaattattaccgcaaacaaatttatatataagttgagttttcacccaggtagatatagagtccaaattcaatgggaaccactaagtcacattaacaattttgagcttctcttgatatataggttttaattttttaaaataaaacagacggttaaatgttggacatagaaattcataactgcggttaaaatgagacggagggaatataatagaatatgaccggatatagtatatctctctctggttttcacactttgtctcagcaagaggtaaattgaaatataaatcgcatgaaaacaaaactagattggccgatacattcattaacaaaagacaaaacatattcgatattgttagaaggacaagacaaatagtcgtgagtaaaccggtaatccctcaattttaaggtgctcaccatccaaaggtgcatgccacctttatttatccattctcctttctttttccaaaagtttttgtgtccccgttagaggggcctccagtccttttagcgtgtgatggattgataatgataatgaattatatataaatttatctattgcacaatcgttttcatagtacaaataaaaaggattaaaagagttgaggtgtctatttacttttcatggcttgcatgcaatggaagtgaaacctttatcttttttctgttagcttttatgtatgtgatgtcttgtcatctttgcataattaatccatttagatcgtgtgtcagggacacctgataggaatgtactcgtggctgtagcttggaatctcatgattaatcctttctcttttgtctttggaagccattgttgttgtacgtagcttcaaaggtagtttttcagattggtgtgatgatgccatcatctggtagtatttgtcttcagagaagtgcgtatttagtttggcatgaagtcttggttgagaatcagttattcttttagtatcttgtaagcttcatcttacagctaacctggtattataatagtagcttaattaccaaaattaattgtagtaatgttatcttaattaattgaatgcggcgactgtttgaggagtgcaaaaaggtggtgccgtcgtcaattttgcgttgtgttgtcaacacaggttaattaccaactgttcctttctgtctctctgtcagacaagtaggagtactacatagcagcagtcctcattgttcagtaaaaaggtgttcctgtggacaaattaaattggagttgcttttgcttgtctagtaacctgcttcaaggttactactacattatatggagcagttagtttgatcgctgttaatcaggagggacttttgaactgtgataagcagtatagtgaagtttcagtataagtaagtgacaaaatttgggcttatttggaacacggaaattttacagaattttcatagaaaacagtttgtttcctacaaagttctcgtaaaattgttcggctccaatagagccctaaggtcatgttcttttcagcttattttactagattattaaaatagattatttgtttcacttttaaaaaatatttttcaaaaaaaactttattctattatactgcttgtatcatttctttaattttttatcacttttctacaatcaagtactagataatcatatacatgtcccccggtgcagtgaaccagggtcacacatgcagcggcagcaaggcccagcaatgcagtactagtattgcaatagcagcaaatcgcctggagattgcaaaggtttaggccgagggtgttgcattgtttgtgtacaatggcaatccagtacagtatgggcatactagtattttgcaaggttgaatgcagtaataatgtttagggtaccaaaatttgtactaggatcaggtccagacacagattgatggctggggcaagggtgacagtggacaactgtttttgtaccccgggatcgggatgtcctgtgtactgacagtaaaaaaaaacggactggtcagtgttcgtgcagcttgagctgatgcatactacttgaggagggtacataaatacggttctctacttaggagggtgtgtttagttcacgctaaaataattagaagtttggttgaaattggaacgatatgatgaaaaaggtgaaattttatgtgtaggaaagttttgatgtgatagaaaagttggaagtttgaataaaaagttgggaactaagggtgtgtttagttcacgtcaaaattgaaagtttggttaaaattggaacgatgtgatggaaaagttggaagtttgtgtgtgtagaaaagttttgatatgatagaaaagttaaaagtttgaaaaaaaaattttagaactaaactcggcctaaaccaggcctcaacattattgattgatactaggaggagtgtattcctactctgaaccttttaaaactttgtactagtagtactctctttatactaacgtatagccaactactgacttcaaattatctatagtcaatttaataaccaattgatataataattacctataaacatatactacataattaatgtttagtctcacctgtcatacacacatatcttggagtacgtgttacagctggctataaatctgtagcatactgctcttatttctcctcttttatcactttaaaatacgtttatagctggcttatagtctgctattgaacctgctctaaccatttatggaatagaattcaaaatttgtatattcagatatatagtagtattttctatagcattgattttaatgcatgaaaatctatagtacatttttagccaatcaaatgcttgagaaaaaaatacaaacaattcaaaatttgaccactaaggtaactagtaaaagggaatattttcccactaacttaattttgctaagaaaaacctagaaatacttagagtaagtttaataatatagccaacggctaacttcaaaagttcatacatatcatccataggcaatataataacccatccataaaatagttagttatagatatataaacaacatagtaccgaccggaactagcccgtgacgctccaaattaacctgtaaatcgatatcagtcccaggaaatagtgctggtatcacaggaagacagattatcacagcaacagaggtctctttattatagagtagaggtacagtcatgttgggctgcggacagatcccgagctcacaactgcattacaaaagggaaacggaagccaggacttggaccaaacaacacaggcgcgacttgggaactaggccgaaaccctaaaactcatcgtagccggcttactcctggaagaactcctcgtcagcgggatctgcttcatcttcttcagcaactgggggggaattatttatatagagcaagggtgagtacaggagtactcagcatgccatgggaaataggtgtttattgcaggcttcaaggaaaggctgttgtttttgcaattgatttcatttgaactcttttctgaaatcaactaagtgagtgcttctcaaacgacacggatgagacagtgcgtctcgtccggtcggagtatgtgcaatgtatcagtctttagatttgaatcaaggttggcacccggccaacagcttttcaaacggccacccgggccaacaactttcaaacggccacccgggcctagctgattccatcagctacagatttttcaatcatcgaacccctttccacaacagcaatttcacaagcagtagtcaagcaaaactacgctaggaatcacctcacatccgcccatgaccgtgggcacggctgttcgaacagtttgttaacctctgcagagggggtacactttacccacacgacattactaacccggatcacccaacccgtggggatcagccacgtcgggagacctccaagctttcatgacaaggcatttccaaagccgacacaggtttaccatatgccgacgagaggggtcccagaccaacaacaggttaggtcccagaccatactgtgccaggaagcccaggggtcctccccgacaccaccccggcgaatccacatgtctctcggcatcaaggctcccctgataagctagttactcagccaggggtgtcccattccacccatgtggtcgtacttgtcttatgtttggatgaaattccaaggaaacggtccttaagtgcaagagcggaaaaccgtacacccggtacgttccccggtccgcggttttggaaattcatttagttcgcaagcaccgacccaggtgtcgggttttccaagtcttttgtaaaacccaagttttacccaagaagttactcagaattttaagtttgaaggcgtccgtcgatactcgcacagggtgcacgaatatcgggacgcaactagatggttacaaggggacatggtatatcaattagcaaaggaaggatcaaatgcaacaaattaggtaggtccgccgatctgccttgcagacgggacaacagattaagtgcgatcctatcaatgcataatatttttcaagcaacataattaaatttcaaatataggctcaagatgttcaaaggtggcttgccttgctcgagatctggagcttgatcctcgaaatcctcgcactgcgggtcttcgggctccgaaactacacgcgaaacgggacaactcaacaaacggtgaaaataaagccctattaatgacctctaagcgtgccattagatagatctcgagatttgaggaattttggaagttgaacggagtcaaacggacttacggttggaaggatattgaatttctaagattattggatttttggtctaaaggaaaaggatttaattaaatcctttttagaaaagaaaagaaaagaaaagaaaagagggagggacaatagacttttctcgggcggctagggcgcggcccgagagaaatggagcggtccggccgagctaaatgggccggccggcccaaggcggcccaaggcgcgcgcgcgcgggagggaggagagagagagccggtgaaccgggctcaccacgtgtggtcccgggtgggacccgcttgtcggtgacacggttcaccgtgcggagcgagcacgcggcgcacgcgcgcgggcgggggagggacgcggtgcacgcgcacgattcgcggtggatgcggatgcggcgggcccacgcgcagcctcacggctcgcggtggaacgcgcgcacggggaggggctgaccggggtcggctcgacccggccgagctggcgcctacgtggctgccacgcgggctggcgggaggaagacgaaggcgccggccgcgaatggaccgcgggcggcggcggtttctccgggacgccttgcgacgatgaggggcgacggggcgtacaccgggatgacgagggagaataagagcgagcgagccaacggcttggattcgccggagggagtccgtcggcggcggattgcggcggcggcgcccggcggagggaaaagggggaaacggcgacgaggtcacgaggggccaattcccggcggcgagagcatctacgcggctacgggaatccgatgctagcgtcggattgggcggagctacgccgagcgaggccggcgacgagcgggtgctacggagctcgggcagcgacggcggggagcacacggcgagcgacggcaacggtcggggcggcgccggctagctacggggaggctactcatgctaccaccgaaaactaagggggggagatggaccgaggaggaagaacggagggaggcactaccgtgcgggcggggcgcagtgacgagaggccgacggcgcgggagtaatctctccggcctcgggccggggaagaggaagaagacgagcgcccggagtcccctttcgcgtcctcgaacgcaccggctctcccggcgctcggcgatgaacggcggaggcgagacagagcacgggaggcggcggcaatggcgcggacgagaaacggggaggattggggggggaaagaggaagggagggcgcctggggctttaagggcggcaatgtcggtttggaaaccgactttgggcggtcaaggcgcgagctggcgctcggcgctcacggccaaatcggcgacaggacggagggaggataacgccggcgggagaaaaaggggaaaaggagggagagaaaggggtttgcctccttgccgctttgggaaaaggaggaggggagcggggcgtcgcggcagagggaggaggggctctgcctccgtcccttggcggcttgcgcgcggagtggcggggccgaggcgatgacgacggcgatgacggcgggacggtttggagcggagcggcgacacgggcgacaggtgcgggctggcgcggcagagggtgatggcgacggtgaccaggcggtcggccaccacggcacgcgcgcgcgggatgcaacgggaggcgcggcggattgagcggcgcggctcgggcacgcgcgctggctgtggggccgagcggctgcaggcgcggcagagcagcggggccgggcggcgcagacggcgtaggcgcgacgcgggcgacgaccacgcgggcgcgcgcgcgaacgacgcgcggggagcggcagcgagggagcaaagaggagggctcggctcggcggctcacgcgcacgcgcgcgcggcgcgcgggcggagcggagggggagggggagagagagagagagagagagcgagagagatagccgggaggaaggggggagatgggccgagagaaattcggcccatcgaccctgggggagacaaaatagacttttgcggaggaatttgatttggaaggatttggattcggaattgaactcgacgatagatcggggatttgagatcttgagatggcacggacactagacaacaagcaaagaaacaaatttcgcaactagggtttttaagagataattttcccgctaggcgccacgacggaacgggcgttacagaccaacccccctaacaagaatctcgaccccgagattcagcacctaagggagcagctccgggaactcggcgcggagaagatcttctcgctcccaggttgcctcatcttcagagtggttgctccattggactttgtagaacttaatggtcttccttcgagtctgacgtactgcctcttcaagaaccttgatcggtctttccttgtaggtcagattcttttccagctcgatgttacccagggggacttgttcttctggaactcgaagacatttctttaactgggatacgtggaacacgttgtgcacatctgcgagaccttcaggtaactcaagctggtaagccacttcgccacgtctggcggttataaggtaggggccgatgtagcggggtgctaacttgccggacatcccaaacctcctcataccacggagaggtgatacccgcaggtacacatgatctcctttttcgaactcaaggtcacgcctccgattgtcagcgtaattcttttggcggttctgcgctgtctttaaacgttctcggatcagcttaacttgttcttctgctgccttgagtatgtcaggaccgaataccagcgcttcgcccacctcattccagcacaagggggtgcggcactttcttccgaacattgcctcattcggcgacatctgaatactggcctggtaactgttgttgtatgagaactcagcatacggcaaacaacgatcccaagtgccttcgaaatccagggcacacgcacgtagcatgtcttctaggatttggtttaccctttcggtctgaccatcggtctgcggatggtaggctgtactaaaatttagatcggttccgagagcttcatgcaactgtttccagaaccttgaggtgaactgagtgcctcggtctgacacgatcttcttgggacagccaaatctacatacgacatgggtcatgtagagttctgctagtttctttccatcaaagatggttttcactggcacgaaatgagccgatttcgtgagtcgatccacgattacccagatggagtcgtacccgctaggggttcttggcaaaccggtgatgaaatacattccgatttcttcccatttccactcgggaattggtaggggctgtagcagaccagctggcctctggtgctctgccttgactctttggcaaatgtcacacaaggctacgtattctgcgacatctcgcttcattccagtccaccagaagtatgccttgatatcttggtacatcttcgtacttcctggatgaatggagtaggcggactcatgagcttcctttaggatgagatctcttaattccttcttggccggtacacagatgcgtggaccgcaccaaactgtgccttgatcgtctatggagaaattggtgtctttcttctcctgtattctttttattaactcttttatcccttcgtcgtctttctgagcttcccggatttgcgactctagggtaggctgtactgtcaagctggcagggacacctgactgtaccacggtcagcctcaacttctccaattctctgcacaggcgatcttggtcaggccgtatttgagctacattgcaataggccttgcgacttagcgcatcagcgaccacattagctttaccggggtggtaatgaattccaagatcgtaatccttgattagttccaaccatcttctctgcctcatatttaatttggtctgagtgaagatatacttaagacttttgtgatcagtgtatacttcacatctgttcccgattaaatagtgcctccagatcttaagagcatgaaacacggctgccaactcgagatcatgggtgggatagttgacttcatgaggcctgagctgcctgaatgcataggccacaacctttcgttcttgcattaggacacatcctaagccttgtcttgatgcatcacagaagatctcgaaatcttttcggatatctggcaaggtgagaactggggcagtggtcaaccttttcttcatttcttgaaagctgtcttcacaggctgcagaccagtgaaacttcttttccttctttaacagctcggtcataggtctgactagcttagagaatccttcaatgaatcttcgataatatccagctaagccaaggaggctgcgaatctctaacacgttcttgggcgggttccaagcaagtacagcttcaaccttgctgggatctacatcgacaccgttggaggagatcacgtgtccaaggaatgcttctcggtctaaccagaattcgcatttcgagaatttagcgaatagttgatgatccctgagcttttccattattagcctcaggtgttcagcatgttcttcctcattcttggagtatatcaggatgtcatcgatgaacaccacgacaaactggtccagctattccataaagattttgttcattaagttcatgaagaatgctggggcattggtgagtccgaaggacatcactgtgaactcatatagaccataacgcgttgagaaagcagtcttcgggatatcttcagatctgattttcaattggtggtaacctgatcttaagtcaatctttgagaaaactcttgctcctttaagttgatcgaacaaatcgtcaatccgtggcaacgggtacttgttctttatagtcacttcattcagggctctatagtcgattatcattctctcagagccatccttcttcttaaccagaagcactggggctccccaaggggatgagctaggtcgcacataacctttactcttcaattcttcgatttgtcttttaacttctgctagctcattggctaccattcggtagggtctttttgcaattggtgcggtgcctggtgccagttctatggcgaactcaatctctcggtctggtggcatactcgttaattcttctggaaatacgtcgggatattcacagactacgggcaccgactccaaggaggtgacttgtaaacaggttaagatagaccgacttgcggtaggggtgttagaggtaaaacggacttgctttcctccaggtccttgcaaggtgatggacttttcggcacaatctatctgtcctttgtgcttagccaaccaatccatccctaggatgatgtccaagctttgcgagtctaggactatcggtttggctaggaagtcaacttcctcaattctaaggttaacttccgggcatatttgagttgcccttatattcctcccaggggaatgtactatcattggtacacgtaaattttgggttttccaaccatttcttttcacaaaagcttgtgatatgaaagaatgggaagctcctgaatcaaacagaactattgcgggtacggagttgacagagaacatacccatcacaacgtctggagcatcctgagcggtctcagcttgaatgtggttcacccggcctcgaccaaagttgttggaagcacaagtaccttgtccacttgcctgagagctaggacgagactgagctgccgctggagtaggagttctggcagtgctgccattagcatgccgtgagctggtgttggtaggattctgagggcactgtctggcatagtggcccatctggttgcaccggaaacactgaacagctgacggtccttgcggtgacttgaaagaggtaacactgtttggcgcagtattgccactaggggcacgctgctgtggctgaggtgccggacggttcatttgaggacaaggggcgtagcctggctggcggttagcctgagtgaccgactggtggtattgcatgggttgaccgtagcgagggcgaggtgcgcctcgggaggaatttccctgatggttagacttgcgtttcttgtattcttcggtagcctcttttctggcatcctcaagtagaagtgccttgttgatcatatgttgaaaagtggggaagtcgtgagcaagcaactggagtctcattccaaccgcgattcctttcaagaatttcctgatcttcttcttatctgtgtccacttcctcaggggcgtaccgagccaacttgttgaacatacttaggtactcattgacactgctgttgccttgcttaagtctgttgaattcctctttcttcatgtcaatggtgctttcaggcacatgagctgcacggaaagccgtagcaaactcatcccaagcaatgttagtgggttcagggtatgcattacagtaattctcccaccaatctgcagtaggtcctcttagctggtgagaggcgtagagcgtcttctcaaccggagtacactgcaccaagttgagttttctatcaacatctttcagccaatcgtcagcctcgacgggctcgacggtctgagagaactctggcggacgagacctcagaaaatctgtcagcttggatctattattgcccatgtgagggtggccatttccatgcgcattgtgctgataaccggctacggctgcggctaatccttgcaagatttgtatctgaactgccattaagtgctgcatgttgttttccacatgaggtggggaagggaggcgttcttctccagaattgtgactggcagtgtggtgagagcggtgagactgttccatctctgcattacgggaagctgtgcgatgcgagcggttgctgcggcggggttgctcaacttctgcgttgcgggaagcagtgcggtgcgaacggttgctgtggtgagactgctcattagctgactcatgatttgcttctgtcacaactctaccttcttcaaaaccgaagcgggctggcgcacgggctgcacggggggggggggggggggggctagccatctaaactcccagaagagggcgaggtaagaatcaggtaagcacttaggagggcaaggagcaaagtaaatagcaactcagacagcacacactaggcataaactggatttttcaaatcataaaaacacctgatacaacgggtgtggacaagtcacagagctacgccgagcttgactgtgcgcacaccacctaggagaaccagactaccaaacaacacccacaacaaacacacgcacgcactacctcgccacgactccaaaagagttggcggcggaacaaaagggcctaacacacggacggctgttgaagactgcctcctctactcctcgtcagcctggctgcctcctgtagtcggctcctcagtcgaagaaacgtcgatcggctgacgcgaagggaccggcggaacctgtcgagggccggcagcagcacaggccgctggcggtgggggagctgggtagtggaaacggaacacggtggaagaaccaacaacacgcttccgcgcggtgcggataaagcgtgggccacggcgggaggaagcaactggggtgtgtccgggggtgtaggaggggctaactgggtgtgggtagggggagtacactggtgagtacggcgcacgcgagctaggggagcgcgggccactgggagtgcgggcagagccgcgggagctgtgggaggacaggtggctggcgtgacagaggcggcctgagtcccaagagacagtgtcaactgaggtgacaccctcctcggccatatgggcctccagagcggcgtagcggcgggcaagggagcggtaagcctcaaggagtaggtcgtgctgagtggcctgagcctccgaaagctcaaccatgcgagtcagcactggctgagactcgctgtacggacaagggtacctggcgtctgcgtggccagaaggaaggcgtggaagctgccggaaggcggagcccccgagacggtggctgtagtcgtgggccaggcgacgaagcgcagtccaggagaggtcctggtacgcgatctggagagtgggcctggccacagtgaagtggtgtgggcgaaggccagctccgtgtatacctccacgggggtaaaggtacacagagagctcacagcgagggggaacacggtccacggagtaccccgtgtactcgggacacgagaagccaaggaaacgggcgaggtcacgaagctgagcgacgtggtgaccctcaccaaaaccgtgggagctgacgcttgcgttcactgccatctacaattttgaaagagggagaaaatattagtaaccattttagaaacaaactattggaaataaagaaaacaaaagaaaccttagcttttcgcaagtagttttgaacttagtatccttagggtcgtcctaaacgtcgggtttcgccctagggccaagcctgtgctctaataccatctcttgtcacgccccgaactagtaccgaccggaactagcccgtgacgctccaaattaacctgtaaattgataccagacccaggaaacagtgctggtatcataggaagacagattatcacagcaacagaggtctctttattatagagtagaggtacagtcatgttgggctgcggacagatcccgagctcacaactgcattacaaaagggaaacggaagccaggacttggaccaaacaacacaggcgcgacttgggaactaggccgaaaccctaaaactcatcgtagccggcttgctcctggaagaactcctcgtcagcgggatccgcttcatctcttcagcaactggggggggaattatttatatagagcaagggtgagtacaggagtactcagcatgccatgggaaataggtgtttattgcaggcttcaaggaaaggctgttgtttttgcaattgatttcatttgaactcttttctg

SEQ ID NO: 13767 - DNA, 5146 bp, Oryza sativa
cttgcgtaacattatccttagtttgttaatccacaaattacaattgcacttcatccaggcacctaactacataaagaatgcatcaataccacatgaagcataataaaaccatttgtgacaaggttatgttgcttacgaagtagaacattaacccatgcttaactcaaagcccatttgtccctatcagggaaaaggggcccaataaagaacccgctagaagtcttgggaacctttatatcttgtttgatgcatttaaagattgtgtaaccatatgtttggaagtacttagtagtctcttacaaaatcatataatcaggacgaatcaagtacaaacctaactactcaagtctatttccaaatattaaaactggcatgctatattgctattggttactggatgtctgatttctacaaatttattcattgacaagcgtgtgacaaacgagtgaccctgtaatggctggcccaacagcaacagatcaaattgcaaatttgcatgtcataaatctgtccaaagcagaaaaaatgacatctcagctagagatgccaacaggcaacagcatccgttatgtttattaaaatcagaaatcccaactttggttcttaagaaaagtttgttccccaagtctaattcgcaaacacctaaactatcaccaaatcatgatgtttctagtacagaagtgcagatgaatagccaaacagaattcagaatttcttttctcaaaactgaattcaaaatttcttagatatggatcccattcagacagaatttaactattgaggtgaacctgatcaccggagtgcaatgacatcgaaccagggcattcaaacttgtgcctccagagtcaactcttggagatccatcttgcaaccaccggtcatcagacaatcaaagcatcaatagtgatcacttggtctaccagccaccatcaaaaagcatggtttggatcactgaagtctgaaacacaaaccaatggagagaaatctcatcaataaacatcacattgcatattactaatgggattccttaataatgtaatgttgtaaactgagcaacaggcagtaactacaatcgtcctagggaagtaaaagtaaaactttaaaacgttgcaattaccaaaatgtgagcaatgcacaggatccgattttccactgtaatatacaatgtctataacttaatgaacacttcaaaacaaagataccaaggaacacaaaatccaacaaggcattgagtacgattccagaaaccaagagaaaaataatatatgcttgctgcaaagcacggtaatatcaaagtttttttttttagcaaacgtaaaaagtacaaaccctatcctacccttttctaagacaaatctttgcatcaaacgaacacatcaaagatcaaaatgtggctagtaaatactcctaaaacttcaaaaccaaatctggcagcacctaaaaccctacaaaaatgcatgccaaagcagaagattttacccaactccgaggcctcaaaacgagccaagaaatcaaaatcacttcgcataacgcaaaaacaaaagagagagagaacaattaagaaaccaccaaaaacgaagagagcaccgcgcgtaaactggattgcagcgcaaatcaaaatctcccccctttcaatctttggaaaaactgcacccgcaatcaaatctcatcaaaatcaagtctacgacgggtggagtgcgcaagatacagagcaaaaaacctacaggaaagggaacaaagaagagagattcagaaaatcggcgcaggtgaaggggaaacagggagcaattaatacctctgagaacccccgaattaaacccgtcgcctggagaacagcaaaaccaccacaagaaccatgtgaacaccagaccaaagttcagtttttttttgtctttactgctactactattctatctctttccctttctcctagtagtttatttgggataaagatcagagggaagaacagccgcagattcacattgctcacctcgcccacaaaatcaatcacagatcgaagcgaacacacgcggagaaggatgagagagaagcaagcacaggaggtaaaaaagcaggaggttactgtaccagagcagcagcatcaccatgaatgacaccatgcccaagaaaggaggaggagggaaaaaggccactgcttttgacgagatgagagcctcgagtgcgtagaaatcgcagcaagaatccaaaaaccgcctccttttttgcttccttttttctctcttctcttcttcttcttcttcgcggttcgcctcctctctttcccgcccaggcagctcaaaccaggactcactttcagctgctggtgttcttgcctcccctcctctcctctcctcttctactgctcttcaatgtgtcattattgtagtactagtactacctgtgctgctaccactttcatctcaagaagaaaagggagaagggagaagaaaaaaaaatgttgttaccgcagctgttacttgtatactgataaatacttcctgtctttgaccgggcagagagtactgccacggtctgctgctactgtgtaagggtattcctaactcaataactagatggtgtccatagtattaaataagttgttatctatgataaaaaataatgtggcaagtgaataaataagaaaaaaagaagaaaatcatgtgttgcatctacacaacatccaagacattatgtgagataagtaacattaaattaaagtaggaatagtggtgtttgcattggaagagtaatgtctagtactagtttttttgatgatgtggagttcatagaaaccatgtctagtgttatgggttgggactgccctaacgtactactacttaattccactaaacaaccaccattacttatgctaatctatacttgctggatttggatgggattttgcattccataagcataatgatgctaatcactgcctcagctcagctcagatggtggatctctgtattactgcaggtttgtagagcatgggtagagtaggggcctgtttagattcatttggaatggcaaaagttttggtggcaaaaattttggcattgcaaaagtactggttggtgtttagatgcatgttaaagttttgtcattctagtactaaagtgagagagaaaaagagagagggagtggtctcaaagcattttttggtacaatttgctagcaaataccaaatgccaaattgccaacttttactactaatgtttagatctaaaatggcaaaaagtgctataaaataacaaaacttttgctattttagaggatctaaacagggtctagatttgtttagtgaacacaggctgcgttgcacctggggtcctggggaggctctggcctctgggcgtttcggatttaattttctttgtttcttccgatacggtggggcccacctgcagcgcgtcgggaccgaggagatcccatcgtctcgtattcggaagtattcgtatggatcggagtaccctggagcttgcacacacaggtttgaaaatgtattacgtcctccatcgaaatatagaagtagtactccatcaatctaatatggaacttaacacattattttactatattaaggccgagtttagttccaaagtttttttttaaactttcaacttttccatcacatcaaaactttcctacacacacaaacttccaacttttctgtcacatcattccaatttcaataaaacttctaatttaaacgtgaactaaccacaccctaaatccggtactagatcgttatgctatgagacaaaggcaatactagtatggtttggaaataaaatgaaaattttcaaaaaggtcaaattttggccctctagctctaaactctcactccagtgggagcgggctcctatgagagttggggacaagctaaaaagtgtttgtctagcattcagctctagatctaaatagaaaaaaaaaagggaaaaaaagcaatccccaatctgaagccctaggttgccgtctccgtgtgtgctaccggctgtcggccgcgcgccatcgcccgccactggacacctcccatgcgccatccccacgtgcgccgtcggtcaccgcccgcatgccgtccccccaccaaccgtgcgccgcccgtggcctaccgcgcaccccaagccgtcgactatgccgcctgtgcgcctggccgggtgggagaggtgaggattatgggagggaaagagaggtgagaggtggggtagttcggtggcatttttatgtaaatatgttgaaaaattaaatggtagtgggtcttttagattggagtggaactgtgccgcagcaaaaatttagctccacccccgtattttattttttatgagtagcttagctaactccacttccaaaaacggaggatctgaactgtttggcacagctccggctccgggtaaattagagttaggaactagagctatgccaaaggggcctttctttgggacacatgaagtatatgcagtttttataaaatatattattccatttcaaaatataagagcacgggtccaataaattactcgtctatcctaaaaacccaatcttagaggatacacgctcatctacatgtgcgatttgaaccctggtgggtggagttaggcaccaaggactccaccatacttccggtgcttccccattttttttatagagggattatgtgtgagagagaaatgggacatatattaatgatgacgtgttgtgtagcgcccgttccgtcgtggcgcctagcgggaaaattatctcttaaaaaccctagttgcgaaatttgtttctttgcttgttgtctagtgtccgtgccatctcaagatctcaaatccccgatctatcgtcgagttcaattccgaatccaaatccttccaaatcaaattcctccgcaaaagtctattttgtctcccccagggtcgatgggccgaatttcctcccggctatctctctcgctctctctctctctccccctccccctccgctccgcccgcgcgccgcgcgcgcgtgcgcgtgagccgccgagccgagccctcctcttcgctccctcgctgccgctccccgcgcgtcgttcgcgcgcgcgcccgcgtggtcgtcgcccgcgtcgcgcctacgccgtctgcgccgcccggccccgctgctctgccgcgcctgcagccgctcg

SEQ ID NO: 13768 - DNA, 1389 bp, Oryza sativa
ccgccggaaaaattggagggggggaaaggtggccggttcgactgggctcccacacgccacgattgatgaataccccacgtgggagttttttcacatcgatctcttgatgacgtgtcaatgtcaggtgggtcccacacatgcacttgatgggaactaataaccagatggaaaaagtccactttgaccgaatctaatagccgaatctaattcgtacccctcaactaaaaaaggggataggacgactcctcgaactattgaaaaatcagtgtaatttaactcctccaagacagttaagtacaaattgcggagattcgcacccgatcggaaacaggccatacgagaagaactcgacaaacttctcaaagctggtttcatcagagaagtcatcaatccagagtggctcaccactccagtaatggtacgcaaagccaacagaaagtggaagttgtgtgtcaacttcaccgacctcaacaagacgtgtcccaaggactacttcattctttccttgaatagaccaatcggtagattcaaaagccagttgtgagctcttaagttttcctaatgcttactccggctaccaccagatcagcatggcaaaggaggacgaggagaaaacagcgttcatcacaccctttagtgtgttctgttatatgaagatgccgtttggattaataagtgcaggcaacacataccagcgcgggatccaaggagcacttggcgatcagcttggacgaaacgtcgaagcatatgtggacgacatcatcgtcaagatcaagacaggcgaataactgatcgatgacctaagggaaacgttcgacaacctctgaaaaaaaaagatattcgaagtcatactttagtatgatttatcactcacctgtagtcattgttaagaaccttcggttttcttagaaagcggaagaaactaatattctgatgtgctcagattcatatgtgacgggtgattagagaaggttctagttttagcaggattgagatcaaatgcagtagctactaggactgcacggtaactactgcacacaatctgagccctctatgtcaaaatctaacggccaaaacggatttggcacagtaaaatcagaacagtacctttccatcactacagtgttttgctacagtgctcggatatatctgggacgtccattttaaatcatgcgatgctagtttgactgcttattttgcagtcccactggctactgcacctgaatcggatccgttttagcatgcaatatgtaaaagtgaaaagaaaatgaaatagtgctttgttttataagctctttattggttggtagatatgctgcttaaataaaattgttacggtggtaatatactacctccgtcccaaaataagtgcagttttgcactattcac

SEQ ID NO: 13769 - DNA, 685 bp, Oryza sativa
acacaaaagacgggaatctttcgggttaccttccgggccctcctttaaggtcttccctggcgaaaaacctttcaaaaaggacccttattttttaggggattcctttaacaagaacctcaaaatgcctggttggaagttggggatttttggaccccaaataggatgaagtcccttccttgcgtgtcaaggaggacagcatcctatcaagaaatgagtcaccgtggaaacaaggagtaaggagatcaagtgtacgatctacgatcagcaggccagcagatctcttattacgaccaacatcatatagacttgacatatccatcatcagcttcccgatgacctttgatgtatctccaagtgaaaatatatcgagctttaggtccatctacacatgttttgtaatacggatcactaagtggttatatgaatgaaaaataagaagccactagtaagaaatatgttcttatgataaatctttaccttactggccagatggtaaaggaactgggcagtcaatgtcactccggggggaatctcatcaccatcaaaagatctaccagtagatatgggaggtagccctggactaagggaatcttcatgatgagtagataaacatgattcacccattgtgccttcagatggcaaaacaaaaggcctagaggaaaataggagagaaaatcatcggaaa

SEQ ID NO: 13770 - DNA, 592 bp, Oryza sativa
agttcgttcctcaagctcatgcccacaacattttttgttttcctaaacattgttgccattgtcttgaggccattcaaccattcttctgggtcaaagtacttgtcaccaaagaagccattaccatcagttgtgctgcagcaccatcctggagtggtcatttggttatcaagtatgaccataatattgttcctggccaaagctgacactacttcctacagttgttcaatgttaaccatgtcagatggaataaaaaaccagagtttttatcatgtattaaaactgtttactttagtttcctttcatatttagtacatataaactctctatatactcgtgactctatgagcatctgttttcacagattactgggtcaactaactggataactcattgcaaaaagagagataactatagatacttgatttggattagataaaaagtagtacacctaatgcaaccagttgccgtctatcttaatcattagaatagatccgtagaaagaaagatctgttctagctagagtattgtggcttgcaagataccctcttggaccattaatttggtaactagtaggtaatctgtacacgttcaa

SEQ ID NO: 13771 - DNA, 742 bp, Oryza sativa
tctttggacttccatcttctacttagaataagcctgttaatcatgtaacccttttctagtcatttatagttctatgttattttgtttttcacaagtcctgttgaaattcatcacaaatgccagatccctgcaaacctggactggtttgggtggtgcacttgggatgctttttataaatctgtcaacccagtgggaattgaagagggccttaaaaggtacaaatgaatcgatcttacttatgtgatattcgaaaacaattgaaaggtcttttttattacccgcatcctccatttgtcaattcctgataaagcatttcttgttgtatagtttgtgtgaaggaggtgcaccaccaaggtttctaattatagacgatggctggcaagaaaccgttaacggattcaaggaagtggatgaggcctttattgaacagactgtgttagcgtctaaccatttttcaacttgctgatcggtccatgaagtatattaaattcctgtttaacaaagaaaatttactccaggaaatggacgtttgagtatttgatttcatattaaataaacaccaatacattttgaaatctctccttatctgtttgtgaaagagaatctagatccaccaacatagactgtatactttttctttattgtgagatttcctatccaatttccttttttttttcccctgaaactgtaaatcactgtcataacctcatattatatctatacacataaaaagtgggggatc

SEQ ID NO: 13772 - DNA, 558 bp, Oryza sativa
ggactcagggcgatgcttcagctctgaagccaacacttatgactgcagtacctgctatacttgatcgtgttcgtgatggtgttagaaaaaatgtattgttctttacaatgatattatccattgtttctttctggccttcttgccatcttgaccatttgtttttttcatgatgagatgaattaggttgatgcaaagggtggtgcagcaaagaaactatttgatattgcctatagccgtcggttagctgctatcaatggaagttggtttggtgcatggggattagagaagtatttgtgggatatgcttgtctttcagaaggtgcgtgcgatcttgggaggaaggattcgatttatactttcaggtggagcacctctgtctggagatactcagagatttatcaatatatgccttgggtgagatagtactcttcattattttataagccattctcaagtctcttttgttaatatcaagttattgtttttggtccacttgtgtttactgttgattgaacttcacaatattcaaatctaacttgcatactgcattttaaaccaa

SEQ ID NO: 13773 - DNA, 560 bp, Oryza sativa
ggagggaggaggtcgtagccctcgccgccgctgattctgtgccggtgagggttgtggccgtcattaggcggtttccggtcgccggaggcgaccgcctcgccatcgtgtccaacatgaggatggcaagccttgtggtgcgcctccatgacaagctcttcgtcctgccccccgacggctcaactgtcaccattgccttctccgagcgatggttccgtgtcccctccaattggacggaggagaagttgtatgctagggtcggccatgatttcatcaacattacggccgcattggaggatctggccaggactctctaccagatgtatgaacaagaggagcaaaaaaagatggtgcttcaggagaaacaagagcaggagaagaggaagcaagaagagctgaacagggaaagggaggagctggagatgatgcctcttgcctgcatccctctaggccatggggagatgcagtgggaatcgccttgtgaagcgatgcaccgaaggttcaaactatcaatgggcactgatggggaagttcgctgcaactttgtggagcagtaatgtcct

SEQ ID NO: 13774 - DNA, 1187 bp, Oryza sativa
  unsure (1)..(1187): unsure at all n locations
atttttcacctccactgaacacatgctaaataagggtggcaatcaaatttgctgagggttggcggcctaacaggacggctgtatggcccgtcactggctggaaagaagcagctgattctagcttctcccatgttaacctcctctttgattccagtgaagctgcccgttttncgtcctccttgtacttgaccaggcacgccgaaaagagcacgtcatccatctcagaaaacatcttctttacattatctgtgagattcaggacagcttggttccaatgattctggctattatgttccaatgctggaacaatgataggcatgatcatttggcggttttgtgcaatcaagctaataacgttatcgttgttccatatgaaaagcgcccgttcagcaacctgaaaaaacccatctcgttgaggcaattacttggataaaaagcattagtctgtcatggcagacaaatgtcttcaattcttaatgctggtccaaatatctcacatttgtgatattaacagtacagagcaaccccatgcccaaagcatgattagttgataacataatggcccactattgttgtccacatttatttcggaccatcagacatctattatctcatccatttggcaagtcaacaggtaatgctttcataccttacataaatgatgcaaccaaaaaaaccctatataccatgtgagctttacgatcatgatccatttcaactgagtgatgtttacataaaattttaccacctatataataaaatgtctaggtgaagcggtagagttagcgactagtatagtaattcatcagcgtggcaattgatcaatcaaacagggccacaactactttcatatgtagtactccgatatattatttttaccacctatatattatttttcttaggtgagggaaatgcatagtggcaaaaacagaaaataaacatcgataggttatatttatttgggcaagttacctggaagtgagagctcttgatgcattgagcaatccgcctaaacaaaggtaccatacatttctggaattccgccgtgctgattgtctccaagatctcttcaatctcactcagaaacatcacctccttctgactatttgttattggccaatatcttagcaaaccaataattactgagctagcaagcttgggatccttttctatgaactgtgtcacac

SEQ ID NO: 13775 - DNA, 632 bp, Oryza sativa
ttttagttcgactttcgaacttataatagttcaaaataatcatctgctgtcatcatctactcaataaaaaccgaaatcctctgtcaccatcaaaacatagcaaaaatcaaatgccattaaaaagtgccaaatgacagttgacagcccaaaataaaaaagaagaaaaaaaaaggaacactattatattccagatttccagctgcaatatcaagctaccaaatggatccccaaaaaaattgcaatccattccatgaactgagcccaccatgcaccacacaacccccgctcctccacgcttctcgggctcccgtagaccgggtccacccgccaatccccccacacgtcgatatctccagcacccaccgcacccactctcctcctcactccgctcccctcctctcctcctcccttctcgcggaggccgccgcaaccaaaaaaaaaaaagtctaaccctagatccaggccccgcgtctccggcgatctcccggccatggcgactcgccgggccctctcctccctcgtccgcgccgcctccaggctccggggggcctcgcccgccccgcgcccgcgcgggcccgtccaccgaccgtcgccatcggggtacctctttaaccgcgccgccgcgtacgcca

SEQ ID NO: 13776 - DNA, 1817 bp, Oryza sativa
  unsure (1)..(1817): unsure at all n locations
gtcccatcgggggtttggtcaatgcaactcgatctgaatgggctggaagaaccggcccaaaccatcccatctcaattggaaaaagtacaccgaaggtccctcaacttgtcatcgggataaaatacgtcctcgaaccgcaaaaccagatatgcgaggtcccttaactatacaaaaccggtcacccaaggtccttcggtggttttaacaccgattttggtctatgtggaggctcgaaccgcaaaccagatatgcgaggtcccttaactatacaaaaccggtcacctaaggtccttcggtggttttaacaccgatcttggtctatgtggcggctgagtcagcgtgggacccacatgtcagcgtgccacgtcaaatttcccctttcttttttctctcttttttttagttctctttgctgcggggagtagcaacgggcggcgcccagcgtgctgagcggcggccggcggggncggcgtgcgagcgcgcggcggccgggaggcggagcatggcgcagaagaggcgacgccgcggacgaacgcgttgccgacgatggtgtcggcgcacgacgcgaggccgagctcggagatgacggcctcggcggtggcggcctcggcggtggcgggcgcggaggtcgggagcggagcatggcgcagaagaggagcgtctcgcagacggtgaggtgggggtggagcacgtcgtcctgcgccacgaaccccgcgcgccgctgcacggcacggcacggcgcgcgcccgcctgccagcaccatcccggcgtgccggccggcgagccgcccgccgaggatggagaccagcgtcgacttgcctctccccgatggtcccagtacagccagcacctcccacggcctcaccttgtcggttatccccttcagtatcgtcctctcctcctgcgcgccaccaccaccgcctcctgccccggcgtgcgatatcctccccagcggcgcccccctttgccgccgccgccgtcgtggtcgcccgctccaccttgacgccacgtcgatgaactgagcacatcaagcatccaaccaaagatcaaaatcacctcaaccacacagagcagcatctatctatatcatcgatgtgtacctagagattaagtggcgtgcaaacggaggacaagaaacagtccatcttggacggagggcgaagcggggcgacggcgggcggagcagcgacgcgcgcgaagccggcggggcggcaacgggcggagtggggcaatggcgcatgcgggcgaagaggggcgacggcgggcggagtgccgacgcgtccgaactccgaaactggcggggcgacggcgcatgcgggcggagatcggcgcggggcgtacagcgatcgacggcggcctgggggccccgacttgctgatgctgttgaagacgaacaggagggcgtatacaacttgctgctgcttgtggtgatggacgacgacagcgggagcttgctgaaagccaagcctaagatttgtgtaaactcactatctctctctcacacgaattcactgatctcggaagaacgatgaacacgaacagagtttttggtgccgcttactcgctgtgacttttctgatgctcatatatatagccaatttgtacagactcaaattaacaccactacgccatcattcacgatgacgcgaccacgacgctgaaacccggatgactcgcacacgacgcacgacccggaagactcggcttacatgagaaaaaaaacagagaaacagactctgacgaaactgaagaaacgacaacgctagacgcgttacagtaaccgataatatggcacaggattatagctgaagctaaca

SEQ ID NO: 13777 - DNA, 719 bp, Oryza sativa
ctccggggaacgacgcgaagcaatttttcgaacaaccttctcttcagacagatcatctccaaggagacgaagatcgctgacaacaccctggagacgaaggctgaaatcctccaggtgttcgccattcttgaatcgcatggactcaaaagtttggcgcagcttctatgctcgggactccttaacacgatctgcgcccactcgcatggatttgagcgcgtcccaggcgtctttggcactgtccttctcggcgagcggccggacaatctcagccggcaccgctcgcaagatggccgaaagtgcctggcgatcctcctgatacgggacatcgccggtgtcgacagcatcccatagaccttgagcctggagattgactcgcatcaacaccgcccaatcagagtaatttgagcgtgtgagcgttggataggagaccgagccgccttccttaacgatccgctgcacgacgagctgtcgcctgcgtggccgtggaggagacggcgagagccgatggcctgttcgccggggagtacgagacgtgccgccggtgggagcggacatggctttgataccaaatgaaagccaagcccaagatttgtgtaaactcactatctctctctcacgcgaattcactggtctcggaagaacgatgaacacgaacagagtttttggtgccgcttactcgctgtgacttttctgatgctcatatatatagccaatttgta

SEQ ID NO: 13778 - DNA, 628 bp, Oryza sativa
ggcataataggccagccgtgtaggcggaggcaccactcggcggcgacggaggcaggccggcggtgaagtcgtagacgcccaacagcggcggcataataggccagccgtgtaggcggaggcaccaatcggcggcgacggaggctggccggcggtgaagatgacgatgcccatcaacggtggtgtgaccaaccgaccgtataggcggggacaccagtcggcggcgacggaggcaggccggcggtgaagatgacgatgcccatcaacggtggtgtgaccaaccgaccgtataggcggggacaccactcggcggcgacggaggcaggccggcggtgtagatgacgatgcccatcaacggtggtgtgaccaaccgaccgtataggcggggacaccagtcggcggcgacggaggcaggccggcggtgtagatgacgatgcccatcaacggtggtgtgaccaaccgaccgtataggcgaggacaccagtcggcggcgacggaggcaggccggcggtgaaaacgatatcgccatcagcaacggcagcggcgcacaccaaccgtggaggcgatgaaaccaatcggcagcgacgaaggcggccggcggtacatgtataaaataatagatcaaataata

SEQ ID NO: 13779 - DNA, 983 bp, Oryza sativa
agggggtgccggttttgtcccagggccattgcggcccgctcgaaaagcctaacggtgcgacccccccggcctggcggcgcttctggccttttccaatggcgtgacccgaaggcccccgggatgttcgggtgggccccggcaccccgccttctgctcgtggacgggggtttcctgtgttctcgggagggtggtggcgctggatctctccaaccggagcctctcccggacctcgcttcgcggcggcgagacggtggccgggtcggcccggcttccgagcctgaggcgcctcgacctcagcgcgaacggcctccccggcgcgttcccggcggcgggcttcccggcgatcgaggtggtgaacgtctcctccaacgggttccccggcccgcaccccggcgttccccggcgcgccgaacctggcggtttttgatatcaccggcaacgccttctccgaaggcatcaacgtcaccgcgctctgagcttcgccggtcaaggtcctgcggttctcggcgaatgccttctctggtaatgtcccggccggctttggtcagtgcaagctgctcaacgacctcttccttgatggcaatggccttactgggagcctccccaaagatctgtacatcatgccagcgctaagaaaactaagtttacagtagaataagctctccggcagcttagatgacgcacctcggtaacctcactgagattacgcagattgacttgtcatataacatgttcaatggcaatatccctgatgtgtttggcaaattgagcagcttgcagtccttaaacttggcttccaaccaattgaatggcacattgcctctatccctgtcgacctgcccgatgcttagagtggtcagcgtgaggaacaactcgctgtccggtgagattaccattgactgaagattgctcacaaggctgagcatcttcaaggctagagctgtctcctgggtgggagtgataccccctcgccattccacgca

SEQ ID NO: 13780 - DNA, 626 bp, Oryza sativa
tctttgtcttcagcacatcattttacaccttggtccttgaagccatcctgcgcacgcacgaccactctacgatgccccttgtgcgtcctgtggctcggctacctcgtcatcagcaccaccgacttcagctacatcgaccgcagctactctatgcatggcttcatcgaccatggctacgttttacccttcactttagctacatcgattacaacacaaaaggctatcatctgtgttgagcactctcctaggatttttctctaatataagcgtctgtgttgctcacgcttgtattgtgggggatgttagagtatatggtagtaaaatatatcttatgatagaattgatttgaatagactcgtttccttatatacctcctctaccctgaggtttaatataacgtgtctaatatttatatattcttctcacccgacactattcaacacgttggactaacaaaatagtataacaagacaaaaataagggaacgaatgaatgctttgcttgtttcttcaaaatgttcctttgctgcttgatctacagatcaattttgcaagtcgggtgccgatctagatcattgaggaatttataacaacgaaccaaaatcaatcgatgcgatttagctagct

SEQ ID NO: 13781 - DNA, 859 bp, Oryza sativa
aacacgtttatttcgtgatgttggtcttgggttttgttttggaggagtagaacataagggcccctttgaatcgtaggaatgaaaaaacataggaataggaaaaacacaggattctgacaggaatacaattgtaaaacagaggagtgcaaaacacaggaaaaacacaggaatggctgtttgattggaccacaggaaaaacgcaggaatcagatgagagagatagactcagaggaaatgttccaagaggttagacctcttgctaactttcctccaaaatgtgcataggattacccattccataggaattttaaaggattggataggattcaatcctttgtctcaaaggccttcataggattttttttccataggattgaaatcctccaaaattcctatatttttcctacaaatcaaaggggccctaagcttgtagattttgcatgtgctaattcttgcttaattcttgctaattcttgaaatcctccaaaaggaggtagtttgatcacaaaacgtgccgtgccatcctggcaaaaataaaaagactcgaatattataaaaggaactaatatcaaataattaaaagaggtaaggctttgaacccagatcatctagcccatcatcctgtggagttagctggaagactcctagacatttttcaccatcctcacaaaaataaatcatgcaggactaataattaatcaatctgccagttgttctcgaaaaaaaaatcaatctggcagctggtcatattttttctatgccttctataagaaaattaaaaaaaagtgtttattttcttaaaaaaaaaattttggcctacaaaaaaaaatgcttgcatggaacacccttgaaaatttcg

SEQ ID NO: 13782 - DNA, 7754 bp, Oryza sativa
aataaagggagtagctatgtaggtgacatgtatacacctagatacgattgcacctagctataaaaaatactttcccgtggcagttccacaggaccagggcatcaggttcctgttgccatgcacattttagcacgatttcagcaaatttcatgcagcacgttggctgtagcacattcattcctgaacacaggatatggtgcgtctgtcgaggcagataacagaatattcaagatgagaaaattttgtggatggaaccacttggctccaagtctatggtgtgaaccgccctgaacattccggttcaaacaaaacaacggtagcgtcccgagaactgacaccgcgaacagctagccatagtttcatcccagattttaattgggctgtttgttattccaagggaaaaagatagagcaataaaggatcggtcggcttatttccgtgcggctgcaagcctcctcgtcctttttggagtcaaaggcttgtataagcagaggctcatcaggatggttggcttgataagtctggcgtacacaggttgtttctggcaagagcccaagagcagatcggaaccgacttaacagaacagcttttctgcaagaagaacgaactgatgaaaagatcaagggaaagaggggaggcgccaatgcgccatgccttggacgtcacactgcacgcaccggcaaaaaaaaaaaaaagatttagttgtgtttgcgaaattaacagatagtggatcgaacagcgtttgatgttcaaaaaacagtgccgatggagacgcggggaatcgaaccccgtgcctctcgcatgcgaagcgagcgctctaccatatgagctacgtccccaacgatggtaatgtgtaacaaccagtgtatgatactttaatccatgcaatttgttgtttagaaagtgggatcgcggtagaagaatttggacagtcagatattttccgtatcttaaaacgccaacagcatctctaaggcaccacaattgacaagaacatctctgaactaattttttagactaagggtcccctttgaatcgcatgaatgagaaagtataggaataggaaaaacgcaggattttaataggaatgtaagtgtaaacagaggattgcaaaacacaggaatggtcgtttgattggaccgcagaaaaaacgcaggaattagaggagagataaagactcagaggaaagtttccaagaggttttaccccatgttagaattcctccaaaacttgcatggcattagacaatccataggaatttcataggattccataagatttattcctttgattcaaacggctatataggaaaaattcctataggaatgaaaacctctaaaatttatatgaatttccttcgaatcaaaaggggcctaaaattactactccaactacgccaactgcctctgtgtattgtcgaactccactcaaccctacagtttggatggcttggggaagatgtccggcgtgaacttttgcgccgcgcttatactccccttgatcttcaatttacccctgcaacaacgcacgaacacgatatcatcacgacaactcataattccttttttcctaagcaatctctgaatcaaatcaagattgaatcaaacagttctttccaatctcacattatgaacgccatctgagggttcagcttgccgctggagatggccaggaaatcgtcgtccgtgaaggagaaggtcgcgtctggcttcccttcgtacggccctgacagaaaaaggcagagcttattcagtacgacgacgcgacagacaaagacaagagtcgacggagatcgatcgccgggaaagctctacctttggagacgacgcccttcttgagatcgacgacgaatacctcctcgtcgaaagcgagcttctgagagaaaatccacaagtgcaacgccgcacgtacttagttaatctcacggaaattcatggtgttctagtcgattgaccgagatggttatattaccttgggagagatgttgagctggtaaacgaagccgatcttttcgacgagctccttgccggcgccggaggcgaggtggacgcgcaactgctccagtagcgcagccgacttgaggttgctcccttccatcgcgtcgcgcgattcttggttcagattttggaagtttgattgaaggtgagagacggagttgtgttctttgggctttgatctggaaggctttttatgtataaactccatccaccttgcagacttggggacacagaactcggttccggaggccttgtcatgttgttagtagttgcattgaactcttaattaactttcactttcatgcaagattggaacagttcaggtaaggtactattgtgaaatcagatttaggaacagcgatgaacagttgcagaatctgttcttctttatttatcaaccatcctctgtaagactgtaacgtgaatgaacacaactttgtgggctacaagatcaaaccaaaacgtgatagtacaagcgtgccattggcgaaggcattgtcgtctacgttacaaggacggggagagatcaccggagcaagcaaaccacccccagtctgtgctcctactcctcgttctcctccctctccctccgcacggccccgaaccgctcgaccaggatgtcggcgacgatcggcgccagctcgtcgcacggcacggacttcttgtacacgccggcgaggtgagagtcgctgccgacgcggccgccgacgaagatgtcggccgcctcgacgatcttgccggcgctgtccttggtgaggcagcccatgaatccgatgtcggcgacctgcacctggccgcagctgtttggacagccggtccagtgcatccgcaccgcccggggcaccgacacgagcttctccacctgcgacgtcaccagcagcgcccgctgcttcgtctcgatgatggcctggccgcagaactggttgccggtgcacgcgacgaggcccttgagcagcagcgacggctgcggggagaacttctgaagcagcggctcggcgagcagcgcctccaccttctcatccttgacgttcgggatcacgatgttctgctccacggtgaggcggagctcgccggagccgtactcgtcggcgaggcgcgcgagctcgaacatgtccgccgcctgcacccgtcccacgggcacgtgcaggccgacgtaggacagcccttcctgcttctgcgggtgcacgccgaggtagtccctcctctgccatttcttgtcgatgaggtccttcggcgccgcgcgctccagcacgccgttcggcatcctcttctccacctccgaccagaaaacctccatcccctgcaattgccaacgccgcaattaattgataagaacattggaacatacgtaattcagacaatggcgtggaaaaaatggctcacaagttcgtcgatgagccacatcatgcgggtcttctggcggttgcccctggtgccgaggtcgcagtacgcctcgagaacggccttgcacaccgggatgatgtcgtcgccggggacccaggcgtcgagcggcagcgcctcctcccacctcttggggctgatgaacccgccgacgaggaggttgaacccgaacttgccgtccttcaccgccggcatgtacgcgagatcgttgatgtgcgggtgctcgtacagatcgtgcgacccgatcacgcacacgttccacttcctcggcctgccaacaacacgcagcaacaacaagtcaacaaacatgtcagagatcgacgacacgaacagcacgagcatatcaagttgattcgattactgacaggttggtgatggtggggttgccctggaagttgctggtgatgtaggagaggaggttggtgtaggatcgggtgtcgacgatctcgtcggggtcgatgccggcgagcgggttgccgacggggttgcggacgttgtccatgccgctctgaaggctggtgaggccgacggcgttgagcccgtcgaggatggccggcacgtcggggagcgtgacgccgcgaatctgccagttctggcgggttgtcacgtcggcgcagccatccttgccgtacgcctcgatcacgctcgccaggtacctcgtctgctcgctcgtcgtcacgccgtttggcagcttcagccgcatcatgaaccgcccatctgcacagcgtagagccgtagagcggccgttagcattttgggccaaattcactctgggcccccaaaacactagtatatgtttagcaaagagtctaattaaaggaccacgagcccacggctccagttgggccaggtgacggaagagaattttagccgtgagagtcagtatattccatttcattggtgtggctaagatagttgatcttttgcttttctagtttgttttaagaacatatatatatatatatatatatatatatatatatatatatatatatatatatatatatatagctatatgccattaaaaaactatatagtatataccgcaccaaccaaccaatgacagccaccaagtgagccttttcaacctagtaataaaatgtaaacagaacatagaacaaaatggatatgtaagcttatgtacatcctgcagatgaagtagaattgtaagggaccaaaatgactttcgtttttctttttggttcaatcagtacaaaggccacacatcagatgctggcgccaaataaagtactcatactattacttatcaaacggttgtgcgaacattatgttacttgttagagcctgggactgtggctatatgtggcacatggagatgaagtgattggatcaaaggtttccatgtttgctcaatataaatagtcattactcacgagatcgtaattaagctataaaaatcacagcaacttaatcagtcttaattatgttgctgaatgtgcatcttgaaaaaacaaatcagcagaatatcttggcgaattaattgaggtaattcttcctcggcgcgacagatcaactaaccgatcgaaagcaagaaaatgtgttgaacagaggagcaaaagagaggcatacactgatgcttgtggcagtggaagaggccgagccacttgagacgcacgtcgatgtcctccttggagagcttgtcggcctcgatctcctccatgggcatcttggcgagctccttgatgccgccctccatgaacaacgatatgggctccttccccagcttcaccttctcctacgggttcagccctgcccggtacttctccttgagcacctagtaccgcccctctcgctgctccacccgcggctccagccgctccgccgacacggcatcgtccgcgaccggtgtcgaggaggacggcgcggacacggtcaacgactgcacggggcgggtgcggacggcgggagggcggcggcgggatgctgccacgtgtgaggacggggggagaaagcgctgtagggaggcggaagaggccatggctggagacggtggtggtggtggtgcgctgttgcgatgagggtggccatgggtgcggcgcgtgtggttgtttattgcagaggagggagggggcacgagggcgctgttgttggctcttggcgagttcaaaagggcagatgctgcgagagatggcagccacgggaggaaaatttacaaacatgcccgtggcccggcgggtactgttcgtttggttgtgctggtacggaataggagctcgggtagacattaacatcattttgtcttgtgttgctatcaaatggtttttttttcccggtgtttttcatttttggaaagcaatggtggatccataaatttttcaaagcttggacaaaaaaacctatggcaaacggttaccgatatcagcaatatggaatatcgacgttttattatacgtcggtaagcctaggcagctaatagagctgtcggatagttaatgttgttatttgtaaagatttgtatcctgacatagtgtacattatgtatcgtagcttttgttagttgatttctcgtctaacaaaccgagagaccaagtcgtaaagggcgtggtccgccccatgcctaaatcacacactttctaaactgtacgccatgattggtgatacattggtgatactttttaggttttgtttggcaaatagagtagggaaataatcccattctccaaagagtaatattgtatcctaaccatccattcttcaccctcatttaatcctaaccattcatacatttcccttttccaaaccccctccctcctctcattatccatttgccaatgtacattagtcccccatattacaccagcttagtagtatctatctatctatctatctattatatactaaaagtccattaaacttcctaaaatcactctcaagttaacatgtggcatcctaaaaacactctcaagctgccacgtggtgcgaccagaggagataaaggacccacgggtgcaatccatgtatttgcgttgttggactccaaaattcagcaaaaatcctaaaaatttaaggaaaaaatccacgggtgcagccatgtacgcatgtggctgctttccttccattctcttctttttctacggtagttaatagattttttttaatcagtagttaaaagataaaatttctaataaaccgcttgatctaccaaataaaattctgaagtcttcaaccttgctgtttttcctctgtacgcatgtgccctttttcctctgttttttttttgctgtggttgttataatcggttgttaaaagataatcaatgcccttttatggtgacgaaatttctaattaactgattgttctataccattagatctaacaaataaaattctatatattctccgatggctccaacaagtatgcatgcactcttctttgcctttttttctgcgatagctaaaaaatatatttaatgcccttttatggtaaaagaattttgcatacatgcacattgatgtcccacatttatagtaaaacacactatgtccattgttataatatttttcgctcgattttagaggcaggattttagaatttttaatacacatttaccccataccgagttgtacactcaacacagttatctttacatcccaaattttagagatcaaaagcatttcaaggacatagaacatagatatctaatattccaaatgaaattgcacgcatgacaaagcgttgtatttgagtcatctaaggtgatcacgaccgctgcagcgctatagctttgccacatatcaccacgtggcagcttgagagtgtttttaggatgctacatgtcagcttgagagtgattttaggaagtttaatggacttttagtatataatagatttgagctaaactgaaacaaattttgttgaatccaaagcctattataaattgcataaatcatttgaacttttttgcttgaagttcaatatctattctttaaaaaaattgaatttcttaaagtttagaactccaaaacgaagatttgatatgtattaaaaagaacatatagattagatgatatatagttcgtaggaaccaactccatggttgcgacgtaatactttcctatacttcatggttgttgtaagtaattttattttagaatttatatattgcaagtataattagcattcaaaatagtcacaaacaatttattgacaaaaattaggttgagaataaaagtaggaaaagtcacgcatacacaaatattcatatgtgtagagtagtatttcaagcaatactccctccgtcccataatataaaggattttgagtttttgcttataacgtttgaccactcgtcttattcaattttgatgagctactgtgccagtagttcatgatgct

SEQ ID NO: 13783 - DNA, 12796 bp, Oryza sativa
  unsure (1)..(12796): unsure at all n locations
ccttccacgcgttcgttgggngtttagctcgttccatttcttctcccccaaacccccctcctctcgtgcgcctttgtctcctctgttgctcctccccccccccccgggcgccttgattgcagtacnactaggccagnacntcatcacaccaagccctagcaccgcccctcccgtgagcccttccttcggtgaacccggtcactaacaaggtgcacctggtgcaccggaccgcgccccctttcttccgcgcgccctaatgggccgccttccccgcgcccgcgccggcccaaatggctcggccgagcctccttcaaccctcgggccgcgcccttgccgcccgagaaaatctaatatacatcaatcatccatttccttttccataaatcaattctttattattccaaaattccataaatcaattcctttggtcccgcacgtcagtgattgtcaataatattcttgagaatattatttctataaattccataaaccattcctcgtattccaaaaaattccgataaatcatttcctagtccggaaaatcccatttgagcttccaaaattcatatatctcgatccgtaacttcgatcgactccgttcagcttccagtatttccgtaaagttgagatctttttaatggcactattaattagtctaattaggatctttcttttggtcttttgtctagattttcgattgtttgcgtatagttgcggttaccggattttcgtcactcgtggttttctcgaagattcgtgaagctccatgaagaccttgagcaaggcaagtcaccctttgaccaattgctcctataattggaaaatcattattattttgtttgcaacttgaattattagaatcacacacttaacttgcttggccttggtttgcgtgccaaaccgacggacctacccagtagtcacactaattcttgtaggttgtactaccctgattccttgtcgctccacccttatgatacttcggtatccgtgctctctgagcgcgtataccaattatcccacatacaccgttgtttgttgaaaacttggaaaatgggtttgtgaagccttgaaaacccgacatgtggtgtcggtgtgtttgaaaataaaatgaattgtgaaaactcgcgatgcgggagccgtgcctacgtggcgttgtcccgtattcgcatataaggaccgattcctatgggaaactcatcaagcataacaaagtgcaaccacaaggtggaatgggacaccctggctaagtaactagtcggttcagggaaacctcgcatgccaatagttgggaacgccggggcggggtcggacaaaccgggttcctggtaaggcaaggacgagaagcttgctcacttaccgatcaaggtagttggagttgatttgtgaatggctaaaatggcctatatttaagtgaggatttgatctttctatgtggcatgaggtaaccctgggtcggcttgggaaaggctttgtcgcgaacctctgacaccggccagtgtctggagtaagttcgtgtcttgtgggtaaagtgtacccctctacagaggttaactaactgtttgaacagccgtgcccacggtcatgggcggatgtgaggtggttcccgttgcgtagatttgtttgccagtgctttgtgaaaagttgttgtggtgtgggaatcgtaaccagaatcagcctatgtggcagatggatgacctaagtggtcagaaacgaatctgtgtgattcgggatgtctgcgggcatcatagactaggctttccgagtagaagcggattgttgtgctgctgggcagctggactctgggagtccgagaaaatgaaaaaggctctgggagccgcctaatcaagtgaaatggctctgggagccgataagtaatgatctgacccgggaggtcggtacattaccatttgagttgttgaaaagcatctcttaagtcgaatcgagacacaagtctccttttgacccaaagttaaaaagaaagaaatcacttagtgatttcaaacaaaggatttgcaaaacaaccttgcctctcttccaagcttgcattaaacatctaaattcccgtgacttgctgagtacgaaaaagtactcacccttgctctctctctctctctttatatatatatatatatatatatatatatatatatatatatatatatatatatatatagttcccccgtcgtgaagtgaagatgaagtgaagtgaagattagggttttgtcctggttcccagccgtcgcctgtggtgttgggtgttagttcgttggttctgctactgctgctgttgttagtgtttcctcgtccgtgtcatcggttgcattctcgggctgtctgagctgcaacctaagttaaggtaaataagtcctctatttattttaaagatttgcaatgattcatatttgtcaccgtgggtaccagcactatgtcctgggactggtactgagatcgcggtttcgtaggaagcggttcgcgccgttattcctacgacacgctcctgtcaggtgccgttgtacggcggtgccggattggggtgtgacagatgttatgtgatggaaagttgaaagttgagagtagttgggggtgaactaaacacggcctatgtgatgtggaagactacaactgccccagctcacaacatgcagcagctaattataagctctctctcttaagtaaaagtccaagtgtttgattctcggtcacactttaccacagtttattatgtctaagattagataagtttgattacgttagcagctatttgattgtgtccacagttgtaataagattctcttataataaattaggtctcacatatcattgactcgaaaaaatgtagtaagattctccaaggtttactaagagcaagtttaataatataaccaactactcatttcaaaaattgaaacatcatttataaccaatctagtagtctacttatacattgtatctaatccactcacatattggagcacgtgctgcaattaactactccctctgtcccaatatattacaacttagatggatctgactacgaatctggacatatggtatgtctggtatgtccagattcggtatatctggtatgtccagattcgtagtcctaggatgggtaggttgtaatatattgggatggagggagtacaaatatgtagtctgctttttttctctctcctccacataaatagaaatatgacgtggcaagatgtacggactgtttacgtcaccctattataggtgtgatcaagaatttaagacatatcaacttaaacaaatactccctccatttcgaaatgtttgacaccgttaactttttagcacatgtttgaccgttcgtcttattcaaaaattttttatgaaatatgtaaaattatatgcctacataaaaatatatttaacaatgaatcaaatgataggaaaagaattaataattacttaaattttttaaataagacgagcggtcaaacatatgctaaaaagtcaacggcgtcaaacatttcgaaacggagggagtactataatactagtacatgaacagaggtcgcaatgccacgattgggttttcatctggaagaaccgggctccaccgaaagtgtaattcttcgcctgggtgctctcaaaagaacgactaccgactagcaaaatctgttgaagaaaaaggttgtccaatcggcaacatgcgacctctgcaatggagcgactgaaactgccttccatttctgcatacaatgctccttcgcggttgcattctggaactccttggaaatccacctgcacatcacctctatgcaggagcttcacaacctggacaggcccagccggatcccgaccaaacactacgaactcttctaccttctttgtttctgggggctgtggaatcatcggcatgacatcgtcttcaggaatcagaacccctccaccgctcggcttatatcaaaatgcctagaagatgtgaacctctgggtggaaaggctagaatcctggaaagaaattctttcctccttgctgcactccaatgtaacgaattaatcatatgtactgtttctctcttttaaagaaattcagattgggaagctttcccgcgtgaccggtctaaaaaaatatttattgataaatgatgataaaatataatcgagaaccaaacgcacctgcaatgcgatcaggtgttttagcttcagctcgcacaagcacatgcaagaaagccggatttcctactaaccggcacctttttgagggctccatctctcaaggccattaaagtgcctatgggctcaccggccaataacaaactgctgttatccatccaatccagtgtcccaaagcaacattcaagctagcccaacaaccaggcctccaagagtagcaagttgagcgtgcaatccccggcattctcgactataaatacccgaccagaaacacacccagcttcatcactccatctcgccttgtctcattccaagtatagctgcagcctgcacgtactgtactgaggacaatggcgagcaaacgcttcttgtccctgtccctgctcatcctcctcctcggcttctcctccagcttggcagccgggcaagtcctgtttcaggtaagaggtcgccatgagttgggttgcaggctgcagtgaactgatcgtgttttgttctgagcctgagagaatggtgctcttgtgtttgatgatgatgcagggcttcaactgggagtcgtggaaggagaatggcgggtggtacaacatgctgatgggcaaggtggacgacatcgccgccgccggcatcacccacgtctggctccctccgccgtctcaatctgtcgccgaacaaggtccggtgctctctcgagcaccttcgtcgtcgtcgtcgatccatattgccggcaaaatatatccaattggcttgattgctgatctgcaggctacatgccggggcggctgtacgatctggacgcttccaagtacggcaacgaggcgcagctcaagtcgctgatcgaggcgttccacggcaagggcgtccaggtgatcgccgacatcgtcatcaaccaccgcacggcggagcacaaggacggccgcggcatctactgcctcttcgagggcgggacgcccgactcccgcctcgactggggcccgcacatgatctgccgcggcgacccctacggcgacggcaccggcaacccggacaccggcgccgacttcggcgccgcgcctgacatcgaccacctcaacaagcgcgtccagcgcgagctcatcggctggctcgactggctcaagatggacatcggcttcgacgcgtggcgcctcgacttcgccaagggctactccgccgacgtggcaaagatctacatcgacgccaccgagccgagcttcgccgtggccgagatatggacgtcgctggcgtacggcggggacggcaagccggactatgaccagaacgcgcaccggcaggagctggtcaactgggtcgaccgcgtcggcggcgccaacagcaacgccacgacgttcgacttcaccaccaagggcatcctcaacgtcgccgtggagggcgagctatggcgcctccgcggcgaggacggcaaggcgcccggcatgatcgggtggtggccggctaaggcgacgaccttcatcgacaaccatgacaccggctcgacgcagcacatgtggccgttcccctccgacaaggtcatgcagggctacgcctacatcctcacccaccccggcaacccatgcatcgtgagtagctaactcgatctctagcaaatattctgaatcatcctgcaaattgatcgatgaactgatgataaattctgcaaaattctttcagttctacgaccatttcttcgactggggccacaaggaggagatcgagcgcctggtatcgatcagaaaccggcaggggatccacccggcgagcgagctgcgtatcatggaggctgacagcgatctctacctcgccgagatcgacggaaaggtcatcacgaaggtcggaccaagatacgacgtcgagcacctcatccccgaaggcttccaggtcgtcgcgcacggtgacggctacgcagtctgggagaaaatctgagcggtggagaggcacaattagcagattttatttacctgcaattttttccaccctcgacgtataacatatacatgtgatggcaacgagttgtatgctgtatctgatctgaactatgtacgcgattgtccacaaagtactacctccgtaaataaagtgaggatatggaacatgcgtttgcatgcatggttttacaaataatggtatgcaataaaattttcactgcttatgcatttttgcttggtttgttttactaataatggaatattttattttactcatgttttgtatggcaacgttgttttagcacactactacaaaaatcatctttcgtggcggccattttggattttcgctggcggaaatcgcagccgccacaaactaaaggccagtgaagatcacgatcttcactagcggttttcgaccgccagcgataattcatttttgctggtggtcgtcttaagccaaccgccagcaaagatccattttcgccggcggctggcttaagacgaccgccagcgaaaatgaattatcgctggcgggttacagtgtgccagccgccagtgttaatcctggccaaatttttttaaaaaaaacgacggagcagagcaaccgctccgtccgtcctccgtcaacgctccaccattcaaaaatttcataaaaatttatcaagcattcaaaaatccacaaaaaaatacatgaacaatttacaatcaacaatttccattcactcaagcattcaaacatcacaaaaatcaacagattaacaaaaatttgaagtccgccaccgagccccgtcgggctccaccgcctccgccttaacgacgccgttagtgagccctgccggcctccaccgctgtagagcagcgccgcaacctccaccgcggcccgcgcgcagatctgagagagggagagggggtggtggcggcgggggaatgggagaagggaggaagacctggatccaccgcctcgattcgccaccgtgccgccgacgcgagccgcctgcccaccgccgcctcgacctgcgtgcccgcgcgccgccgcctgctggatggagtcgcctcgggcctcctcgcctccgctgctgagctccgccgcagctgagccccgccgctccccgcgcgcactaccaccaggtccgccatgtgcgccgacgccttctggatggagttgcctcggacctcctcgccaccgctgccgaggtctgccgcagtcgagccccgcccctcccggcactggatccgccgcgtgcgccgcgtgcacccggccaccgctctctctacagcgaccctctctgcagcgaagggataaggaagaatgagtggtgaggagtgaagggataaggatagggtggggagagattttttttatagctcgagtaatttttttgctggggctatgtggtgaacccttttcagaagcggttgtatgagtggactgcttgtaaaaaagaccaacgccggtgaatatctgccatttttgctggcggtgtattaagtgcgccgccagcaaaaactgtaatatctttgatggtggcccgcttaaatcaaccgccagcgaagatcagttttcgctggcggttcgaaacttcctaccccttgttatattttttgtggcggttttcataaatattcgccatgaaaaatgatagggtgacgctgtgaaaaattaattttgtagtagtggcaatgctagattgtcagctcacatttcccaattaatagtcacagaatttagaaaatgaattagaaggtagaaacttcaatagttacagaattcagaaaattagaagataggaactaggaaaactagtcttttttttcttccaagggttcaaaccaatgaacaactcataaactgcttatcaaaatctccagctcaccaaacataacccataccaatggaggtattagacaatcctcgagaaagtacctctatgcatctaaagtttataataaaatttttggtatcttaatatacttagcacctagaattaccaaattttatactagaaaatatggtaccttcagatattttcgattcttaaggatagtaatattacacataccaatatgatagtgcaagcaaaggctaaaaaaaactatataaatgatttatttaaaattacataaaaaaatcaaaagattaagaaatgagtaaatttcaaaaagccacaggtattattgttcgagttgcacaaaatcaccggagtttcggcatgtgttaagtaatcatcgatattgtggttctaaggttttacaaaaccacaatgtttaccaatctagtttagtactgctgcaatatgaaaaataatgaacttaaagtactacaatattcaaatgatgaattaaaaagaactcatatattcgatcattgtttggaactcatatgtatggtagacaaagaaaattttgtttacggtgtgaaactataaggtcataatacacatagttatgtgaaaaagaccaaaaccctgtagttttatgcaatttactctagatcataatacctatggttttgtgaaatttactcttcttatagtatatatgagagcttgtaacaaatacatgtctataaacaatctcaaatgagaaaacttttaattacaaagttgaagttctcatcgaggattgtaacattcacacgaaatttgcattcatctgacttcatatgtaaaagtttgaaaaaaaattaaatctgaggtttttccatttttagaggttgatagctagaaaaaaaaccgcatgcacactaatcgatgccatttttaagaagtctacttgtgaaaaactattttccttattctttgaaaatgactaaaatttaaaaatatttaaaaatttatagaaaatatcatattatgtgtgcagatacttcaaactataaaagacgtgcgatctagcaagtacaatatctccacacatgatatataggtttaatagtgttcttgtccctgttttcaactgcaaatgtaatcacacccctattttttttaactttgtgattatacccttatttttttaactgaagcttgtgtttgccccaatcccatcaagtcctattaaatacatgtatgccatttgcatatttgcctctacttttttttagaacttttagattgtgcctatattttgacatgattttcaaattttcaatactaaaacataaggtcaaactaaaacttgacatgaagtttgaccctttttctacatgcatttaataccgttaagagggcttaatggaatgggggcatacacaaacttcagttcaaaaagtaagggtaaaatcaagggataaaatcatacttgaagtcgaaaatatgggtaagaacacaatagcccaaaatatacatacatggttggaaaaaccggcaaatcttctcaatcttttgaattttttatgaattataaaaataaatcataaatcatttttaactattccttttgaagcttttggctacgcatcaaattttcgtagaagaacaatactgccactcgagaagtaaaaagaacagtaacaataattcaccagtacaatcgaaccaagcaaaaatgcataagcattaagcagtgcaaattttattgcatagcattattcgtaaaaccatacaaatgtatgtccctgatcctcactttatttacggaggaagtacttcgtggacaattgcatccgtaattcggatcggatacagctcgttgccggcacgtatatacgtataccggtcagggtaaaaatcgcaggttaaatctgctaaactgagagtctcgtcatcgtgcgctcagattttctcccagattgcgtagccatcaccgtgcgcgacgacctggaagccttcggggatgaggtgttcgacgtcgtatcttggtccaatctttgtgatcaccttgccatcgatctccgcgaggtagagatcgctgtcagcttccatgatgcgcagctcgctcgccgggtggatcccctgccggtttctgattgacaccaggcgctcgatctcctccttgagaccccaatcgaagaaatggtcgtagaactgaacaattttacagaatttatcatcagttcatcgatcagtttgcaggatgattcagaatttctgatcgagttggctactcacgatgcatgggttgccggggtgggtgaggatgtatgcgtagccctgcatgaccttgtcggaggggaacggccacaggtgctgcgtcgagccggtgtcgtggttgtcgacgaaggtcgtcgccttggccggccaccacccgatcatgccgggcgccttgccgtcctcgccgcggaggcgccacagctcgccctccacggcgacgttgaggatgcccttggtggtgaagtcgaacgccgtggcgttgctgttggcgccgccgacacgatcgacccagttgaccagctcctgccggtgcgcgttctggtcgtagttcggcttgccgtccccgccgttcgccatggacgtccatatctcggccacggcgaagctcggctcggtggcgtcgatgtagatctttgccatgtcggcggagtagcccttggcgaagtcgaggcgccacgcgtcgaagccgatgtccatcttgagccagtcgagccagccaatgagctcccgctggacgcgcttgttgaggtggtcgatgtccggcgcggcggcgaagtcggcgccggtgtccgggttgccggtgccatcgccgtaggggtcgtcgcggcagatcatgtgcgggccccagtcgaggcgggagtcgggcgtcccgccctcgaagaggcagtagatgccgcggccgtccttgtgctccgccgtgcggtggttgatgacgatgtcggcgatcacctggacgcccttgccatggaacgcctcgatcagcgacttgagctgcgcctcgttgccgtacttagacgcgtccagatcgtacagccgcccaggcatgtagcctgcagaagcattcaagcaattcaacgacctgtgcatgtattttgccggcaatggtgcgacgacggaggggatcgagagagcagagcaccgcaccttgctcgccgacagagtgagacggcggagggagccagacgtgggtgatgccggctgcggcgatgtcgtccaccttgcccatcaggaagttgtaccacccgccattctccttccacgactcccagttgaatccctgcatcatcatcaaacacaagagcatcactgcatcattctcttaggctcagtacaaaacccgatcagttcactgaagcctgaaacccaactcatggcgatctcttacctgaaacaggacttgcccggctgtcaagttggaggagaggccaaggaggacgatgaggaccgaaagggacaagaagtgtttgttcaccatggtgttcagcacctgcatgctgcagacacacttcggagatggatgattgatgaagctcctgggtgtgtctggtcaggtatttatagtcgagaattgccggggattttgccatgctcaacttgcaacttttggaggcctggctgggcttgaatgttgctttgggacactggattggatggataacagccggagtttgttattggctggtgagcccataggcaatttaatggccttgagactttgagagttggagcactcaaaaggcgcaggtcagtaggaattccatctgtcttgcttgtgcttgtgcgagctgaacatgaatacctgatcgcacacagagcatttgagagcagaggaaaagaatcgattgagaatgtacgcaaaacgagctgagccattaacgtataattaattgagtattaactattttaaattttaaaaatagattaatataatttttaagtaactttcctatagaaaatttttgcaaaaaatcataccgtttagtagttcaggaattgaacggtgcgcgtgtaaaacgagagaaatcttctctcttacacttgctgctgaattggtacatgttgcgagttgtggcgaatatgtattttttttcacctaggtgcaaccgcacccatcatttacatacaacttaaatgtacataaaaaaatgtagggcttgtttggtttaatacttaccaaaatgttggtagtgacaaaacctaggcaagttttggcactacaaattttttggtagagtagagttgtatttggttggaggccaatttagaaccaagcttttagcataatatagaaaatatcaaattggacattggcaatgccaatgatttggcttcaaaccaaacccgtcttatgcactgttcaaactatcaaaatatttgtagagcacgttttggcactaaatccaaaacggcccataattgtactatttttgagaaggtacctaaaggtgccacaattttctagtaaaatttggtacctctaggtactttatacctcaaggtaccaacaattttagtgtaaaatttagatacttcaaggtattttctcaagaactataaaattcctctataaaaaaatagtttgaaaataattggtagcatcaatcacaatggcataagtctatacacaaacatacacaaccatgcaaggctgaaacagatatataatcagataaataaaaaataaaaaaacaatattgtgaacagtacatctccagcacaaatagaatatgtgtatttctgtttctttactggaaaataaatttttgatgtgcatgtttgcatagtggtttatatcttctttatctatcttaacattttttttatgaaatatttacatactccctccgtcctaaaatat

SEQ ID NO: 13784 - DNA, 1357 bp, Oryza sativa
  unsure (1)..(1357): unsure at all n locations
cgggggcgttgacnatcgaaatgcacctactcagaggtacagnagttcatcacggcgcagacgcgacgcgacacgggcggcaaccacgcgagcgcgcgcgcgaacgagcgcggggagcggcagcgagggagcggagagggaagactcggctcgacgcgggcggctcacgcgcacgcgcgcgggcagagcggagaggcgcagggcgcggctctcgcgctttcgcgcgccaagcgcgagagaggggcactcggcgcggcgacgcgcgctcgcgcgcgcggcgcggggcggagcggagggagagagggagagagggagcgggagcgcgccgggggagagagaggaaagggccagggaagaggggaagatgggccgagagaaaatcggcccatcgaccccgggggaggcaaaatggacttttgcagaggaatttgatttggaaggatttggattcggagttgaactcgacgatagatcggggatcgagatcttgagatggcacgggcactagacaacaagcaaagaaacagatttcgcaattagggtttttaggagataattttcccgctaggcgccacgacggaacgggcgctacaactggggaggccggtgcgtgcgtggacgtgtgacgaggagctccgggcacctcttcttccccttccctggccgctcccagagagcttgctcccgcgccgccgccgctcgtcacggcgccctgtcccgatgcggtagccctccgttcctcttcctcgctcgccctccccctcctttaactcgcttggtagctcggttagccttccggtggttcgtaggcgccgccccaagcccggccgccgctcgccatggccttgccgccgtcggcgcctgctcccggaggccgcctctcgtcgccggacctccacggcgcctccccaccccatccgactccagaaatgaaacccttgagccacggagatgctctcgccaccttgaatcgacctctcgtcgccctgccgtgatttccccttttgctcgccgccgacaatcgccgtcgaaatccgccgccgtcggctcccctctcgtcaatccctctcgccaccacgctcccggggatccccttgacctcccccttgctgccccatggccgccggcctcccttctcgctctcgcgccgtgtcgccccttccgccgccgcatagcgccgcggcgcgtgcgtcgccggtgaccttcgggtcccgcgtcaccgcgtgcgcgtcgcaacccctttccgcaatagctgagcccgagcccgtgcttccttcgctcttttcgcgcgcggccacgtcggcgtgccggcgagattggccgccgcctgatganggacgtgcaagtcatagtcaaa

SEQ ID NO: 13785 - DNA, 548 bp, Oryza sativa
  unsure (1)..(548): unsure at all n locations
ccgccccccttganttttcgatatccgtttaccgcaagtagntcatcaatggaggctcatggcgtcgtcgggaaacgaatccaacgagtcgtacttgggctcctcccatgtcgacaagctcggcacgatcgagcaccacgacgacaggctgccggcgccggcgacgtccgtgggcaaacctagcgagtcgaaacagctctgatccatggcgaagttgagctcgccgagcgcggcttgcacgctcgcgtccgtgcacagcatggaggtggttgcggtggttgcagtactcgtcgggtcgttcccgctcgctggactggaccactcgccgaacccgtcctggttcgggtcgaactgcgccgacgccgccgccaggatgccggggctcagatcgctggacgcgctgaacgtgtcgaacgcctcgtcgacgtgccctcccgactccggcgtgacggcgccgagcccggcgtcggtcgacgggtggttcagaaacttggcgtacagcattgcgaggtcgatggtcgagccgtccgccgctgtggtgacgttgg

SEQ ID NO: 13786 - DNA, 2649 bp, Oryza sativa
ccaatatggctcaacgacggcgttgttcttactgggtggagtggaatcacggtgagcatccattgcggagatgatgacaacagctgtgcattcccatccttcacctcagcagataactggacacaccaagttctagaatggaaggttgatgataacaacccaatatcatgttcatgtttgcttcttcagctcaataggaagctttgccggctaaatgccgcaaggatagactggcaagaacatgattttggactcagtgccatctttgcattagaagcagaggaagatcagggacttctgtatcagcagaagcagcaagaaaacgaggagttgaggcttaatgcgttatctctacctgggacactatcagggggaggggaaggagaaggcgagtacagcttgttgtttgaatctcctgaggaatctgattgggcgaaggtttcagagccatatgtacccaagtttccaactgaagaagaaattcagaagagggaagagtggcgcaaggagcagcttaagctggtcatggagccaatcatacaaccagtgcaggaaccgagaaggggtataaattatttcatgtgtgagccacgcagcaggagcactagggaagcagagctcccaatgcatgaaccatactcagtgttactatactactggaccttgtccgacaaatcagaatgtaagtacacatctatattcatctgaattgcatttccatgagcactaatatttacacatatttgctgatttgttgttatactgggtaaaaaaatggtcattagtaggaccaatacatattggtactgaaattaactagcatgatagagtgcttacatagaaaattcctaccaattcatgtaacatagataaaaatacaacatatcttaatcagcagtagtcgctggtttactaagtggacaggcaactttcttttgtcttcattgcaagtaataattgccactgtgcgaacattgatgtagataggggagaaagacatatattttagcactcaaaaaatgaaacgggcacttttccttaaccatctctccgtgtattttataacttgaggaattcagttactgcttggggcttcgctaaggagccttaactttgcagttcaaataactaaacagatgcacgtgtgtaagacttcttctccaaatcatgcattcttttctctaagacaaagttctggatactagttattgtttgctttggcccgatttgtaatccaggctaattaagtaactctttgaatccagcaaagttgaaacctaagaggaaggtgtatcctagacttgtttgtttggagtggtgccttgtgcacccagcagcatcttgcaagtttacaccctcgagatcattgtagctgattctcttcattcctgcaaactcgacatatccggattcgtcgcgattagggacttacgtgatggacggcgcaattacattttcaacagagaaataggccaccctttcaccgtcgtatcacgacatgtatgcactccatctcttccacatttcttttcaggacttcttctctaagcggaaataatgaaagctctatatgggcatattgctttactctgcagggtgttttgcggctgccaacattgagccctcggagagccattcataccaatcctgaaatcttgctcgagttcaacctgaagataaagagaacaggtaatggcattgacagttaccgtgagctgatccaaggagtagtagagcatcctagtatatatcggcacgattggtccagagtcaatgagctgtccattctaccttgtggcaaccgctctactccaatgatgcgcctgaagctcgccaggattctgaaaggcgtcgaggccactgttgagctccagccgctcaggctgcctcccggaggcattgatttgcgctgcacagctcggtcaggccgcatagctgatgacattgagcttttcgatggcaaatacggtggcgacgacgacacttccctacagtttgtggtagcaacggagttgcatggcaacatggagatccacttggaaggagtatgcaatggcgtgagcaggagatggtgcattggttttgtgccaaagttccatgctttgttctctcaggaggtagacttacaattcgctcagcttttgctgactgttgcctggtccatgtagataatgcatttttttcttcttttatttattttggtaatagtgtcatatctagattgcttaggcatagtcgcatagaactttttttttcttttttttggaataccaggtatagaagaaattgtttctgcgtcgccgttggtgtctgagactgagaaaatgtattatttaaaaagatcgtttgattgtctcagatggacgagaatgcgaaccgcgcgtgggctgttgttcttttacgtgcgtgttggtgttatgcgtcccttttgcctggcaaaagaaatgtcagaattgaatctagagcagcagcaggagtataaaatgttgtaatgaaaagacaagaaaatgtcgtctttgttgcattgaccactgctgtgtgtgcaggcattcaggtggatgatcgtagctagtagactgtatatgcctgatgagttctttgctaaactgaacggacattcagcattccataatttggtcattgaagcaa

SEQ ID NO: 13787 - DNA, 751 bp, Oryza sativa
ccgttcaatcaagctgtttctgcttatggtaagtaaaaacctttctcaaggatcttcctttgtctgaagctcccttttgtcttcgtaactattaggagtagataactaaatagtcattcagaattaactaatgtatgcggacaaccctcataactaaatttgatgatctaatttccttacgactaaagtgagaaggacaaatttaccattttctgctttttattttccttatggtggtcacgatgtaatgcataagtggataagcagtaagaaacctgaatagtaatgcagtatgcaagaggatgttactagcattcacagcttttttgtgacgtgcagaatcacgcagtcctgaccggaaaacaactatacctcaggtgacaggaactgtatgggaagcatgtcttgctctcaacaaggtaccaacaaccaactgtgttgccataggacgagccatgactcagataggtgtgtatctgaaggatattctccgagagatgaaagaactaccaattggtgattctaatggcactgctgaaaaatcttctaatggagctgtggacaccacaagttgttctgatagagatggatcgtcaagtgaccttgagttagatgaggacttcactgaagaggaggttgctgttgccaaattggttgtcactgtggcttccgatgcgcttgttgtggtgaaagaaacaattcgtttcattacttgtttgcttaagatctcaggtaaccgaagtggagctaa

SEQ ID NO: 13788 - DNA, 588 bp, Oryza sativa
tacgagacacatgccatgccattattctatggcgcaggcggtacatcatcctccctgggcgacaagcggcgtctcgtgcaccatctcctccggctccgccatctcctcctcaggatcctgcaccgtctcctcctcatgctccgccagcaccgtctccacctcaggctccagcatcgactcctcctcaggatcctgcaccgactcctcctcgtgctcctacacctactcccccgcaagctcctcttccggcaccttcaaagtcaaggccccccccagctccaccacctgcccacacaagggcaacgaagaaggcgaaagttgacgccgccaagaacaaggacccggggtacgattgcacgcaagaggagcttgacgcttacgttgcatcagaagtcaagagacaattcaagcctcgaagtccagaaaagaagattcctatagaccccagtgtcaggaacttcttcaggggtatgtctgcatctgtcaaggaggccatcaagctatcggactatgagcgaacgctgaagaaagcatcttctggaagtccaaccagtccctcagcttagagagcaaccaaaccaggagatc

SEQ ID NO: 13789 - DNA, 1637 bp, Oryza sativa
  unsure (1)..(1637): unsure at all n locations
tctgaaagctagttgaaatcgtgacaattgactagctcaccatctgtgcaggcaatttaaaattcatcctagaaaagcattcagcgtggagtagtagactagtagtgtaactgttatttatctctatatttaggagaacgttgattttaaattttgtaggtttgcaaactgctacttgtatacccaaaaaaaaaaaatctgctacttactatgctatatccatgatttatttcagaatgtttggacacgccaaatgttcaaacagtattccagcaaaaattttaggcactgttccaatcaaaatcccccttccaaactaaccagccgcttgtacggctaaactttttgcctgtcctcctactgctaaatttgaacgccacattgaacaatatctgaaaccgtgaaacgtgcctctctggctaaagtgctaaacagttaatccaatgagaccaaatcacgcaggcaacaaatatggatataagcaaatcgaggacgcgtgaacgagtggggaaatcaggatatgcgatgacgacgtacgaggaggctgaagccggagacgctggcgagggaggtggcgatggcggaggcggagagcgggaggacgccggggaggtgccccaccatcatgttggacgccacctgcacggcgttctgcgccacgctcatcgcggccatgggcagcgccatggaccccacctttcctgcctcccgcgccagcccgctccaccacctatctccgccctcctcctccctccctcctcccactccggcggtgccgtccgccgggaatcgtttcgagagcagaggtattctctcctccatggcggcccgagtgcgcgcgtcgtcgtcgtcgcctccaccgaccgagctctctctctctctctctctctccctctcttcttcttagagacggcttttggtgtctgtgtctcggcgctggtgggcggaggggttntaatgggagaggactctcgcgatcagcggcgggataaaacaggagttatgggaaggttgttatgtcaaagtgtcaaatgtggcgtcctaattttatactgcgggttaaaagtagaatgcaaagttttatacgagtgacatccccccctcaaaaaaaaatactggctatataaaacaactacactgtgaatattttaggaatgcttggaaatactcgctctgttttatattataaattatttttactttactctaaatcaaattactttaaatttaattaagtttgtataaacaatataataatatttataacactagattaattttattaaatctataattaaatacattttcatagtttatttgtattgggttgaaaatgttactacttttttctacaaacttagataaatttaaagcggtttgattgtaaccaaagtcaaaacaacttataatctgaaacgaagagagtaaggtttataaaacataaataaagagagtaagatttataaaacagagaaagaaaaaaacatactaatagaatgctatgctcttgtctgcagaattttaggtcacgagaatacgaatcaaacataggaatataaacttttcaggaaatttgtttggataggggagagactagatagagaaaggaatataatgcatacaagagtttgagctca

SEQ ID NO: 13790 - DNA, 552 bp, Oryza sativa
agcatactgaagtccctttttcagtgtattttggctccacaaaataacttgtcgtttcacttgtcaatattgctaaacagttttgtttactcgcttttgctactgctaaatcttcagggtaaccaaaattgcccgccaattcaatggagtgacagttaccactgaagatggaccaagttactctgccgatgcttgcatcattacagtaccgctcggtgtgctcaaggcaaacataatcaagttcgagcttgagttgccctcatggaagagctctgcaatcgcagaccttggtgtcggtatcgagaacaagatcgccatgcacttcgatacagtcttctggcctaatgttgaggtgctgggaatggttggcccaacgcctaaagcatgtgggtacttcctgaacctccacaaggccaccggcaatccggtcctcgtctacatggccgccggtagatttgctcaagaagtggaaaaactgtcagacaaggaggccgttgatctggtcatgtctcacatgaagaaaatgctacctgacgccacgaacctgtgagt

SEQ ID NO: 13791 - DNA, 572 bp, Oryza sativa
atgggtctgagaacacgacttgctttgtgagcctacacatctccacattatcgcagtactgagcaactgcagttcacagaacacaaacattccatcaatttggttatcatttttctcccttttcatagtcacagaacacaacattctatcaatttggttctcatttttctcccttttcacaggcaaaccaaacctgtataataaatcaaccaacctcctttcttgtgatcagtggtggagttgtagagaagggaggtgaagaagagcgtcttggccatgtaatccgccatgtgctcggcgagcagcgggtactcgacgccagcgatgaggcccttgcggaggatgatgtgcggcggctcgatgtagcgcatcccgatcagcgacatggcccggtcgaagtggtagacctcggggacatggtccgggcagaggccgcggtgcttctgcagcgcggaggcctcgaagtaggcgcgctccctcgtcatcggccacgaatcccccacgcagcggatgtacggcagcgcctggattgcagcgtcgtcagcggaggaacggagagagaagatgcgtac

SEQ ID NO: 13792 - DNA, 520 bp, Oryza sativa
tcatcattgatttgcatcgaagtcgggggctactgtcagggttatggataccacatacctaatagtagttgactaaatctcggcaggatccaccacataccatgtcttatacggaaactgacctcgagggagttctgaataaggaaagacaaccatagttctacatggaaacgacaaggactactcggattatatccatattagtttccctaattctacttggacaagttgacacctatgggtataaatacaagcccccctaggaggagaggggagacgaacaattgacgatcaacacgatcaacacggacaacacagacgaccacctcaatcaacacacctaccacaatatacggaacaacacaagtcacaacatacaagccaacatactccaagacaagtcgccagatatcaacttcagggataggcatggctattcccctacggtatctccggatactgtcaggagagacgaaagcgctatctctaatctcgccggacacggattcgaggaggaggg

SEQ ID NO: 13793 - DNA, 820 bp, Oryza sativa
gatgacgtcctcaccccacccacccccacccacagccacgagcaacgagctcgacgctaggatgggcggccaactcggcgcagggggaggcggcgcccgccgacggctcccacggcggcggcctcaccggagctccgccacgaatcgaactcgcagggttgagatgaagaagcggaagaggcgcggcggtggcgcctccgccgccttcgaccggagcgtcttccccatcctgctcgccgccatcgccgccggacagcgctaacccgcgaccccgagcagcctccgccaccgttcatcgccatcccgccgccccaagctgcgtccgccaccggcgccgtccaacaccctcctcggcgccgcccgctgccggcacatcacgcgacgccctcgtcggcgctacccgtccctgcgcgccgctgcccacgcccgtcgccatcccgcccccccaagctgtgaccgcccccggcgccgtctaatgccctcctcggcgccacccaccgccgccgcatcacgcgacgcccttgtcggcgccgcctgtccccgcgcgccatcgcccacgcccgtccccacgcgccgccgtcttccgcgtgtgcccgcacgtcgccacccatcgcccacgcccgtccccacgcgccgccgtcttccgcgtgtgcccgcacgtcgccacccatcgcccacgcccgtccccacgcgccgccgtcttccgcgtgtgcccgcacgtcgccacccatcgcccacgcccgtccccacgcgcctccgtcttccgcgtgtgcctgcatgccgcccgccatcgcccacgcccatccccatgcgccaccgt

SEQ ID NO: 13794 - DNA, 16658 bp, Oryza sativa
ctgcagtcgtcgcgccaccgcgccgccgctgtcgtgccgccgcgccgtcgccccgaagccgctgcgccttgcgccgccgtcaccgtcgtcgccgccaccgccgccgccggtgagccatctcccctccttcacctcgcgcccaccgccgtcgccacccggggaagcaaagagccgagagagagagagggaaaccgagggagggaaaggataaggaaggaggagagaaaccgggagggagagagagaaggaaaaaaaaagaaaaaaaaagaaaagagaggccggcagataagagaaaaaggagagaaaaagaaagagagggagagaaaagagagaaaaagaaaaagaggagagaaaaagagggaaaatagaaaagaagaaaaggagaaaatagaaggggaatcgggggagaaattaagaggatttaggaaataaaaaaatggtcggggttaatcatagattatttttggaaattcctcgagcgtaatagtatttcggtcgaaattccgagttaattataaaaatatgtttattgaacagattagattaaaattggtagtaatttagatataattagtagctaaacaattagatgaattcttatagattattatagattatttttggtaatctctataagtcatcggttcacggtagaaattcggatttaattactaggaatcttatccgtgtattatatttaatcatttagtcatagactaaattaaattgtataatatttctaggatttcgtccgatatttagctcgtaatagaaatttctaacctattatatggatataatgctcggggagagtaaattaaaaacttatgacaacgaaataattatacccgcaaaatagtttaaatcgaaattgggtttgccgtagttcgcagatagtaaagttaataaaaaggaatcgactttcgcattcgactttcatttggattcatttggatttttatttgaattctaaccgaattcaaatcaattcttgcacgtaactatagagcccgagggagttgcggatccaagcgaaggccaagacccgcaagactttgagcaaggcaagtcatcactattccttgaacatgttgatcctaattgcgaaattgttttgtttacaaataaagttgcatgcaatgatgaacatcctacttgtgattatgccatgccttggttattgtttacccttaaatctttgtaaccatgtttacgtatgagtccctagtcaactatgacaaatgcttagaaatgctattctagaatcatgcatactcatatttgtcaaatgctatatgcttgggcaattatctttgggaaggtaattgagatgcggcatgtggagacatgagcgccacattgccatgatattgaggacatgatttgtgaaaggagaaataaactaaataactgttttcgactggggcggacggaggatttgggtggtatctggaaaaggctagtaccgtccccggtcaattaaggaccgagccatgaagttaagcatgaaacgaccctcgtacaaccgcacttctcatatgggtatagacctagcggagtagatagccgagcggaggcagtatccctgcatagatggttcacccctgagtgaggcaggtgcgctacggtgggacagccattgaggtagggccgagaggcatgccctacatcggtgtcgccattggtaggactgccatgagtgtgtgtgagagagaacttaacttgagccataatttaatgtgtgtgagacttctctttcccgggagcgccagaactcctctcactgctagaaacatggacgcctagagtgcatgaggatttaagttcatggagcgggtactgccaatgcgaggttatcaaaaggctttgccgtggcgcgtctcatgtgttgggacgaggctcatgtgttgggcagtcgcggagtgcgggtaaagtgtacatccactgcagtgtgagtaaaccaaatctatttgaatagccgtgttcgcggttattgagcaccgggacatgtattacacttggctagactctaaattctttaacttgtgtggaatgggatattgcatgatgatttttatgctgatggagccacttcctgagaggcgggaatgtggacgtcctcagaaaaccataacgactcaatgacgggaagctatcattgggatcacaatgggtggtggacagaaccgtcattgtttaatatgaacactggtattaaaaacttgatcactctatgctaggtcttaggcttgtgaaaagaattacaaaacttgctttgcgcaaaagaaccatagccatcctttgaattcctctgtcatgtgcatcattgctgtgatggcctgctgagtacggttggtactcacccttgcaaatataaaattaaccagaagcgggagatgaagcctcggaggatccctatgcctattaccaggagggagatgaagacgatggtgctcagtaggtcttagtacggtcgttgcctgtggcaatggcattccgctgccttatctatttctgcttttggatatattccggaccgctcggtccgatgatttaagactatgcctgcgggcttatgatgtaataattcgtattagacactcgtgtatgtgcacttggtacttcagctatgaattcgtgtgtaccagactacttgatccagggaaatagtactgtttacatgattgattcctgttataaaaacgggggtccacgtgtcaccatctcaccgaatggtggtgcggtcaaatccttgccacatgaacttttcttgcgtgtcctccttatccagctgcatggagccaccaaatggttaaatttgtaaataatagtccccccgtccttaaatatttaatgttgttgacttttttaaacatatttgatcattcatcttatttaaatttttttaatgaaatatgtaaaactctatgtaatacataaaaatatatttaataatgaatcaaatgataggaaaagaattaataattacttaagttttttatataagatgaacggtcaaacatgtttaaaatagtcaacggcgtcatatatttaagtacggatggagtatttctacatgtcaatcttactttagtttttagaaaaagttggatatttctaaatgtctccggtacacgtgtttggccattattttcttataagtactctacactgtactaccttattttcccactcagtaatactatttttctattaacggaaagaacttttgggctttgccccttcatactaatttaaatcttagtgattagaattggacttattttaagataaagatagtggagtagtatatattgtaaaaaagctaaattgcatccatgatacaggaatttgacttgtgggtgcgatttagcgatcaagtttatagaaaaattttgtaacatatgcagcccaaactagtttcattttatatgacattaaatatattttgataatatatttatttgggttgaaaatattgctatttttttataaatgtggtcaaatataaaaatgtttaactaataaaagttaaagcgacttataatatgaaatggaggttaggaggtaaatttagctatattttgaaatgggatgtagtcaaaattttcgaaagttggtattaggaagacaaacagagaagaaatggaaggagtgttgaaccatgtggtactattcacatgagagggattgccgacatggtcagcaaagtagtcacttctcataataagatctttaggagcacagtacgatccactactccgtaagcttcattttcatcggtcaatgccccttttgatttggaggaaaaacatagaaattttagaggatttcaattctataagaaaattttctatgaagctctttgaaacaaaggattgaatcatatccaatcttttgaaattcctatgtaatggacaatcctatagagattttggaggaaatttagcaagagcttcaacctcttgctaactttcctttgagtctatctctctcatcccattcctgtgtttttcctgtggttcaatcaaacggtcattcctgtgtttttcctacgttttgcaatcctctgttttacactcacattcctatcaaaatcctacgttttttctattcccacgttttctcaatcctgcgattcaaaggggccctaagagttgatagtgtacatctttaacaagtagcaactgtttatacaccggccacatgacgatttttttaagagcagtcaacacaagagaatctatcagtgtgaaaagttcataatatccacgcttattctccagtgtaaaaaacagtcattaattactccgatctgttcccatcatcccatgacggtgggagaaataaattatgaagataacatcattagctggacttacatcccaatcaaagtgttaggtctgttagtacatcgtaggctccggcgaactgaacgctaacaagatgtcaaagacgttttttttctaatgttgaatggagatgtcaaaagaccatttttttaatgttgaatggagacgtcaaagacgttgaccttgacaagcccaatatagaactcccaaactggagaaagtcatacccccagtggcacaagtagatcgatcgaaaaacatgtggatgagttgatctcttctacgaatggctgaagccggtcacctaccatgccagcgaaaaggcaaattttctacccctcaccgtcgtcgtctcgtggacgtaggtgttcagaaaaggatactactacatcaactcgcttgcaaatgttgtggtctcgtccatgcgttgctgtcaggtcggcccgtggtcctcatttgggcaagtcggctcggagacaacatagtaaattgcatctccgtcatgtgcagtatggatgtggcaattgccgatacttggaaaggttgatgtgaacctcatttctgaggctgcgtctctccccgcagaaatgagaggttcacttcctcttttgttgtactttctcagtttataaatatttcatataattaatttttttaataaacacattataaacataaatgttcataacacgcacgcatacacaccctacctctttaaacaccttcggaaaactaggttgatatatattgagattaacgaaatcaccacagctatctcatcgtcaatgggtacgtctaccacttaaagaaattagtcgtaaatacgagagcacctatatcaaggctaggatgtgaaccctagatgagttggttccaccaaatcaacctaactaatttgagctatactcacttcgcgatataattaattttgattataaaatttagttatttgttatatttaaaagcttaatttaaatataaaaaataagttatgcttgaagtacctttaacaataaacatgccatggtaaaagaatggtaattatatatataatttttgaaaaataagacaagtgatcaagcttaaacttcatagttaaaatcagttgcgtcaaatatttatgaccctattcttagggttttgtcttaactaatataatataggactaaaatgctcccgagaaaatatcacttacatgggaacatattctgcacacaagtcttctcgtgtacacaccctgcatacaactaaaaaatatcaaaaaaaatcttaaaaaataatagtactattacatatatatgtaaagtcccatattcaaaattattatatataaagagcaacaaaaaagataaaattatgacatatttacactctcaaaacagtcagaatttttttcttttttgttgtggctaaaatataacgaatttgaggttaaaactttacacataagtgtaacattattgaaagtacttctatattttttttttctgaaatttgctacttgatgtgtatagtgtgtatacgaaagttgtatgtataggatatgtttcccacttacatataatgaaccaaagactatgatgtaacttcctgttacgcatgaataaaaagaaccctcaataggcaaatgaggtcgggctctctcccccaactaatccatccactaaactgctcatactcactttcatcttctcctccccggcgtgtttaagcttgggttccctctaatggaggagagatcccttgccatgtccttactatacatgttggattttgttccaacaattatattgtttaaataagaatggacaatgtactttgtagtgacaacagagtgaggttgagagattaactatgcatgaacgcaaaacatgattgcatctataactataaaggggttgatagatgcagatatagttcaatgtagggcttcaatagcattaagcccatgggacatggaatttttttgtaagttgcccaaagtccaattaatggggtcccttgaaaaaaagtactatcaatcgggctgatggaaatgatggagtagtactttgttcagtcatgtgcacagctaaaatcacaaaatttgcttgtttgggcaacgtacgtcagaaacagtatgatcatcttgatgttacaaggccggattgcatgtgtgcaagcatgtactatataagataatgaaacaaccaagctagtaatagtaaagactgctattgaaatattgaagatatacacctggttttagtctaacacatctatgtcatatatacaaggagacacgttaatatcacacattaattgaacacctgcaaattttggagatgatcaataaaatgatcagtacacttcgactgtatatatcacggcaaaccctgcaatgaacttgagtcaggcttcatgaattcatcaggcttggcactggcagaagcattgctgttgctccagcgactaagctatggcaaaataatttattacctgaaattataaaaaaaagtgatataaatacaatacagatattttgttaattatacctgttgtaagctgatttagattaattgattaattcctgacatatgtggatatgcccgccgtgattgttgtacggaggattctagcatactcctcccattacataaaaccccaatctgaaatagtaattttaacaatttaacccttttaaaaaacttattttggtattgaatcgtgccaaaaactaaaaaaactaatttttggcatgcttcaatctttaaataagttttctaaaagaatcaaattgtcaaaattacataaaataaaatgtgatatttcctctatccaaaaaaagctactcctagtaaacaaatagaattctttatctagattcgttttactttttgaaccgagagagtattttataatataattaatctggacagatatggtagaaaatattatatcttattttaggttgttttttacgagaggggaagaagaagaagttggttagtacgtgcagaacacattcaaagggcctcctgtacaagaaagcttttgcagttgtgcaacgaaagatcgacgccttttgactcataaaggacataaagaacgatgaaggttgcaaccgcacggaacggaaataagctgatcagccgatcatttattactctagtactagtagtgttttttttttcttggaatacaaacaactcaattaaagagtctgtttagttcgcgaaaagaaaaattttaagtgtcatatcggatatttgatcggatgtcggaaaatgttttcggacacgaatgaaaaaattaatttcataacttgactggaaaccacgagatgaatcttttgagcctaattaatccgttattaatacatgtcggttaccgtagccatttattgctaatcatggactaattaggctcaaaagttttgtctcgggatttccgctataactgtataattatttttttaatctatatttaatgcttcatgcatgtgtctaaaattcgatgtaacgtttttggggaaaaaaattagaaactaaaccaggccaaaatctggatgaaaccatggttgagcagttcgcctggatttttttcttttttagatcaaagcctcaaaggcacaaaggccaggtggccctgcttttcttgaacgcagatatgtggtgcctgtctctgtcctgctcggggcgcttctctgtttcgaccggaaagttcaacgtgcctcacgggtcaccatagacttgtagccaaggccaagctgttccattcacaaaatttatcatcttcaatactctgtcatctgcctcgacagacgcaccacatcctgtgttcaggaattgatgtgctactgccatgcaaagtgccgcgttaaatttgccgaatcataaaagttgttgagattatagacatataatgatttaatctattccataaataaatcatgacattacagataaaaactagcatgaacgcatcattagatctacacatgtaaactacacagtataacatgaacagatcaaatatgcgcaacatattgaacacgtactgaggtgacgaaaagaccagctgcttggtcgaaacttttcgcaggtgtctacgaaggcacgaaacacgcgagcgaagaggaaggcgagccgtcgcgaacgaacagggagcagtcgcgcgaagcgcttcccaaaaaccttattgccgccttctcccggtgcagaacgtcaaaggcagaggttccggagacctgctctcccgatcgctggtgcacgccggcgagcgggatggagtagtctacgagcgacggcgcagtacagagtaggaggcaaaccctagattgattttgcgtatatactgcgtgaagacggcgggtcggtttatatagagaagggtcgcttgatcagggcacccgcacgatctctactgcgcgtaaccgaaccggataagtcgcgcgtaacttatccggactccacgccgtttgcacgcaccggatttttcggaacgtttccaaaacaaaaacgaatccgaatttgcagcaaaacaaaactgcaaaaggaggctgcatctgcgcaagggtgaggagccaatttttcggaccattcgacgcgtacgtcgtgcacgcgcgcctgccctgccctgccctgccaggccaggcgaggcgaggcgagcgagcgcgcgcgtgtgtttcccctcttctctccaccacacatgcttcaagtggctaggaggacatcctcccttttaaagaggtcccactctcctagaataagcaaggtggtactaaactccacatgcatgccatcccatgaggtgggcttttgtgattttccaaagaattaatcttcgagtgggctaaggcccattcattaattccaacaatcccccaccaaatctcaaaatcccactgagatttgccttttccaatgtactgtttatataccagcggttcgatggagaccaattaaggttgaacatccacctagaactccaagctacacttactcacaacttgaacaatggactacgccttgaattgcaagtcttgtgcaagcaagtttcactcaaagtcttatctggtactagaccgtctgtagactacccctcgggtggagcgtataagtcatactcctaggtctttagtaagcttcctagaagattcacccaaaatcttcatagactgcgaccaacagtcaagctcacaaaggtgagttctttcaagaatgctctgcaggacaacatcttcgctaattaaagccaacagaactcattaaggcatagccaacctgccttgcagctcacgagagtacatgcatcttcacttggagagggtatatatattgatactctcctctagtttactaatggtttgttcttcctaggatctaattcacgggatctccgatcacatagactgggttaccaccatagtataactcacatgggtctcaaacccatctccttcgatgcattgtttatcacatttcgtgatagtcccttcgtgaagggatctgccaggtttctcgctgtttggatgtaatccaacgttataactccggagtttcttaatttcctgacagacttcaatcgtcttttcacatgtctagacgatttcatattatccttagaactattcactttgacaattaccgtttgattgtcacagttcataaggatagccggcaccggtttttcaacaacaggcagatccattaatagatcacgcagccattctgcctcaacagtagcagtatccagtgccgttagctctgcttccatggttgacctcgtcaaaatggtctgtttgcaagacctccatgaaacagcaccaccacccagtgtgaaaacatatccactagtggctttgatctcatccaaatcagagatccagttagaatcactataaccctccagtaccgcaggatacccagtatagtgaagccccaattccacagtacctttcagatagcgcattactcgctcaagcgcacgccagtgatcatctcccggattagaggtaaatcggctcaacttgctcacagcaaaggagatatcaggcctagttgcactagccaggtacatcaacgagccaatgatttgggagtattccagttgattcctagcaattctcttgttcttgcgaagcaacaagctaggatcataaggtgttggagaaggcttactatcaatgtagccaaagcgattcaagatcttctccacataatgggactgcaagagtgtaatcccattctcacctctaattagcttaatatttaagataacatcagctactcccaaatctttcatatcaaaattttgagacaagaatgatttaacctcatttatcacctcaaggtttgtcccaaatatcagtatgtcgtcaacatacaagcacaaaataactccctcacccccaccatggcgatagtacacacatttatctgcctcattgactgcaaagcctgcagatgtcaatgttttgtcaaatttctcatgccattgcttaggagcttgtttcagaccatacaaagacttcaacaatttgcacactttgccttcttgaccttcaactacaaacccatcaggttgatccatatagatctcctcatccagctctccattaagaaaagttgtcttaacgtccatttgatgaacgagaagaccatgtgaggctgctagggaaagtagcacacgaattgtggtcaatctagcaacaggtgagtaagtgtcaaagaaatcttcgccttctttctgagtatagcccttagcaacaagccgagccttgtacttttcaatagtaccgtcaggcctaagcttcttcttgaacacccacttgcaccccacaggtttacacccatagggtcgctctgtcacctcccaagtcccgttagcgataatggaatccatttcactacggacagcctccttccagtagtctgcatcaggagatgcatatgcttctgaaattgacttaggagtgtcatccacgagatacacagtgaaatcatcaccaaaagacttagccgtcctttgtctcttactccttcgaggagcttcactgacatcctcctcagagacaagttcatgtgtatgttcagtttgttctggtggtgtgattgaactgggaattatttcagagggttggttcaaaccactatgtgtatccttcattgggaaaaagctctcaaagaaggtagcatcacgagactccataattgtaccaacatgcatgtccggtacctcggatttaactattaaaaatctataggcaatgctatgatgagcatatcccagaaaaacacagtccacagtcttaggtccaagtttgcgcttcttcgttattggtacattgactttcgccaagcacccccatgtgcgcaaataagaaagtgatggttttctaccaatccatatctcatatggtgttttgtccttatttctgttaggaactctgtttaacacatgatttgaggtcaacaatgcctccccccaccatgccttaggcagtcccgcggtgtccaacatggcattcaccaagtcagtcagtgtgcggttcttcctttcagcaatcccattagactcgggagaatagggaggcgtcctctcatgtatgatgccatgttcctcacagaataagtcaaactcgttcgagaaaaactctccaccacgatcagacctaagcctttttatctttctgtcaagttgattttcaacttctgccttataaattttaaaatagtctagagcctcgtctttcgttttcaacaagtacacatagcaaaatctagtagcatcatcaatcaatgtcatgaaatatcgttttccacccttcgtcaacaccccattcatttcacaaagatctgaatgtaggagttctagtggtgccaagtttctctcctcggcagccttgtgaggcttgcgaggttgcttcgattgcacacaactatggcacttagaacctttgacaatggaaaacttaggaattaaacacatgctggaaagccgagacatcaagccaaaattaatatgacataaacgtgaatgccaaacattagcctcatcatccacactgccacaaatatggttcacagacttattgcagaaatcagaaagggaaaagcggaacaggcctccgcactcataacctttaccaataaaatatccatgtttagacacgactactttattagactcaaaaaccaacttaaatccgtctctagtcagacgggagccactaacaagattcctgtcgatagaagggacatgctgcacgttcttcagctgcacgatctttcccgaagtaaacttcagatctaccgtgccaacaccatgaacagaagcatgtgacccattccccattaggacggtggaaccccgtgcgacctgataagaagaaaacaatgagatgtcagcacaaacatgtacattggccccagtatcaacccaccaattagtagattgattaactgaaaaaacagtaggtaaattaccatacccgcttccatctccagtgttgccaatggtcacattagcagacttagaagtctgccctgcaggtgccttcatccccttgcgctgtggacacttcctagccagatgaccaacttggccacacacaaagcaagtcctctcatcctgattaggattgttgttgttcttcttctgcttcttgaagttggtggtctgctgagctttgtatttccccttgctcttgttctgggccttgtgcacaacattggcactggactgcccaccatcgcccttagacgcggcatctttttcccgagctttctcctcaacatcaagagacgcaatcaacccctcaacggagtattcctgtctcttgtgtttgagtgcagtaccgaaactcctccaagatggaggtagttttgcaataatgcacccggccacaaatttgtcgggtaagacacacttaaggagttcgagttccttagccatggtttgtatctcatgagcctgttcgactacagaacggttgtcagccattttgtagtcatgaaactgctccatgatatacagatcattgctagcatcagtagcaccgaatttagtattcagtgcatcccacaactccttagcgtcggtcatatgcatatacacctcgaccagacgatcgccaagaacgctaagaatgcatcccacaaagagagtagtggcttcctcgaattgcttctgctgttcagcagtaagaactccttcaggtttgccagtactcacccagaagcatttcatagctgtcagccacaaagtgaccctgatctgccatctcttaaaatgcacaccggtgaatttatccggcctcagtgcatcggcaaaaccagccatagtaaaatcacagtgcctataataaggtttttggattgttgagattatagacatataatgatttaatctattccataaataaatcatgacattacagatgaaaactagcatgaacgcatcattagatctacacatgtaaactacacagtataacatgaacagatcaaatatgcgcaacatattgaacacgtaccgaggtgacgaaaagaccggctgcttggtcgaaacttttcgcaggtgtctacgaaggcacgaaacacgcgagcgaagaggaaggcgagccgtcgcgaacgaacagggagcagtcgcgcgaagcgcttcccaaaaaccttattgccgccttctcccggtgcagaatgtcaaaggcagaggttccggagacctgctctcccgatcgctggtgcacgccggcgagcgggatggagtagtctacgagcgacggcgcagtacagagtaggaggcaaaccctagattgattttgcgtatatactgcgtgaagacggcgggtcggtttatatagagaagggtcgcttgatcagggcgcccgcacgatctctactgcgcgtaaccgaaccggataagtcgcgcgtaacttatccggactccacgccatttgcacgcatcggatttttcggaacgtttccaaaacaaaaacgaatctgaatttgcagcaaaacaaaactgcaaaaggaggctgcatctgcgcaagggtgaggagccaatttttcggaccattcgacgcgtacgttgtgcacgcgcgccgcctgccctgccctgccaggccaggcaagcgagcgcgcgcgtgtgtttcccctcttctctccaccacacatgcttcaagtggctaggaggacatcctcccttttaaggaggtcccactctcctagaataagcaaggtggtactaaactccacatgcatgccatcccatgaggtgggcttttgtgattttccaaagaattaatcttcgagtgggctaaggcccattcattaattccaacaaaagtttgcagaggaaactgaatctgatcatgccctggagtggtcgttaaacagtcctgcagttggcctcacggtctcttcacttttgagtgcagggtgtgggagaggagaggaaaaaagaatggtcatgtgttgagcaccgtatggatcatgctgtcatgcctcactctgggttatggctgtgtttagttcctgaaaaaagttggaagtttggggaaagttggtagtttggaaaaaaaattgaaagtttatgcgtgtaggaaagtttttaatgtgatgtgatgttgtaacgctccgcttttcgcgaaacgttaaaaactaattcggcaaaatcctaaattgcgaaaattttcgttctttgtgtgcgagtctaagtcgtgccatggatctcaattcaatctccatcgttgttccctctcgtcgccatcaaaatcgcccacctcaagattccaattccgattcaagtctccaaatgaaattccgaaattcaaatcctatcttgaaatcctcgccaaatacatgtccccgttcccaaaaatatcaaaatctcattttgaatctcttccttgacttctcctcgagtctcccttgattcctccctaaaccctcgagttcgaatatcaaattttgaattcaaatccaaaccctaacctcaaccattcaaatcctctagaaaagtctagtttgcctcccaaaggttttgtaggccgattttgttcccccggccccaatttcccccctgcccatctccttcctcctctcgcacgttgctgtgcacgcacgtcagccgagccgagagagagagagagagagccctcgctctcttctctccctccctctctctgcctctctctctctctctttctctgacgccgctcccactcactgagccaccccgccgcctaaaatggaaggggcaaagccccctttccaccgccctatctccctttttccctttccggttcgacctctttctctctcgcccttgtccgcttgtgcttggaggcagagacgctgacctcggtgcgccagctcgccacccccaccttgaccgcgccaacccgcgctaatcctcccgctcccgcaatttgattctcgctgtccgatccaccgcctccaccgcgcccttgcatccacgccgcccacgaaccgcctttgccgctcgcctgccgagctttagcacgctcgctcccgcctcgaaccgacctcgcctccgctataaaacccaagccgagctcctcctcctctctttccctctcgttttcgcctgccgcgccttgtcgccctgctctgctcgcaccgtcgccgttcgtcgccaagcactggtgtcacgccccgagctagtcccgactggaattagcctgtgacgctccaaattaacctgttaatcgataccagtcccaggaaacagtgctggtatcacaggaagatagaatatcacagcaacagaggtctctttattatagagtaggagtacaatcatgttgggctgcggacagatcccgagctcacaactgcattagaaaagggaaacggaagccgggacttggaccaaacaacacaggcgcgacttgggaactaggccgaaaccctaaaactcatcgtaaccggcttgctcctggaagaactcctcatcagcaggatccgcttcatcttcatcagcaactagggggggggggaatatttatatagagcaagggtgagtacgggagtactcagcaagccatgggaaataagtgtttaatgcaggcttcaaggaaaggctggttgtttcgtaattgattttatttgaactcttttctaaaaacatctaggtgagtgcttctcaaacgacacggttgagacagtgcgttccgtccggtcggagtatgtgcaatgtatcaatctttagatcttaaaacaaagttggcaccccgtccacaagctttcaaacagtcaccccgggccaacaacttttaaatcggcaaccgggcctagctgt

SEQ ID NO: 13795 - DNA, 502 bp, Oryza sativa
cgtattgcatgacttgccttgctctcgcactgacgagacctcagcaacatcttcgagaaaccgcggatcgacgaaacggccgaaatctacgcgacaaacaaagcacacaagcaaaacatgctataagactactgaaacaggaaacaaaaccatttttaatggattctttgcatttttcttgatttactgagacttgaatggacttaaacggagctcggatgaattacttatgaattttagaagataaactgtgtttttactaataaagaaaagtccttaatcaatttattgcgcaataaagcccagggctgacgtcagcagaagggggggcgggcgccgacaggcgggccccgcttgtcagcggttcaagagagaggaagggggcgccggcacgtgggccccattggcagcggcacaagggagggaggtggcggcggcatgctcggcacggatcaagccggccggtcagccatggggcggtggcggcggcacgcgcggtcac

SEQ ID NO: 13796 - DNA, 2681 bp, Oryza sativa
  unsure (1)..(2681): unsure at all n locations
ccaacggcttgtttgatgggccggttgacgggcccccggccccgctccacngacgctttctgaggccgggtcgccgagaggtgagccggcggcgggcgagtggagatgagcagaggcggagatggggaatcggttgcgacttgcgagctggctaggccgaggcgatacggcgtcgtggtcacgagctgagctcgcgccttcgcgcatgggtgcgtcacggaacaggcaagaagggaacgtacaccttaagatagtttcatactctgtgctgatagaaaataacgaacaccttaaaggcaaggtaacccgcacacaactatactctatgctcatccaaaggtggctttcgtaaaaaaaaaaagagatcatatgtgtacccttatgtgcataccctctaaaatatgctcccctaccataccacactgcatagtaagccaaagcacctgctaatatgtttgaactcacaacaatctatttatcattaataatctacctatttaatatcgaagaaacaagaatacttaaatattgtgtgcaaagataaatcaatagattattagtacttgtttggtgattaaatattgcaacacacagcacagcagtggaaggcagccaacctctagttgctctggtaataaggagctatcgtctcgagagattataacccactcccctctactgggcattctatcgaacactttaaggtcgtcccaatcctgacacaagttctctaagagtttttacattcatgcgaaaagacagtagtaggcttacctctttatgcgccatgggtgatgctcgacagacagggaaacaccgcccaggtgatgctccgaccaacaacggcgacgacgcagacctccgagagaccaccagacgttggattgggaagaagctaaagccaatgggcgtgtctgggccgagggtggtgagctggaggaacaggttctacgtggcggtcaactgggccaccacgctcgtgtgcggcagggacaacatcaggatcggctgatgatgatggtttttggtcgggatttggctggacgtgtgttcagttctctgaataatccacacattctggaagagagggattggaagattctctctcttactacttgtttttctgaactaaatttcatctatgtaagtgatgatttattaatggattaattagatctatatcattaaaattttattggttttgaaatatactgttactttttgcgtatttcaaacgatgccactgctatttgtttgtaatttcattggtgctactaagatacgtattttgtatgtattggacgaaaataccatcatctccttctctctttcccgttgcttctttacatggacatggtcatacgagaagtaggtgtcaaagtacaggcccatctttttctcccccaattcgtaacttcaattttacgatgatgaacagataagagattatctctgcgggctcatcaatcaattcatgtcgggtgaggcgatctctacggctcccgttattacatgcgtgtccctagcagcggtgcgggcagacacccccgtgcgcccgttattacactaaaaactactatgtaaggttgtactctatgagtagtaggtaatggagaaaattatcttaaactagactacggacaccatggggatacttttctgatgattatctgactgacatgtaaataacatttcttcaatgatgaaaacaattttccatactggttattcattccacgcttctagaagtacgatatttttcgtattggttaatggttattcgttccacacttctagaaagtacaataactctaaaaactccctgcatcagtatccgtatcagtctgtttgattggagggagttgttgatggaaaatgggagtattattttcgagagtataagtctgtagtttggttggaatacttgaaaattcgagagtgtttgggagaattaagggtccaattcccaccaatctcttacctagggaggtctgttaattcgtgagatttgaagggaattcaatgtgaaaccaaacaaaggatggagactatgccaaacatgccctacgagttttttttttctctctctcaatcatccagtttaatttgcccttaatcaaagcagggttttatgagctaatcacaccttaatcgacattgagcaattgtacaacggtgccacaaaaaaattcagtgacagaagaaccaaaccttaggttggttggtcggtcagtcagtcactgcagcggcttgaagacctgagagtgcggcgagacgacggcctcctgcaccatcctcctggggtcgccggggtcgcgcacccacttcacctcgctcatgttgggcgtctcgacgaacagcatcgtgaactcgcccaccttctcggcgcggccgcgccgcccggcccgcagcacgaggctgttgctcctgtggtaggagaagatgccgccggtcagccgcacgatgtcgcccggctcgaacgcgtcgcgctcggcgccccacaggaggaagtgcgccgccgccgtctcgtcggccacgagcgccaggcacgtctcctccctcgcgtcggcgcggccgtgcggcggcggcggcggcgccctgccgccttgtcgagcacgatgaacgtcgtgttcacgtgttggtggccgccggggcgaggtctttgagcttcaccgtgctgc

SEQ ID NO: 13797 - DNA, 1081 bp, Oryza sativa
agaatttttcaagatcagcttcccaagatgtatcgcgagatctgagcacggtggtaactttagctagcatatttaccttcttacggccatcaaatggcttatgtacataccatttgtgagcatgaacttcgagatatgaaaggagcactttaccccttgaatgggccttgtggtgatctttgtgcacgagtgagtcgatgtgccgagcactttgtattatggtatcaatagatacagatgttcttagccccaagcagagcaacatatcaagaacttcggggttttgaaataagccatggggaaaacaatctgattcctggagaagagcatagagctcttccacccgaggatcataaagagattgaggacttttcaagaccccattggtcgtaggaacaaatctaaggaccttcaaggcttccttaaaccttggattttccaaggacagctgaggcagatcttgcaagatggttagtagaactgaatcacgaaactctgtttgcaactcatctaacctattcagaacgtacctctggtagaagtttgattttggcatgcgctcaataccataatatctcattattatatcttcatcacttggggatatgcagaagacaaagtcatcattcagtaattgctctgcaacaccaagaggtggcagatactttcttgaagtggataaatccgagaaaccataagaactgggagaccctccatcaaataccctaaaaatgggtaactttttgcatagatttatgctcatatcagaaaggtggggtcctaagtaccattttgcatcaagaacaaactgatatagttcatttttttcagcaggagtgatgcgctgaaacaaagcttgcaaatcaacaccctccaatgaggcaaccccaaagattgaatggagtactccagatgcatcaccatcatacacataattagacaaatgctggcacgtactcaaatactttgtgtctagtatcttgcaacctaatttggtcaggagttccttcatcaaattagacagtgagcctgtattaattaattttgagactgtagatgctctataaaggtgccctgaggt

SEQ ID NO: 13798 - DNA, 524 bp, Oryza sativa
tcggtagccatggcaaacgtaggcagcttgtgttgaagatactgatgcctattagtagcgacagcgatgtagccagccgtgaagaagatagcatcagttggcgttataacaggccagccgtgcaagcggtgacaccagtcagcggcggatgcggcggccggtcggtgaagacgtagacgcccaacaacggcagcataataggccagccgtgcaggcggaaacaccagtcagcggcggtcgaggtggccggtcggtgaagacgtagacgcccaacaacggcggcataaaggccagccgtgcaggcggaaacaccagtcggcagcggcgaaggcaagccggtcggtgaagacgtagacgcccaacaacggcggcataaaggccagccgtgcaggcggaaacaccagtcggcggcggcgaaggcaagccggtcggtgaagacgtagacacccaacaacggcggcataataagtcagccgtgcaggcggaagcaccagtcggcggcggacgaggcggccggtcggtga

SEQ ID NO: 13799 - DNA, 5115 bp, Oryza sativa
tcctgcagcccggcaatttagccggtggcgttggtaccatcatttcaagtagagatgtctatggtgaattcttgccaaccctttgctgacatccacccaggagtgacggtctcttacactgacgccagagagatctattcctacctgcggtcgacgacgagaccggttgcaagaatcgagttccgtggcaccatgaatccatgatcagccaatcgccatctgctccgagggtcgcttccttctcgagccgtgggccaaaccgcatcgcggctgagatcctcaagccggatatgatagcacccggtgtcgacatcctcgcggcatggtcgggagaaaacccgccaagctccatcagagtcgacgacaggcgcgtcgagtttagcatcatctatggcacgtccatggcgtggcgtcgccgccatgctcaaggtggcacgaccaagctggagcccggcggcgatcaagtcggccctgatgacgacagcctacaacgtggacaacggtggcaacacccatcaagttcatgtccacgggccaaccggccgggccgttcgagctcggctccggccatgtcgaccccaattaaccgcgctctcgaccctggccttgtgtacgacgccaccgccgacgactacatcaccttcctctgcagcctcggctacacgcgcaggcagatctcgctcttcacgaacgacggctcggtgaccgactactcggcccggccgcagaggcgcgtgcgcgacctcaactacccggcattctcgttcgagtttatttcggtggccggctcacgcagcgccgcagcgtgaccaacgtcgggacgaacaccgacgccgtgtacagcgtgaacatcgcctccccacccggcaccgcgatcatgtcgccgatgaggctcgcgttcaccgcgcagcgcaagacactgaactactcgatcaccatgtcggcatcggcggccggcccgaacacgtacaggtggggatcgatcttctggagcgatggccagcacaccgtgaggagccccgtcgccgtcatctggcagtaaattgacgtgcgagtatgcgacatcgtttcctatgtcaaagtacgtaattaaggccatcttttcagatggttgggttgtgtacttgtgtgttgtaaagtgtaaacctaattattgtacttcctgtatcagcaggaatgcattaataaataaagtaggattattgtcaaattattgtacttgtgtgttgtaaacctaattgttgtcaaatttgtttgcttaatttgttcacgtttgccatgcacagacagaatcattctttcgacacgcagaatgcatgcaggattaatgcaggagggttgatgcaaattaaagaagatgtatgaaagtgcaacactattcaaaccccggcgtccgcgcgcacggcgccgacgagcgcggcgccctcgaggacgtccctgatggccttggcgtagcacgcgcgcagccgccgcagcgcccgcctgtacatcgccgccaccacccaccgcagccgcagcctccggagcgcccccataaaccgccgcggcctcctgctgccgtcgccgagccgcaccaccgccatcttcctcctcctcaccctgcagcttccgtgcagaatcgtcacagtccgccgcgtcgtcgcgcggaacgcagcgtctcgccgcggcgccacagcgtggccggccatctgctccggactcctcatgatctccagcttgttgaaacgcttgttaatttgctgcttgtgcttggtcgcctagccgtgtccagctgcagctgcgacgacattgcttagcatttaagcgtgatctccgtatgagttggtctacgagatcgtcgagatagatgtgtcatgctgatagaaggatagaacatgctgatcgttgagtagcagttggtgtagcacgtactgtgcaggtgtgactcgtgaggtcaggtatagttgaagcaccgagcagctgtgcatgaatcatgcgttcatgctccttctagctatctatagttgctgattttaatctgcttaaactttgaatttgccatttccgtcagacacgcggccggccgatcccggtgttgacgctggttggccgagctagccagctagcaaccgaaacctctaatgggcgatcgcctagccaatggggtagccatcgggtgccccctccctccctccacctggttttttttggtaccacattatttttctattttagtaaatttatgcatctaaagtttatacacctcaagtttacacatctaaagttcactttagagaccaaaagtttataagtcaaaagtttatatatccgattcaaatttgaatttgaattcgaatattttttatatatagtatttctatacatctaaagtttatagacctaaagtttataagtcaaaagtttatatacccgcttcaagtttgaatttgaattatatccgattcaaatttgaatttgaattcaaatattttatatatatagtatttctatacatctaaagtttatacacctaaagtttaaagatccaaagtttataagtaaaaagtttacatacccgattcaaatttgaatttgaattcaaatattttctatatatatagtatttctatacatctaaagtttatagacccaaagtttataagtcaaaagtttacatacccaattcaaatttgaatttgaattcaaatattttctatatatatagtatttctatacatctaaagtttatacacctaaagtttatagacccaaagtttataagtcaaaagtttacatacccgattcaaatttgaatttgaattcaaattttttatatatagtatttctatatataaatttttctaattttttatttttttttaaaaaaaaatggtttactatagtaataagagaagaaggggaggagaaagaggggagagagagggggagtagggggacggacgcgagcgatcacccgctcattaggtgtgcccgctagcaaccgcacgtcctgtgaccatggcagcagtggaggcccagctcgaaaattgttgttggcttggctggcggtgtaacgggctgcaggcctgtgctcgttttcagcaactgaaccaggaactgggccgtaaacacgccatgaaggaataagttcacttttactactactctaattcgtgtatctcaaccgccataccagatatcccctaaactacatatgaagccagtgtgcagcgccttctcaccggtgtgccggctggattggcgccgtctcttgggtggctgcccgaaccttcttcgaatgttggctgccaccggccggcagccgccgccggcgcacacgttggtgtgctcttccgatgcctctgtgtattctcttcatgggtagatggatctactcttcgttgccgctgtgttctgcatctgtgccccccggcccccgcctcctccggctgctggtgtcgatggccttatataggcgtaaggggaagccctaacgaacagcgcggaatccatggcgctgccctgactcgatccacgttgagttgttgcgatcttcactgcaatagataaagcctctttgactcatctggtggatggatatatttcacgtgatttctatccattggattgctgcacggttgggcctagcatggatggaggcccagtagtccacgtattcgtatacgtacgccaccaatatacggccgccactagcgagcgcatgcatgcacgatgagcccgtagcctgtatagcatcttggtttgcatggtttgcccatgcatgcatgaactatatatgcacacataattgttttgcttctatttcattgttttgctgctgattgattgaggcttaatcgtgcatatgcttgtccttgtccatattactgaaatatacggacgtaaatacgcgcatgcaggccagagttaattgaacacaggtctgcttcttgttggtttgccaaacatctatagccattcgctgagcttgaacgagtgcatatatacatgccaccaagtgcacgtgcttggttcgcccatatataaatttctgaataactggcttgctttgcttttcaagccaacacagttacccagatactcttgtgtgtacaaaataccgtcaaacaatatcattattacaatatacattggatatatagccgataaacatcggctggtatcggcatcgactaggattactgcatcagcttgtcagccgatcggctctttgaactgttatttacatatcttgtcagttgcaggatcaaactgactggcatatctgcatctcatcaatattttcaacctacactggagctaagcagatctctcagaccgttgtgttcgttgacttagttcgcaccaacacagatccgatactatcagccaagagcgaatttttggtcaacacttctacgttgtataaagttacttttaaatatatttaatattgaacatgtttttaagaaaatgttggtttgaatggatcttaaaaataatatcctatttaaaatatactttatttttagtacatgacacatttttgatatatttcatcattcatcgtatttaaaaaatttaaacatcatttattttgttatgacttgatttgatcagtaaggtttttttttacttttgtacgtttgtaaaaagaatttgaacttttgtatgtttgtaaaaagaatttaaataagataaatgattgaacatatgtaaaaaaaattaacaatgttatatattaatattaaaaaaagaaaagtacgaattaccccccaactatccccgaactatcacgatagttcggggggtaattcgtaatttttcctattaaaaaaagtactttgagttttcaaggaatatatacatggagattagagtagtactagccactagacatctcaattcactatcgtatgctcggcttagtcaaatcactcgcgcagtcacacctactccctccgtcccaaaaaaagacaaaccctggtttctgtgttcaacgtttgaccatccgtcttatttgaaagaattatgaaaaaaattaaaaagataagtcacgcataaaatattaatcatgttttatcatctaacaacaatgaaaatactaactataaaaaaatttcatataagacggac

SEQ ID NO: 13800 - DNA, 3490 bp, Oryza sativa
agtggataaatcgtaatagcaaatatatgacttataattaataaaaattccaatatatatatatatatattcttagcatatatatgaatgatattattatattggtaaaaactctaattaagatattaatgtacatactgcatgatttaaaattaataaaaattgtaatcatcatatgtacttagcgtaggaattatattaaattaaatgctaaaaactctaattaacatatgtaaatgccacatgcatgatttaaaccttttaaaaattcgaatagtcatatataagtagcatatgaaagatagtaaattaaattgtgaaaaactctaatatatgaatgatagttttaaaaatatattaaatttaatacttttaaaaattctccagtcaattataattagcatatgaatgatagtaaattaaatgttaaaaactctaattaacatatgaaattgccacttgcgtgatttaaaacttttaaaaatcctctagtcaattataattagcatatgaatgctagtaaattaaatgttaaaaactctaattaacatacatatgaaattgccacttgtgtgatttaaaacttttaaaaattgtaagtatcacatataactaacatatacatgatttaaacttgttgaaacctctaataatcgtgcgtaattaacatatgccatacatcaattgatttatatggataatcaatacatccaaaatagtttacatcgtgtacacaataattacggcattacatcggcggtgacggttgaccgcacgtactttctcctcactattgttccctccttgtgatcgctgcgtgagtaaggggtgtcttcatttgataggaggatgctagggtcaatcgtcaccgtgaaagggggttgcccatccaactgatcgtaatcctcgtcagtcttgtcctcaactccgacgatttttcttttgcctgggagaaccacttgacgcttaggctcatcaggccctctgcccttctttcctttgctagacatgtccttcacgaaaaagacttgcgttacatcattggcaaggacaaaaggttcgtccgagtatccaaccttgttaaggtcaacagttgtcatcccactgtcatcaatcattacgcctccaccagtcaacctaacccattggcaccggaacagaggaaccttgagaggaccatagtcaagttcccatatgtcctcgatggcaccgtaatacgtggcagttgttccatcgtgtcccatggcatcgacacgaacagcgctgttttggttcgtgctcttcatgtcttgggctctcgtgtagaatgtgtacccattcatctcatatccctggaatgtcgcgatcgacccagacggtcccctcgccaggaaggcaagttgttggttgatcgactcgttacccatgagatgttgtcgtagccacgcggggaaagtatcaatgtgatgccgtgtaatccatgcatcggacttaccgatgtcctggcgcgaattagagccaagtgctcctcgatgtaaggagctaccaatgaagagtgttgcagaacagtgaaatgggctttacggaataaattgttgtctaccgtcattattgctttccttccgagagttccctttccccgtagtctcccttcatggcgtgattcaggtaccccgattgggcgaaggtcttcgataaattctacgcaaaattcgatgacctcctctgttccataacccttggcgatgcttgcctctggacgagcacggttacgaacatacttcttcagaacgcccatgtacctctcgaaaggaaacatgttgtgtaggtacataggcccgagaatacggatctctttcacaaggtgacaaagcagatgcgtcattatattgaaaaatgaaggtggaaatatcaactcaaaactgacgagacattgcaccacttcattctgaagggcttctaatctatccggatcgaagaccttctgcgaaattgcgttcatgaatgcacatagctttgttattgttgcccggacattgtctggaaggataccccttattacaactggtagcagttgtgtcatcaacacgtgacagtcatgagactttaggtttgtgaacttcttctccttcgtgcttattattcgcttgatattcgtggagtatccagacggtacctttatgctctccaagcattcaaacatactttccttctctgccttgctaagagtgtagctggctggactcaagtaatggcttcctttctcctttggttccgggtgaaggtcgccgcgttgttccatatgcttcagatcattacgtgcttccagtgtatctttcgactttccgtatacacctaggaagccaagaaggtttacgcaaaggttcttagtgaggtgcatcacgtcgattgcgtggcgtacgtccaagaattcccaatatggtaactcccaaaatatagagttctttttccacatcgccgcgtgaccatcttcgctctctatatgctggcttccaggcccctttccgaacactactttaagatctttaaccatagcaaacactgttttcccgctgcgatgtttaggcttcgtacggtggtcggccttatgttcgaagtgcttgcctttcttccgtaccgggtggtttgctgcaaggaatcgacgatgacccatgtatacaaccttcctacagtgcttaagatacgtactttctgtttcatccatacagtgagtgcaagccttgtaccccttgttggactgtccggataggttgctaagtgcaggccaatcgttgatggttacgaacacagcgctcgtaggttaaactcctcctgtttgtcctcgtcccacacggggacaccttccttcttccacaactgtttaagatcttcgaccagtggtcttaggtacacgtcgatgtcgttaccaggttgcttggggccttgaataataatcggcatcattatgtacttcctcttcatgcatagccaggggggaggttgtagatacacatcgtaacgggccaagtgctatggccgctgctcatctctccaaaaggattcatgccatccgtactcaaaccaaaccgtatatttcgtgcgtcctttccaaattctttaaattttctgtcgatgtttcgccactgcgaaccatcagcggggtgtctcagcatcccgtcctgttgacgctcttcagcgtgccatcgcaacattctagcattccccttgttcctgaacaaacgccttagccgtggtattatagggaaataccacatcaccttagcaggaattctcttctttgttagctgcccgtcaacttctcctggatcgtcccgtctaatcttgtatcgtagtgctttgcaaacagggcatgcttctaggttctcatactcctcaccgcgatataggatacaatcgttcggacatgcgtgaatcttatgaacttccagtcctaacgggcagactatcttcttagcctcgcacgttgtctcgggcaatttgtttccccccg

SEQ ID NO: 13801 - DNA, 5801 bp, Oryza sativa
cacggttggggtcgacgtggccagacccaagctcgaacgggctggctgcctggcccgtggccatgtccttgatggcattgccatcattgtccacattgtaggccgtcgtcatcatggccgacttgattgccgctgggctccaactcggttgtgccaccttaagcatagcggcgatgccgctcatgtgcaggcacgccatggacgtgccggagatgatgttgaactcgacgcgcctattgtcgatgacattggccatggtaggcgacatttctccggtccatgcagcgaggatgtcgacaccgggggcaatcatgtcgggcttgaggatctctggagcaaagcggttcggtccacgacttgagaaggctgcgacccttggagcagacggtgattggttgatcacagtgcctaagaagtcgattcttgcaaccgggtcggccaccgactgtgtgtacgaatggatcgtttcggtgtccttgaaggtaatcgtcgacgttggcaagatatcagcgaagctctgtaagaaatcaccatattctggagcaattgaaatgatggcaccaacaccaccggcttgttggacagcagcttcttgcactatggggttggtagtattttttgtgccatagcagaggacaatctttccggtgaccatgttgctggaaagcatcccgtattcacacagagcagaaccagcatcaccaccgtacactagaggtagaaatgaaccggctgtgttttggccgaaatacagcgaggtgccgatgtaggttccgcgattatgtccaaggacaacgtgagctgggaaccgacggtcaatgcttgatgcgccaaccgttatcacccatggtgcgaggttattagcagtatacgtgccagggccatcatttccagcggaggtggacacgactatgcctctacggatggcattgaatgcgccaagggaggtgggttcgttgtagagttgtggctttagaccacccaaggaaagggatatgacatctactccatctgcaattgcctcattcattccggcgagaatgtcagaggtagcgcacgatgcatttccatcatctctccagcatactttgtaggatgcaatgtgtgcacgtatagccatgccttgggcggtgccattggcatagccaacaaagttagcgccagggaccgctgaaccagcggcggtagatgcagtgtgcgtgccgtggccttcggtgtcgagaggtgacttggactcttgtgtctcattgatcaggtgacccatcttggcctcgtgccctttatagaaaaactttgcgccgacgagcttgttgttgcagtaggcggtggcattaaacgagcgagtggagacacaatgaccacggaaggtgcgaggtggtggaggaaacgacgagtcagcggtgaaggatttgcggcccttgggataaatgccagtgtccaagatcgcgatcaccgcgcccgtgccgccgccgtttgatgcctgtacgaggccaacggacggtgagagacggaggaaggagggagactgagtggtgtgcagttggagatgctcgtcggggtagatggcgaggacaccagggtggtccgcgatgtgcgcggcctggtgcttcgtcatgcatgccgcgaagcccgtggcggcatgggagtaggcatagacgagcctaggtgctgacctgtcacgcccagaagtttccccctttttccttgctttaaatatttgttaaataaatcgtccgaagaaattatcttaattaacctagagctaattccataattaataaatgcaattaataatcggaaatagcgtggtggaatttttcttgagttccccatgctccaatgcattaacaagatttttagtggaattttcagagccttggaaataattttaaccaattaaaaatcaccaaagtgcaatatttaatcccaggaaaatccttctcctctttttcttttcttttccttcctttttctctagatgggccgtcggcccatctctctcatcgcgctcggcacccctttcctgggccggcccgctcctcctttcccctccccgaagtcctccctccctccctttctctttcgggcgccgacaggtggggcccacctgtcggtcgtcccctacctccggtcgttggagccggagctccacccgcccgcgccgccgccttctccactccacgtcgcgcctccactccgcgcccgcacctcgcgcccacgtcgccgccctctcccccgcatctcccgcgcgcgcgcgcccgcaagtggtgggggatttgaaatcccccaacaccctctctctctcctccacctctccacgtcaccggccaaataggggccatccccggccgtttccgcccctccctcgcccataaaaaccctcactcgagctctctctctcatttcccccattcaccgtcctctcccacgccctctaccgccgtcgcgccgcgctcgccgagctccgccgccaccgcccatctccggccgcgtgccgtcgccactagggccgccgccgtgccaagccgccgccgccgctagctccgccgccgtgtgggccatctctgccaccgcctcgcgtcgccggaaccccaccggaaccccatctgcctatcgagccggagagctatccattcccctccgtctccggccagccactttggtcgtcgcggttgccttcttcatccctaactcctctcctcccctcctctaggtgtcgccgccgctcgtccgcccctcctctcgtcgggtcgtcgtcgccgccttcgttttccgctccggccgccgtgtcgccggtgagtcctccctccccctcctttcctcaccttcccgcgagcgccggccacgccgctgctccggccatgcgccgcctcctttcggccgtcgccgccgcttcccgcaccgccggtcaccgccgtcggtggtcgtgcctcgccgccgcctcgccttggtcggccggtcggccttgaggccgagccgagcccggccagcgcctccctcgcctcccctttgagccaccgcctggtggggcccacctgccaggcgccacctccctccctttggagccgctgacccgtggggcccacgtgccggcgccccccccttcgctgacgtcagccctgggtattattgcgcaataattaattaaggactttttctttattagtaaaaacacagtttatcttctaaaatttataagtaattcatccgagctccgtttaagtccattcaagtctcagtaaatcaagaaaaatgcaaaaaatccattaaaaatagttttgtttcctgtttcagcagtcttatagcatgttttgcttgtgtgctttgtttgtcgcgtaggtttcggccgtttcgtcgatccgcagttcctcgaagacgttgccgaggtctcatcagttcgagagcaaggcaagtcatgcaatacgtttgatcatactgtacccaatttacaaatatcccgcatttctattaaatgttgcattcttttacaatgtaatgtgggatgggtcctattcctcagccacatattggttaccttatgccattgataacttgggtatcaaaatgactagatgttggcttaggaaatgcttagccatgcttagttcaactaggacacaaatggggatcacattattacatagactctgactattggcatagctttagattggtgccaccgcaagggtgtcagttaattaaaatattctgaatggcgggctgtgggtgcatggttttgctggtcgcacccatggcagttaaggaccggttcacgggaaaccctgggagacttatcgtgcttaccacaagcgggagtgggtaactgcttgatctgaagcatagctcgaccctttcctaggcaccggtggcgagggtgggcgtgatggagttgggtcggccgaggtgttcggttgtccagctgccggattcaccgcggcgcaagaggggaccgcccactgccttttgaggggtggggggtgaaaccttagcgtggtgtggatggttaggggagggttatgtggagggtcttgtcacgatttccccctttgcagtatcatggtgatacttcggggcatggcgacatgtgtggaatcgtgtcttgtgggtacagttgtacacctctggccagagtaaaactattcgaatagccgtgcccgcggttatgggcgatcaaccagattcaccgtgattagtctcacccctagtttagcttaatgaactggtgtagtttaggtggttggttgggcctattgcaacgtggtgtagcgttggacagtgattggttaatattgattaattactacagctgttttactgctttcaactactgctttgaaatgcctgctttatgcaaaagaacccctagcttcctttggttatatcctgcatcatacctcctcttccggtatgacttgctgagtacagtgggtagtactcagtcttgctctcttttcccccacaccagagttgaagttcttctccgttggagccgtctcagagaggttggtttcgttgctgccgtcaaggtttgcctgtggagtggagtcgcccgctgctgaagtcaagcttcccggtttagctcgctttaatctttcccgctgcatttgtaatcttttatatttttctaagacgtgggtctgtatgtcaacaattgtcgtttgtgtaccctggctggtcctggacagggatttaatgcacattcagcttagaaattctggtttgagaatttctaggtgtgacatgacccgctatgcatgtgggaaggaagaatcctttgaaggaaggacgtatagtgggcatgagcaaggtgtgccgtgtttgctgcatgggcgtgcacgacgtgcacgatgtaggtggatacttcgtctgattgctccgcgcctacggatgtcgccaccaatgcggcatttagcaagcttaacacaatcaggaagtttttgcccatggtgacaaatgagatggacggattgattgaatagatgcgtgctgtgaatgatggagcgtatatcgaagacatgaagggccggggtatatatacaatgaaaatattcctactctggtcacataatgaccttgaaaagtaaatttcatgcatgcttaggatgcacttgcatcttctcttctctctgtgtagtttgttcttcctaattgaggaagcgagaaaatttcaaactttgcgcgtgcaccctcctccgttcaaagatatggttgcagcattgcctggattactgccacactactagtctactacagccagcttccacaaggtgccaagtcacatttttgagccccactctggtcctccactggaaaataatatgaaccattgatctcatttcatcgatgggttaagatctatttatattaccaccctacttagtgatagtagaaatgtggagatgtattattgtaaaaaaaagtgttgaggggtataatcgtcttagcagtgacttaaatatttttttctttttctttttgctttttcgatgaaatatgagcgatgtcagtggattgaatgatcacagattgataaaaaaaccgtaaataacaaagttacccctaatcattgtattagtaaattactaatttacccttaattctacttagtagtttataatattgcaagtagagagcttccgagcattgctcttcttcctaattagctgcgtgcttccgataagagccattatttgtttttaaatttcacataagatgcataaccctacacatgtacacacatatataccaacaaatatatcttctaacacacgttcaaagatatagtgatcaatgataatcct

SEQ ID NO: 13802 - DNA, 4850 bp, Oryza sativa
ttattgtaacaaccccaatagtattttagttttttaattgatctacctacttcgtggatcagcgtggaagaaattttctactagtatattattttaggagggagggaatagaaagtttcttgtataatggaagtcaccaatattaagcgaaccggcgtgacgaaatcccattattgacactgattaagtgtcgtgtcatggaattaacagtcgcattgacgaagtccctaatctagaatcagaagctaattccggcccccggttctcatgtattagctattcgctgataaaaagtttatcgcgcgctatgaattttgaatattcctcgatcaactgattattctcatgtttgaatgagtgatttctagagccaagaatagtacgattccgtgtgtaatcggaaaaaaaagaaagaggaaattatatttgagctatcgtttattgctaacactggtggagaaactctttgtagtcccggtttgtaaccccctttagtcccggtttccaaaccgggagtatcaatccgggactaaagatcgctatctttagtcccgggtgaaataaccgggagtaaagatcgatctttagtcccggttggtgttaccaaccgggactaaagatagagctgacctttttttttttttgcatgcccctgttgctgcatggtttatatatatatatatatatatatatatatatatatatatatatatataaaccatgcatatatatgtttcaatacatatatatgcatacatatatatatgtatttatacatatatatgttatgcaaatgcatatgtatatagatatatatatgaacaaaatatatttacattatagaaaatgtgtacacatgcatatagaaacatatgtagtcatgtattaattacaatccattatatgtcctagctagctacggtttcgacgtagtagtactcgctgctagctcagaagctaaggaccggtgaattgtgtttccgtcgtagtagaattcacccttgggatcaaggatttcttcgttgatgaatcccatgagttgttcttgaaccgccgcgataaattccttgtgtgtggtcaggttatccctcatgcgaataaactatatgaatgtatgaaattgattagtaattaaacaagaaatcgctacgtaatgaaattttgaatttatttgtacgtacatcgagctctcttgtggtgatgatttggtctgcaaggcagtggcaatactcgcacacgtaatagccgcacaagttagttccctgcttttgctttgcgcactacaaataaatgacaaacaacgagagatctaattaatatacacttatatgtatttgaatcggagaaatataaatgtagagcatgtgtactcacaggaaatttgaacttccgcctaagtctttctctccatttgccgcggaccaaatgacggaaccgataccaagccctacatggagtttaaagctatgatttgtagtagcaattaacataacaagattttcttaattaacaaaggaacttatgacggtacctgtctataagttcgaaaaccttgtcaaacgtagactcttttttatccattgagtcatatacgttgacggtgcaggcctccaggtcgatgagtaaaagcacccagtggaatctgcaatgtgcgtgggatgcattacatatgaaacacttagcaagttcgtacgggaatgaaatttggtatgtaggaagacagtaaaattaaactaactctgtgttgtatggcaacagtatgaacgtcttgtaatgctgcgccttcaggagatggacgagattgtcctctgtttcttgtggatattggtcgagcattgcgacgtttactttccgagggtcgatgaatccagtatcgaaaaccctccgccgtcgggccctttgaatctccattctacaacgataaaagggagtatattattttctatggtctacttatatacaaggacctaattaattaaaggagacgtatagtaagaaatctaactgaacgatatacttacaaaatccagcaactcataatagagacgtcgagggcgtccagctggtatagttcgtagattcccctgaaattgatccagagaatgtcatctccttgcaagaagtccgtgtccctgatcctcgctccgatcatctctctaccggtggcgctcatctccatgtacagctgatggaacttgtacatttgtgtgggtagggactgcagcagctcaggcttgacaagcggtttaccgagttcgtacatgtatttcacttccgccttttcgattggtgcgactcctagcaattgatccgtagttagaccggtgtcagtaataaattgttctatcgtcatttctttaccggtcaccaacggctcgatctcctggtttggttgctctccaagctgagggactggtttggactttccagaagatgctttcttcagcgttcgctcatagtccgatagcttgatggcattttctttgtttctttccatcatcgccttcccttgttcacctgtcttatatgcaacgaactcgtcccagtgatcccttagctttgggaatgtgtcgaagttcggtgtctgccccttcagtatatacttctggtacagatctcccttgaagctctgaaactgttctgccattttcttcagagtccaccttttcactttgtcctctgtacccgcaggaagggtgaatgtctcgagcattgtggtccacagcatctctttctccgaatctgggacaaagctctcatgatctccgcgtgcccttgttcttcgccagtacaccgtactgacaggcacgttatcccgcacaacccaaccgctgtgacgtacatagttcttggcggcttcggccggggcactaggacgtccatcttcttccacttccgttatgatgtgccgaccctcaagcttcttcgctgcacctcgttgcccgcgtgccctcttctgtccaacggagggttgactaccactagcctcctcctcctggttcccctccacatccctttccacgtgcccctgctggttcccctccgcatccctctccacgttcccttcctcgttcaagtactggtttggatcctcgttcccctcttcttcattccagtactggctgcttccctccgcgattgtatcgtacaatatctgttcctcatcgcggtcagccatctgtttgatacaagaaacatctgctaagtcacgagacatttatgttttaacaatctaagtcatgtatgctaagtgtaaatgtcgtacattagaaccctacacaaccttacgtgctaagtctaattacaaatcgtgatataagctaagtctaggtgacgtatattatacaaccctagctagtaaataattatatactaagtctaattacaaataaataatcttatattaaaactcaaataatattacatgctaatactaaaatagtcatgtatatgctaagtgtttcgtgcgtatatgctaagtctaattaagactacaatagtcaattgctacttgtcgcaccaattccgtagtcaataattacataccaagtctaattacaaataaagtaatattatattaaaactcaaataatattacatgctaagactaaaatagtaatgtatgctaagtgtttcgtgcgtatatgctaagtctaattaagactacaatagtcaattcctaggagtcgcaccaattccgtagtcaataatgtcatactaagtctaatttgcaataaaataatcttatattaaaactcaaataatattagaacactacacaatcttatatgataagtctaattacaggtctaataatcttaattaattgcattacaaatataacaatcatttatattattacgtcacttgcctgctccaattccttctagggctagctcttccactcaggcttgacggacgactccgacaacacgtcttttctgcaagataaaaaaatgtattaggataaatgcgaagtaacatatatatatatatatatatatatatatatatatacatgtatatatatatatatattgcatttcacgttaacgttcgtcctcgttcgttcgctcgttcacgttccctagctcgttcacgttcgttcgatcgttctcgttctcgttcacgttgtcgcggcaacgtacgttgacgggttcgttctcgctctcgttcgttcgatcgttctcgttctcgttcgttaacggcggtgtggcggcatcggggcggcggttggcgcggcggcgtggcgacggcggcggcagcgtggcgttgtggggccgtggcggcggcggcgtggcgtggcggcggtggcgtggcgtggcgtggcggcggcggcgtggcgacggcggcggcggcgtggcgttggcatgcggcggcggcgttgcgcggcgtcgaaggcggtggcgtcgaaggcgacggcgtcgaaggcgacggagagagatcgagatcggagagatcgagatgcatgaagggagatgcggcggctctcaccccagagatgcggcggcagcggaggaggcggaggcggcggcgaggacgacgagctcgagacgacggcgagatacggcggcgtcggcgcggggatttgccctaggcagtggcggcggaggagagaggccgagagagatcgatcggccgaaaacttttaagtgttggtgaagaagacgagggcgcaccgggaatatatatacccctggatctttactcccggttgttctcaacaaccgggagtaaatatcttttcccgctatttcgaaattctttttaaacccggttagggttaagaaccgggactaaagattaagcactgcatatgattttcgcttacatatgtgtttataaaatag

SEQ ID NO: 13803 - DNA, 12983 bp, Oryza sativa
aaaaaggagggatggaaattagacttattttagctatacatatgtaacaacccaaagagaagggacggaaaatatacttatttaaaaaaggcccgatgggccacccgtgccttcgggccggcacggcccgatagctggtgggccgtgcctgggcgggaggtgcagcccatgggccggcgcggcccggcacgaagtgccgatcgggccgtgccggcccgttggctggtgggccgtgcctgggctgggccatgacgagcaaaccttttggccatctatattttatacccagtgttctcggatgttgtgcccacgtctacggggggagtccctgcccggtgggccaggctttagatgtctggtccatcatacgggggaagaaaattatacccatctagaaagacttttcatctggagtgtcatgtgtccgcacgaatcttgatgtagtcatcttctatatgagctcaagtgcagagtgccaaactttccctttaggtcctgtataattttcttcccatcagaggggtcctcacttccttccgaaaatgcttacctccagacgccggacacgtggtaaaacgttagaagttctcagcacacatcatatttatctatctatgcatgcaacatctctctgttcaatttttatcccacttatattttaggatggagtagaaaataaaaggtagcaacgatggacaggtaaggcctaagggcgcgagttagctagcgtgtcttcctttcgtcgacggagtcggtgaggccgtgagggtgggcagctgccagccgagcggtgcgccgtcaatgggtggtgcagtggggacaagcgaggtggagctactgggcggtgtgggcactccaccactcggctagaccggtgcaccggtcgaagatagagatggatgtgatgccaatgcgctcaggcagccgccgcagcgattggatgggctaggccaccctcgagttgttttgcacccctgcaaatattcggcttggttggaacctagaacgagataaacatcatctcgcttgtaagaagttcaaataggccaacggagtctatatgggtcaggatgccaggctaggtgtgcatatccggagtacgtcccttcgggtgcgtttgtttctcacgtgtggttgagattttcagccgcacgcgaaaaatgggatttaatttgcacagataaaggacagagtagaccgcttgtatccctacatgcttaggtttgcttaaactccaatttcaaacttgtacctagaggtggtaatgggttagaatttatgggatgttcacaaaccaactcatcccttaaatacttttacctcgaaagtttaaaatttcaaaccacgctttttagattaaccctttgaattttatagattaaaaagttaggcccattacacccctacttgtacctaagttagcacggattgattggtccccaattttacctagtacggtgacatcgagtgggaaagtcattgcaaatttcagaatgtgtcgtatcaagtaccttaatgaagtacaaacttcgtttgacgtcgttatttctaaggtatttttttctcgaaggacatgaagaatccgatcaatcgtaccaacggaccacgatgtgataatctagaaactatcaacatcacaatctacaagaactagatcgaaaagctggttttagaacatgcccttgaatcgaacgatgttctggtgcgccacctaaagcactcttataggccattcatacgaattttgcgtaattctggttagaattatagacagttacagtttatagcacaaaggatatagccctgacttctcttatctaaaagaaagtatacatgcataggcaccatagtccatagctaaagctctccaaaacaattgatgtattagcttgtccgtaattaataacttatcagcaacaaagcaacaattcaataacatctagggatttaattcagctagttgctctacaaacctaaataatcattaaggaatggaaaacgctgaacaagtgaacaatatgttcgttaaagtcggcatagcaagcatcatcgaaagcgttacgcaattagatatgtataagagctcaattctgcgttacaaaaatattgaaaccacaatagaagaacagaaatgagtggtggattcctataagaacccaacatgcttgccgttaattccacatttgattggaagtattaattctataggagtatttaattgttttcggaactttatagaatttaatttggtcatatgaccaaaaactcactggtggagaaatgctttttagtcccggttcgtaaccccctgtagtcccggttttccaaccgggactacgaatccgggacaaaagatcgctatatttagtcccggttcaaataaccgggactaaaaatcaatttttagtcccggttggtgttaccaaccgggactaaagatggagcatcaccaaccgggactaaagatattttttcttttttttttctgtttttaatattgaatattgatttcacaccatcccctcccatatccaaatcatcacatattacagaacatctccaaattctcaaacaaatcttctccaaatacatcacaaactcttaaaaaaaattacatcacagggttctaaaaaattcatcacagattcacatctcacataaaaatacatcacagattcacatctcaaaaaaaaaaagaaaaaaaaatccggccggcggccactgccgcctcccctcctcccctccgcgccggccagccggcgctgcgccggacgctgccgagcggccgcccaccgcagccgccgcctccgcgcggcccccggcgccgccgcgccggccgcccgccgccgccgccgcgcaggccgcctccgcgccgtcccccgcgtcaccgcctccgcgccggccgcttgcacttggtgaaggaaaaaaggaaggagaggaggggagttagagataaggaaagagataagaagttagagttaaaaaagagatagagggaggagtttgttgtgtggacgggaaaagaggatcggtactatagattatatagtgtgttttgatttttattcccggttagtaacaccaaccgggactaaaaacctaaagatcatagggccctaacacagcctgacatggaatcaaccgggactaaagtttccaaccgggactaaagatgatttttagtcccggttggtaacaacaaccgggactaaagatcttcctcttattaaccgggactaaaaatcatttttagtcccggtttttaatggaaccgagactattgtggatttgggtcgaccgaccaaagatgatttctctaccagtgactgaactatttgattggaagtattaattctataggagtatttaattgtttttggaactttatagaatttaatttggtcatatatatagttcagtttttggtcatgaccaaattaaatataaaatatgaagtaatatttagatttatttcagccatacaatgatttactataacggggtgtctggtctcactcgaaaataccaaagagatttcagtgacttttgaatggctcatatcgtgtcaagattcatgcatcatggatattttacctgatctgtttccccttccaccctgcaatgcatgcgagcttgactgctcgtttcctcacgcgacgttgcctctcccacctcatcccccctcccgacctcattggcgctgcgccaccgaatgccgctgatatgtgaccagccgtgcgtgcgcagccgcacggtcggttggtcttataggtatatattcatatgtatatattttgtatacatatgtataaattttgcatgcacgaatgtatgcaaagtatatacgtataaaatctgtatatttatctaaaaatattgtgtgtaaaaattttatgcgtggcatataaattacatgaaaaatatacatacacgtacaaaactttatatgtatactacaaagtttgtatgtatacaaacaaaatttatatgtatacatatgaaaatttgtatatatatatatacactttttttatgcatattccgtacgtatagaaactgattgcgtgatcaatgcacattagcatttttgggcgccaccaagtgctggcaaggtttgccaaattgggctcttcccgctccctcctctaaaccaacaacgccgatgctacctcgtcgcttaccgtgtcatgggaaaccgtccctccagccggtctctctccgctcttccaacccttcctcccgtaactcctactccaaactctaaaccctgccccacactaacacgaaatcgttaacgttgtcgctatcattgatgagttaccccttttctctcccttctcctcctcatccggaacttggttccctggccattggattgaaatccaatggaaatggatgaggtgacggagattgagagaaatctcagtcacatgaaaactagcaattccctctataaatatcaagtttgactaattacttttttaagactcattgtgccatgcttcaattcatagacaaattgcattcataatatcttaaaatttaatccaaataaaatattaaagctaagtcaggggcgtagctaggggtagtccctgtgggctcgggactaccccaaaatctggcccagagacccccacccccccccccaaaaaaaaaatttaggcccaaatagcccagaaacatctagggttggaggattcccctccctcagcgtctcagccaccagccagcgcccagcagcgccagttcgcccgagaccctgagcccgacgccgctagccgccagcctcctcgagacctcgactccgcgccggcgcccggtgccgtcctcagctggccggctccctgctgtccgcgccggcgccgccaccgccgtccgcgccgagtcaccgacgctgcgccatgccgccgtcccctcccctccgtggctcagccctggtaagaaatagctgcctaaatggctagatttgtgaattgtgattagagaattaatgagtctgtgaagtgtgaataactaagaaagtgagaatgcaatttataaattgttagattaatgaatgtgtgctaaatgctaattgctattgtttgtaggatttataatttgttatattagtggctttttaattttttatttatgtgtaagatctatgttgattgttgaactctctatgttgtaatatttgcacattttgaacttgcttgttaagtaagccgcttatggatcttggaagacattatttctatagtattttcactaaatttgtatttgtatatcagttttatggtgcaataaaattttaccatgtgacatgaatgtgtgaactaggactacccaaggaaaaattcctggctacgccactgatagctaagtattcattcactcatatgattaattttattcttatcaatatgttgatgactaaaaattcaattgactgtgtgaatcataggttaaagactctaacaaaaggcaaaattttgaaaaacttttccacctaaaatgatcaagtatctatattacggagagtgcacatgcaaagtttgaaaattttccctccctcgttaggaagtacaaaatacaaacagatgaaagtccatctaatctatctatgaagtgttctcaaagtcattatgtagctagaatagtactattttgcttgtatatataccccttgatgcctttatcataagattcaccaattcacaacacacaccatgcatctcaaacaaatttctatggtccatccggacatctcatttgtctccatggggctgggcaagacactcttggtcgtctttagcttgctacatgccttagtgttagcaacatcagtaggtgttgagcatgcaacagatgatgtatccacctacatcatacatgttgcacatgtgcatgcgacacctccaactcatgcctcgcaatgcatggaccagcacgccattgcacactacacctcctttctccaagggatcctcccttctcacttaagcgagccaacaccacgccttgtctatgcatactcccacgcggccacaggctttgccgcgaagctagcgaagcaccaggctacacacatcgtgcaccatcccagcatccttgccatcttccccgacaagcgcaatgagttgcagaccactctgtctccctccttcctcggcctctcaccgtccaacggcctcgtacaggcatcgaacgatggtggcactggtgcagtgatcgcagtggtagacactggtgtttatcctaagaaccgtaggtcctttaccgttgacccatcactgcctccgccgccgagcaccttccgtggccactgcatctcaaccccttccttcaacgcgactgcctactgcaacaacaagctcgtcggtgcaaagtatttctgtagagggtacgaggctgcattaggccaccccatcgatgagacgcaagagtcaaagtcaccacttgacaccgaaggccatggcacgcacaccgcttctactgccgcaggatctgcggtccctggcgccaacctatttggctatgccaatggcaccgcccaaggcatggctgtgcgtgcgcatattgccatctacaaggtgtgctgggcaaaaggatgttatgattctgacatcctcgcgggcatggatgaggcgattgcagatagagtaaatgtcatatctctttccctgggtggtcggagtgaacaactctacaatgaacccacgtccgttggtgcattcaatgccatccgcagaggcatatttgtctctgctgccgccgggaacgacggccctgacatgtctactgctaataaccttgcaccatggatggtcacggttggtgcgtcaagcataaaccgtcggttcccagcaaacattatcctcggaaatggcgaaacttatgtcggcacctccctctactcaggtcggaacatagctgcttctttgataccactagtatacagtggtgatgctggctctagattgtgtgaacctgggaagctctctcgcaacatagtcattggcaagatagttctttgcgagatcggctatgcccccgcacaagaagctgctgtccaacaagccggtggtgttggtgccatcgttccaagtagaaatgtctatggtcagttcttcctgagttcacccgacttgatcccggcatcaacagtgactttcgctgacgccaatgcaatctattcgtacacgcaatcggcggcgaacccggttgcaagaattgaatttcgcggcaccatgatcagccaatcaccatatgctccgagggtcgcggccttctcgagccgtggacctaaccgctttgtggctgagatactcaagccggacataatcgcccctggcgtcgacatcctcgccgcatggacaggagaaaactcgccaagctccctcagcatcgacacgaggcgtgtcgagttcaacatcatctctggcacgtccatggcgtgccctcacgtgagcggcatcgctgctatgctcaaggtggcacgaccagactggagccctacggcgatcaaatcggccatgatgaccacggcttatgaggtggacaacggcggcaacgccatcatgtcgtcagtgaatgggcgggcggctgggccatttgagctcggttctggtcacgttgaccccaacaacgctctcgaccctggccttgtgtacaacgccaccaccgacgactacatcgccttcctctgcggccttggctacacaccaaaccagatagcgattttcacaagggacagcacgacgacctactgctcacgtcggccgcccatcggggacctgaactacccggcattctccatggtgtttgcgaggtccggtggtcaggtaacgcaacgccgcaccgtgaccaacgtcggggcgaacaccaacgccgtgtacgacgtgaccatcaccgcgccgcctggcactaggctcacggtggcaccaatgaggctcacgttcaacgcgcagcgcaagacgcttgactatgcgatcaccttgtcggcagggtcaagcaactcgccatacaacgcgtggggagatatcgtctggagcgatggccagcacatggtgaggagccccgtcgtggccacctggaaataaatcaccacttgtgacattgtatcgtacgtttatagtaattgaaggccatcatctcagatggtgccatgatgtaaacgtaacatacgtagtactgtatggatgaacccgggaaaaacgcgttgtcatcgttgttcctgctaccgctagcacttgctgcttggctgctactgtataatcagcacgtatgcattaataaataaatctgaagtaaattgtcctcaaatttgtcaatgcatgaagagataaggacgattgtgcaaggttagatgtacgtgagtcatgaaagtacctattggaacaaagtccaacagatatgtctgccaaagaatcaaatatctgccccttcctcaacatggcggttactgtattttatagagggctaagtacatggaagattacaaccatagccctatggctatgggcagcatataggcatttctaggcctactggctgaccggtgggcccctctagaggggtactatagagggatttcttggagggccgccgagcagcccatgccggctcgcaagccgacagtaatcctgggaatcttgggtctggaccatccataataagactgagattaccggcctcgactacagcaagcaatgcgggcaaccagagtttgaccacataggtgggaaaattcaatgctcccattcatcttcctatctctacctctccaaggccacagccccgggtccagatccacttgctcctctaaagacgaggtagacggtcctggcttggttaggggtggcctgaaggctccacatcccttcgggggtggggtggaacccctctgacaaagagaaagtgagcatgataaatgcccgtttgggtgagccgatggacccagagggtccttcagagcccatcccccaatagtacaatggagcatatccaacgtcaatcgatttatttgatgtacggccacgtttaagtttaataatatatgatggtgggacccatgggccaacatcaccgatcaggagaagtgatctttgcccgaatgacaaaaatcacattagtgccttttcaaataggaacagggactaaagaatatctttagccccagttcaaaagtccaatggtactttatgatctttagtcatcatttttagtcccggttcaatagctgttaggccgtgtcaggccccaaacgatctttactcctagttggtatcaccaaccgggactaaagatccagttgatatcaccaaccgagactaaatttctctctcccactttcttatcctctcttgcctcgtctctctcgatctgcccacacgaccttttatttattatctctctcccacgctcgcttgctctctctgtctgctgcctctctctgtcttgctcgctttctcgagaagcggcaatggcagccgggcggcggaagcggcggcggcggcctcgccctcccctccgttagatccagcgagaggagaggccacgcagcggtggagctacggtggctcgacggcgtcggcgcagccgtgcggtaggcggaggattttttttttttagaatttgtgatgtgtttgatctgtgatgtgaatctatgatgttatctgtgatatatttgtgatgtattttttttagaatttatgatgtatttgatctacgatgttatcttatatgtgattgggggatgtagggagcaacttgatttgggaaaatcaatatgcaagaggtaaaaaacaaagaaaataaactcatttagtcccagttggtaacacaaggcgctaccatctttagtcccggttgttgttaccatttttattcttggttatttcaatcaggactaaagatgagcatctttagtactggattgggtgttccggtatgtaacccagaactaaatgaggttgcaaaccgaaattatgagttccccagcatgactccattacacatggatttatgtagtgggtcagtaaacatgcattttctatgtctttggttcgaaccaagaaatttgtttgattttacgtgtcagacagacaacgggctaacgggcttgtttggtaggtgacctgactgacaatctatgcatgtgtaatagaaaagctggtgtttcattgtgcctgaccaggcatgtctatgttttattgtttggttgaaaacctacgcatgagtgaatatatatattatatataaacattacgcttgcttgagtgagatgttgacaagtgttaatagcagtcacatcaatgaagaatcaatggggaaggatcagacacataaacacgcccgactcaggcgtttcagaatattacattcttggtcataattaaatattggactgccgaaaccttcaaccccaaaattaagttgccctttttacggtctgccttttatcatactctacatccttcttaattgatcagtatagctcttgcccttaccttaaacataaggtttccctttgaatatgcaaatttcatcatgaatccctgatcatggcgacgatagcttggttgacaccacacgatagtaatatctacggatcatattgcttgcacaagcacactataacttttgcttaaacttgaatttcaaacttgtactaaaattactacggaatattcatatctagatcggtaataatgaatgtggaaatcgttgcaaatttcaaaatgtaatttctatgcgagtactatcggccacaaaattcatctggccttgttgtttctaaggaggacgaggaaaaacagctcctggctccatttttttcaaagaaagaatccaatcagttgtacccaattgggcagacaatgagataagaacaacataatctacaatagctcgaagattttggtttcagaatatatagggcttggatgatgtgtcagcccaccacctaaaagcagtctacagggaataaaaaacacgaaaatgctatacgtccgaccgacgcgtacaaacagcgtacgactacgtcattggccatccgccgtccgtaacttctgcaacgatcgctaattcaattgggtttacgccgtgtatttcgccgttgagtcgtacgctggtcgtacacgtccgtcggatgtatagcagcgttgaataaaaaattaaacccccttgatgatggccaaaaggcacaatttcgtgcatggttgctgtctatggcatagactggaaaacctttcgattattatccaaaaggaagttgatctgcgtagccaatatatgctaccctgaaacaacagacggcttagatttgttagtaacagagcaactgcaataattgaacaaccctataggctatagctagtagttaattcatgccgtggccttacgaacgtctatacgtacctggacaacaactcatcggggcatggacagcgaccgaacaacatggattaattaaaattccaaataaaaagttaataaaataagcaatttgattacaatacaaatcccaaaagtaacataaagttttcactaaaattcgaaattgaaaaaaatacagtaattgtccatgtaaaatatcagagtacaagcaattaaatatctgaaatttggaatagtaaaattatatgtatattggaagctttcctaaactaattaaactaataataaagatgaagatgagtatttgtaatcttaaaagttagtgttgatagcgagagatgtttcttaattatttggaacgagaactatcatgaatatacaatcccatctttggtggtgaaagaatgtcccaagagatggtgaaaaaaaattccaatattagtctgaaagtgttggaatgagagaaacaaaataccttagatttttatatctttgagctattgtttgtgtttgctttatggacacagaaattaccatgctaattaaccagaatatagatgtaaaccgtttgatcacactggagcagacggtcagagttcaaaattattatcattttcattttttttctttcacaattaaatacgaagtctttctacctttttttcaaacactaaagtataaccactattatatgaaaaactatgcgatgatatatgctagtagactgcacgcaatgtgtatgagccaccccgctagttcattggaaaccttacaaaattggatttgcatgtaagctcaaatccacatttaaaaagggtagaaatcatttaaaaaatgtaaaccaacaacaggtttatataataaattggtatcacttcacggatatggtgaaattatacataatataaattaaaatttaattaaaagggtttatctcattgccaaacattggtatcttatactaacatgtacaatcaaatttatcaaaagaaaacatgtttaagtctaaatatagcataaaactataaatttagcaataaatgtataataaaaacatactttagatgtttattaaggcgacggatcagactgataaaaagaacgaagagattgagttgagagcaaaggagaaaaagaacaaatgagcggaggtagggtagcatcctttgattttaaaatagcttgtcggtgcgtggtggactcgtgtgactggattgactcaaaaccaccaactgaaaaaaataggtctatttttatgagcaaatctactaaggctgtgttcttttcttcaagttcccaatccatctccttcgtttttcgcccgcacacttttcaaactgctaaacggtgcgttttttgcaaaaagtttctatacgaaagttgcttaaaaaaatcaaattaatccatttttttttaaaatagctaatacttaattaatcatgtaataatgcgtgctccgttttacatgccggggatccctcctcccgaacgcagccttaagacaaccttaaccggaggagtcttatgtattttttaaagcagatcttcatttagcctgttcgtaaaaatgatgggttatctgcaagaatggtttt

SEQ ID NO: 13804 - DNA, 1164 bp, Oryza sativa
ttttgaaagatgatccatcagcccgtaccagctgggttgtcttctaatttttcatcagcaaatggcccaaaagaccatatcagaattggaccaactcagcagcagcagcaaatggcttcctcctcatgcagaaacaattctattcccatagtgtgattgataacgattttcaagcgcaattgcgcaatggaaggcctagaatggatgcaaaggcgagatctcagttgcttccacgctattggcctagaataacagatcaagagctacagcacctatctggagagtatccaaaaaattctatgtatcttcatcagcaatttcctctagataatatagatttactagtaaatactgtcatttttttcacgtgtttttttttgtttaaactcttgcctgttcttaagtgtttccttaaccctccaacagctcaaattctgttattacccctttgtttgagaaaatgttaagtgctagtgatgctggacggattggtcgtttggtgttgccaaagaaatgtgctgaggtgagttattcagttatcgttttaaactgtcttttcttttattagattgtattactgaactgtttattatgctaggcttgccatgcatgggatctgccctcattagtgtttactaataacccatgtatgatgtatggttatataatctgtccttttacttttactaggttttgcaacttatcccgagtcatgcacagatatttgacataatctcgtgatttggttatatatatgtgaataagcttgtgatttaaaactaatctgatgtatgggaacttctatagaaatgtgggttatttagaattaccagcaactattgccttcattttagttgttttaaccaaaagtgggttgaaatcagttgatgctacattataattggatgtgcagtcattttacatactttgctgatcacctccaattttgtttattttattgcataaatactcttctaacaaaaaaaaaagtttcgaataggcgtacttccctgccatctctcaggcagaagggcttcccttaaaagttcaggatgctactggtaagaatgggtgttccagttccgcttttggcccaataataacagcaggatgtatgtattggagggtgtcacaccttgcattcaatcgatgcagttacaagca

SEQ ID NO: 13805 - DNA, 21001 bp, Oryza sativa
ttgagcatgttcctcactctcgaaacataactgtctttcaatatagattaacagtgaagattagcaaagctcataagtaaacaccatattacagcaacagagaacagacaacttgcctgcaaatgctgcatacaacaaactatatctgcttggatgcccttttcttgcatttgagcttcaaagtcatcctgttgtataaaccactaaaagtgtcagctataaactactcatgctagaatgttagtgtatttagttgcaagtatgaaaggagggatggaggttgtacagcagaaggatctaactcgatgaactcagacgtgaaaagtttctttctgctctcccacagctcacgagcatcattgacacctgatgcagaggcatctattgtagaaagtagtatgttcgtcaaattaacaagacagactagacaatgtaaccatggagaggcttaggctagtgtgaattatcctaccaatccctatgtagtgaccaatttgtgcatcgccccacttgtctgtatcaaccccaccatcacaatacaggtcacagacctattgtatttcacaatcaacaaagagaagcatcagttttctgattctaagattcacgctgatctggaacatgctgatctggaacaaaatcgaagatcaggaaagaggggagcagataacagaccgtggcataagggaatgcgaaaatcttgataagggcagtcttagcaaattcatatagccgatgatgcggtgtcactgccatgcactaaccctgcaattacagatagtaggacatgagccaatgatgaaaaaatatttctacagatactgcaatggtggtgttgagcacatactaaaaaataaatcgcaaaatcaaacaaatctggctttactaactcagataataatagcacatgcaaccgctaacactacgcttccctagttccttagaacttagaaagtacaccaaaggtttagggtttaggggggtgaattaggtcaaagtaattcctgctctagtgacataattagcaaaaagcaatcgagttctaagagcttcccgatctagaaactgcaatagcagcagctcatcctcgaaaaaaaaatcaacccattcgacagtgcccaatctatctaccgcgcgcggcgcagcaggcaatgcggggacaccaacctggtgacgcggcgaccggatgaggaggaagaagaagaagcaaccggcacccgcgtgctggacgagaacccagcgacgagccgcggaagggggcgaccgcggcggcgagcgccaaaggcgggcggcgcggagtaggcggggaagcaggggggagtcgggctgcggctgatcgaagcggagggtgggtgcggaggccgagcacgcaacgaagggggaggaggagaaggcacgcgcggatcgggcggcgaggcgaggcggagagcggaggccggaggccggagggaggagaacagcgttgctcacaggcacagcgaaagagagtcaagagtcagagagagagagagagagagagagagagagagggctgtttggggagctggagccttcacccttcagctctcacaagctctgtagatcttcacaagaaactgtaattgtaaaactaaaaaataaactaaaagtcaaaatattttcaccaattagcttatcagcctcagatagcggatctaaatccactcaagaacggtaacatcggatttcgtgaaatccattgataaaccgataaaacttgatccaaaaaatgaagaggtttttgtttttaaccaaatccgaaaagtccacatttttggatttcattgaattataaccctgggcaaacgtagcatgcggaaataggaatacctctgtgtgtggccatacggcttgtgagtagtagggttcagaatgtcgataaatttcgatcggatttctcatcgtctcgagtgtggatttcgtttaggatttgtcaaaattcattgacagacccatcatttggttgataataagcaaaagcgtaacgttacatttgcaaataaaaaataatttgtgaataaaacttttatatacgtgttcttaacgatttaaaagcaaaggccgaaaaacaaactatgatgaaaaagaaatcttaaaatcaaatatttaaggttgaaaatttaaattttagctgataagcataagcgaaaagatgagaggatgaagcgtggcaaaattagtcgacgtctcgttgggctcaaatttcactggtcaatcgagatcgcaaacccactcgttctcgttgggaccagctttcactttgtaaggcccagctcactgcagactgcactcggtttaactaacttctgtaaattgtccctttcttttttaggtctgacatctaccgggcagccacaatgtagcaataggagagggtcttaaatctctaaagtggtcattatacattgtgaaagtaatccatatagtagtctttaagataagctacccataatgtcataagaataaaataacaatactttctcttctctctctcctcttctctctcacatgccatataattgagtgaaactagtaggacccaggctaatgccttctcttgccatatatattgtagcaaacaccataactaataccgggtcccaccttattgcttaagtagacattatacattgagcatgctctaatacgcacattttgacagtaaaaatgatgagagattctaatgggaaacttccgtcccctccagattcctgacatgaccacaaacctcagtaagaaacttcttagctagataatttcagtttagtctcaatccctatatataatacctccatttcaacatcaaaaaataatcaccttaaccagagaaaaagggaaaatcatgagtttacctccaccccaaattcatgcgcaacacatgtggcaattccaataagaacataaacattggttgagaggactaccgtaagtctccacgttaattaactaaaaacaagttatacctgatatgtacatacgacatgtacaacgagaaacaatacaacatacatgatgtttcgtgccgttcttctctggcccttggagtagctaattagtatacgtgcattgtgcatacaggtatagatagatatattttacattgtcaggttagggctcaccttcttttttccccctaacctccttttcttctcccagattgtttacctagaagacgatgttagcacaggttaacatggagcagaccaggctatggctgcgtgtgatggaggccttcatccaggaggaaatgttcaagggcgtccggcaaccttgcctcgcgagagcccttggtgtggtgtcctgttccaatgcagatcatgatctgtgccttctccagctgaccttgtagcacccatcaggagggcaagctcagccttcacaacctggatggcttcgctcacctgaagcccatgcaagtcgatcagacggtcctggccttgttcagatgaaaatgggttcctgcaacgaagcaggggaagctaaaaaaaactagatgcgcctttagagtgcgaaaagatacttgtatgcaagaggagaaaagatgaatacaatgtgcagtccaggtcctggtattttgttagtggtcagtaagttggcaggttgaaaaatacttttatttatgaaaggttaaggtcatgtcaattggttatcagggagttaatccacctttgctgataaatagcttccctagctgtctcatgagctgccttcatttgcaggttgtacaactgtcccttcatgctcagttcctttgctaacgctttgtttcccatcatataagcttgcgtggcctgccagaaaatattccaatcatccaaaataaacattccactagatcaaaggacagtgatcaataaatggaggtagtcaacacaagaaaactcaaagcaagtaaacaaaatgatgccatgaatacattgtgcaagatgaacatgcaatttaagagtgcttacttgttcaaaacatgtattgcgtatgcgggcaaaatcaccagcttccccccttgattctgagcacatgcttgctggacagtagcataaatgcaggctatcaatccataactggagcatggtcggaaatcaaaatgtctggatgagaatattacccatggcatcaccagtctttagactgactggggctgagtgaacattactactggccttaaggaacttgtttcctaaggaagaccttgtatcacagccatactgtttccgcgcaacaatactcaaaagaccattagcatacttgggactttcatttttaaacttcatgtggccagcatcctgcaatgcaagtctttgaatagctgaaacaaaatctccagtcctagacattgttgaagagttgtgtctgtttgtaattccatgggcacctacattgccttcaaacaaacaattaaggtcttctgttccaggtagtacagggaagtttcctgtgccaatgtttggtgtatttggggccagattcagattctgacaggagctagcatcaacttgcatctgcaatcaaaagaaaaggtcggatttgcgtgcaagtactgcattttttttaagagaatgggaaaatcccagcctacatatatatgccacaaaatctccagaacacaacatgcactaaaaggttttaaaaaatgtaagacaaaaaatatgtacagttaaatatagatatgctctagctttaagggtcaactttgtactgttacacagaaaatgtaatgtcccatctataagtaccaagcagaagttttaaaatttttacttgaaaaaagaataactttaaaacaaaacgatctgcctacaggtcaaaagaggctaaaacaataagatagcaacacaaagctctaatactaatgcatagcagtatagcacgaattattcatacatacagtttgtgctttgtactgacagcctaatgcagcagctaatagatgagcaaacggaagttgagtgaacattatactagttttggtcattattctcacttagtgaagatgtccaagttgttagcaccagtcaaagcaaagtaatagaacactacattataatacccaactctgcatcccagcaaagcaattaatacgggacaccacaatgttgcgaatgatgggtgcacaactggctatcaagacaagaatattttacagatttattttccttatattaatatttaattataaggactagattaggagatcacctctaactgagtgagaatttcaacagtaaggtcgaagtcgcaaccattagcacagtacaactcagcaaggctctccacagaaaaaccaggaaactgggatgctaaatactcaagtgggtcatgatcataaaggaggtcaagcttcccattagtataacataggttatctgcatgattttgcttcccactgtttgaacctgaattctcatcataatacaaatcattgtgccccaggtcaagattcttgcctgcttgagacaataacccatgatgctctctcgacaagttgctggctgctgtgccaaagaaagggggtgcattcaatgacaatccagaaaatgacaattctccatgttgctgttcaactttttccatatcactgaagtctggaataatatcatcaggaagctgtctatgccaaaactggtgtgtttcatcatccgagttattagattttgatgattccgacctaccaaggttcgttttaccagagagccccctaaaatctggtttacttacatccgcaactgttctacttccaaaaggcgacctaaaagttgaagggacaaattctgctgcatttggatttagggtggtaactgtacttggtaattttgaccctgcatctccgccttttgtagaaaatccatgtgaactcatcttcttgcagattctgtgcaatgtcaccagtacaaggtaatatatccagatgataatttatccaagccatggaaaacagttccagcagtaagtaaatgctggaacatagtggcaattggcaacagccatttcctattctaggaatactaaaatttaactgaagaaaaaacattccaacagcgaaccaagaatatgcactacacagtgatatagactatttggcagcatgggaagaataaaaaggaaagaagacaaaaataggtcatcacaactagataacaagaatacaggtagacaatgtccagaaattacaaagctacaagcaatccactttcgctaatataactaaccttaaacggtcagagattttcccattctaaaaatgctactactaaaaaaagttgcaaccataaatgtagcaagcagcctgcttccccattctcacagctcataaaccaaacaacgtctctcccaaaagccacgaatttagttagcgttaccaccacggtagcaagtgaaacaaccaaagcatccactctcacaccacccctagaaaacttcgcccaagaatgtactccaattcagtctagtagtattgtttttaacagaagcatataattcttcgcaaattcgcaagtggatggaaaacataaaggaattttgtcaaggtaggtgtgcacaaaggcaaagagtgcacagttattcatgcccacagctctaaagcggaaacagaaaggaggccttccgcacgggaacgacgcacaaccacccacccaccgcacccagcccagccgaacggggcaccgccatggattccaagccagatctaggaggaacacgaggaggagcccctgagcccgcgtggcatgatccaaatgggagcgaaacgaaaccccgccgcacctttccggcggccgatcagctggagcgcagccggaggcggccggcccatatataagatggcgagccctcgacggagagcggcccctccggcggcggcggcgggttgattgctcgaccgcgtagaggagtagagaggagagggagtggagatgaagatggtggggaggattccttggaaggaatggaagagagcagtatcgggggaaggagggcgtggagtggagtgaagtcgtcagcgtctgggcgaggcgaggtggttgcggtggcggactcgcgggagcgccctgtgtacctctacctgctcgccggggtggcgcgtcaggattggtttccggtcgcagtgctgatctggctgacacgcgccctctagtaatagggctgtgtttagttcctgaaaaagttataagtttgggaaaagttgaaagtttacgtgtgtataaaagttttggatgtgatgatgtgatgtgatggaaagttgaaagttagaggtagttgggggtgaactaaacacggcctaggggtgagtttgagaagagaggaaaatacgcaaaacgaggtgagtcatcagcgcatgattaattgactataaattatttataaatttttaaagcaaattttatatagaatttttttttgcaaaacacacgttgtttaatagttcgggaaacatgtgcgcggaaaacgaaacaaactttctcacgatgttatcctgtccaacgcctgattttagggggctgttcattttaaagctaaaatttagcaaatgtaaccatctaaatattgtcaaaagttgactcttaagatttggtaattttagaatcttcttctcataaaaacttataaaggtaatagcttgcacatcatagccttatcaaattcttcctctatccgaaaatgttgttatctagtattttatccgtttcatattacaagtcgtttgattttttcttcattaaagaaaaaaattttctttaggtttgatcacatttatagaaaaatatactaatattttcaatacaaaacaaacatattatcaacatatatttaatattaaatttaataaaactaatttggtgttataaatgttgctaattttttctataaacttagtagtcatacgtaaagaactttgactaagaaaaaaaatcaaacgacttataatatgaaatagagagtactagatgaaacacatgttaatactatgacttctgtctcgattcgtagtattagaatgtgtcacatccagtactggatagtcatattttgtgacgtaaacagtattggacaatgccaaaatttggcactactgaaatttagtaaagtcaatttagacataaaagtgtacaaccacttaggctttgtttgaaattgccgtaacttcttaaatctagtaagtttcacaaaaccttaagtattgaagaatccgtaatataaaacctcaattattatgatttgtttctaaaaaaaccctatcaacaataacaacaacaaaatcaatatttgggctcgttctgctgcattccccatggctggctgcgcgttgtagcctgtacagtgtcttgtgtcaacaacagcgaatgcataggctgtaccctgcagacgaagaaggccattgttggagctgacagtatttcattccttccacagaatcaccaaaattgatattccttctcatgagtaagaagggttgcccgattgagcagatgaacttactgccatgtacgaatcaacacgtgacacaaaacggggagcccagatacaaacaattatcttatcttgcataacaaggatacatgaaggcatgaatcaagaaaccaccgaatatccaaggttttgaggtatcctttctttgttagtcgatagacattgggccaacaatgtgttcttcgattctttttgccgggctgtgttcttcgattccccaagtaacattcatcttagcagccagagcccgcaaggaatttatcgtagggactcaggaccggcagcttacagaaatcagagtgacattgctcgtcgttcgttgatacaaacccagccgttggagaaatttgctgaggtgacccaagcttgtccatgggtgattcaccatcctgcaaagtcccaagaatctgtgagtgtaaactggagaagaaagactttcacctcaaaaaaagaagaaagaccaaagaaaagtcaaatatgttatgaccttgagagaatcgtgtgcaattcaggttcccacaataacaactaacaagctaaaaaggtatgattgtgttatatattgaaagcctagaagcatatttttccttagtttacctttattacaattacctattagatctgctgaaatatcaagcatcgcaaaagtaaaacttatttctttattacatactcctacaacggaagagtgcttggctgcttgcttcacttcatgagatttcaaaatgcaccgatttaccattcaacatagtctaactgccccattccacaaatagtgttctgtaccattttcatctttttaactgtagacatctcaagttgtctgtgatctttctgaaggtcactaacctgtttttggtggacgctcatgcagacagatagcttttgctgctttccgatcaaaagagcttcacatcggtttgctacctccttaaaaggcaaatcaaggtttgttgacactgatagtcttccaacgtgccgagatgtttccacaacctgcggaagttataacctctttttagcatatatcagtacatcttgaaaatgttcagttttaccatcgagtaagattccatattcatagttattgattgaatgattatattaataagggtacctccatatttcattaatcatattttaagcagagtaaagctagcaagcgggaaataagtacatactgattcaagaagctgattcacatcaataaggccattgtccaaaggttgttgcaattgaggttctgctaagctgttagctggttcaactagggtatcatcctcaaaaataaagccgacaggaataacctgcataataattaccacagtaatataagaaaacaagaataaaaggatggcatgtgtttgtaaacaaggttgatcacctccaacgatttttggtgcaacttagcattatatgcaggagattgtgaagtagattcattcgagtgagaacccaggggacaggcatcatctgctgagaactcctcaagcaattgctttcttatagtagacaattcagctgcggtaccaccaatagtgcgaaattagcaatcacagcaataaaaggtatcaagacaaatgttcatcagactcttcttgtgatttacctccgataaatctttcaaactatcgagaataagagaaactgatgcctgttttgactgatcattgatgttgatgtttgagagagatttcaaagcaagatcatcgtcgtcttttgaccgtaaactgtcaagcaagactcaacaacctgcaatttgcagtcttcaactagacgaagaaatggatcaacctggcaaacacattgcttatcagatagtaacacaacatatgacatcttaaaataaaatggataaccacacgcatgtgaaaaaatgataaaatattcacggcatcaatgttttgagaataggcaagagggttgtgcatctttgtataaagatattctaagcatcaaaggctccacttaaaactcagttcaatatttaacattacattctagagattaatttgcaactgacaaaagtagatttttttatggcatcacagtggttagaattgatctggtattgactgcaaaacatcttttagtacacaagaacttaggtgcaaatgtgccatgggtaactgtgtctcattcttttaactgagggagagtatgctaaccattcactcaacaatttcaattattctccaaaagaatttgtattaagaaattacatattgttgtttgcgaatgagtagacatttatctgtatggtttgattatgtatttatgttagtcaaatttatgtaaatttgtttgcgaagacataatctctccaagggctatctattgatggtaaaaatgctcactagatcaccatgcacatcataatgaactatgcaagcataatttcacttactatgcttgtagtcaacaaatctttcactagaggaatgagagatggaatgccaaaagctttcgagaaaaacacaagcatagaagttgccatagtaaagagtgaacgcctgcgtgatggtggcaaaaaacctgaaaaacatgttgatcgaatgcattatgaatatacaacttctgaaggaattacataacagcacattacttctattgcttgtagcatggcatggagaatctatgataagagtcatagagtaagccgaacaatcactacagagaacaaatgaacaaaaaagtaattgttgctttgtgaagtaagatccaatactgtgatgggaataaaatactggtgtgtacctgcttgtaatgaaatgctttgcaatgaaaaagcaagctgaaagctgccaacaagaacttcaagacatgatttctgcaatagggtggcaattaagccaagtaacagagagatgcaataaaaataaatcaaataaaaattgatcagcaaaatttaatatggaaagttacattcagattaaatattcacatcagaaaaaaatatggatgattattacattatattatgtattatattaacatttaattgtgcaagtgctgaaacatggtcattcttgatctataatctggcaaccattcaaaagcttatgaaataagagaaaagatgttattaccatgaattactatttgattgacaagtggcaatgtattataacccaacattccatggagggtactatatcatgtgatcgtttatgtctttatgttgtcatttcctgtgctaagttgattgctcattaagtcgagctttgcaaatggtgtcaatacgtgaatactacataatccctaatatcaaggtctatctatacatagaggaagagggcaatagagacgataatgcaaaatacagatatgaagtagagggaatgggccaatgggttctctcaccttgtcttcagaaaacagtagcatcaagcaataagtatgagaaattgcttcataatttcgtggaacattttcaggtgaaagtgcctgagtccacaaggaggaaagcagaaggatagcctgacgaccactcagcatgagggtgactggatcctgcgtgtaaatgaataaacattcttttttccaccagaaagaggcacagttaataaataaccatgttagctacaagaaatcagagtctagcacttactgtttcctgagttgtcccactcaaattacttatttctgatgaagatgttacaaaactatcttttgcactatacatcctttgaatggtctgtgatttgaatagttttggatcattcccgtttatctggtctgaattctcactgatagggattagattagtgccatccaggcgtgaattttcacgaaatgaaaacacatctcttttcaatttcccaaacagagcagcagaagatgagaaaacagatgtagtcctagacaatgtccttttaataccaatcttgcttgtttgtgaagagcctgaaaatgagcatggagagacagaagaaggaacaagaacaacagagaaaatccgatgtgcccctaaatgtgtctcacaatctggatagaccattgccaaaagcaattgatgaaataacgcctcaggaaatgcctacaaggtgtagtatatattgttgaacaatttgtagagtcataaaagaaaggaataaaaatattgtaaatcaacttactttgctctggtataacagatttggcaatgatgcaattatttgagctgtacgatatgttgcagcaatagtggaccgggcaacaggtgtagtacttgaaatgttctccaggacaacagccaacgcatcaaggataggcccagcatcgcctacctgaagagtatatagatcaattgaaggagcacctacatggatggtgggtgcaaaatgatctgtagagtgcagctatatgcatagctaaaaggaaataaagcaatgcacttatgctggtaaaacatattcacaggaaaactgacctttctagacaactgaacaagacattcatcggtagctttcccatatctgtcattcataaccatgccatccccaggacctacatcactgaccaagagctgcatgtttttactcaaatgcctgaccatatcacttattgcagccattagtgcagtagaagattgagctttggagtgctcggcaaggcgtgttgtgacctcaataatgtccagaatcttatctgtctgcttcaatacattcttgtgttcaagatgcttgactaacatggataacaatatatgtgaattctgtcctgtcagccaataatgtatctatcacttatcagcataagcaactattcaagataatagtgctcatgtagattatttaaataccatagaagtataaaacttattacagcaaataagaggaatgcatctgaaaggaaaaaaaatagaagattcaggaagcactgaataccagatttctctatcacaatttgcatatccaaaaggacacacaatgcaagtcctttagaaggcgaccacagattgttgttatcaaaataacgaaatatagcttccagaactcgtcggactgttgttgcttccctggatattctagcaaggttgtgcagacaaatccctgaccaaaaatttggactttctgattcttcactgtgttgggaaaatgatttaaaagagataagacatagagaagcttaatataacatgaaaataaaaaaattccatgactaaacttatttacgttgtcaggcttaattcaccgcggggagctctaatggctttccatgaaggaacccttgtcaaaatggtaataccggaaggttcatgatcttcagctttgagaacttcactcacccactgagtccttctatcctcaatggcagcatcattatcagaatttgcatatgggctctcgtagttttccagaactgcagagacaacctgtgcaatcaaattatgatgtctgagaatagaggtaggttggcagaatggcaataattctggttacatcactgtggaccttaggtcatgtggtctcagtagagttaacgattaattgacataagtagaagcattgtgttacgaggtctgaaggaagataaactaggaggtaaagaaggcatgtgcaagccataaggtattcggtttcttgctcagataatctattttaatttataatatggaacgattaaaggttcataaattgtttttgttactcaaattggtaacaaattaaaagttctttgaaattaaaaggttgtgctgaactaatcgtatattcgtatgattcttttatcgccaccagcttaatggaaaaaaccacacttacgttgtcgagctctgcagagatatgggaatgctcacccataaaccacacctgcaatccataccagtgggtattaggcatgaaaattctgcggtaaaaatagcaagcgacgaatatgtagcagagcagaaaacgaaagaacattctttttggggttttgcaggaatgttgagagggaatatagataaatccatccctaggcagcatggtgcaaggtccaatgtttgttgaggtgataaaatgagagaaaaattacacatcgggcacctatcgttaccaaagttaccaaagtttcattctggagcgcttcaacaatgttttcactctgggattagatgaaattgcatttcgttgcactctggagttctgactgcctcttcctctccatctctctcccaccaaaactctggccggtgtcctcccatcccaggcagcggcggcgcccatacttgggggtagtgggaaaacggaggttgagctcgagcgaggggactgtgttagcggcgggcgaagctctcaagcaatgggcatggaggtggacggtgagctatttggtcgccgaggagatcgatcttgggggcgacccaggctccggcacttgccccctcttgctctcctccacatcagccagccggccgccatctgctcctactcccttccaaatcgagccgccatcccggcattgggtcagatggagcaacggtcccccgtgctcgagctcatctacgcttgtgtcacctcatacttgagctccatctccgtgctcgagctacatcggcgagcaagtggcggttgcctgacagcgagaaggtgcccttgagcacgacttccgcttccataccaagcaccgcctcccctctgaagctctgactccctcccttggtggcgccggcgatgggaacgaaaggggggagattgccggctgtgtattcttaggaaaactctcgtttttcgtcggttttccgacttttcccagctcaaccttctcagtttcccaagccacctctctctctctctctctctctctctctctctatctatatatatatatatatatatatatatatatatatatatatatatatatatatatatatccacatacacgctttttaaacggctaaacgatatgtttttttaaaaaaaattatataaaaattatgttaatacttaactaatcatacaataatatgtatttcgttttacttgccctgaagatatccttaggttgtcgcggttatcatgtgtggtaacattttcagttttttaaaagatagtatacctcgcggtaatcatgtaattttctaaattataagatggcggtaatcacactcccaacggtttgttaaaccgttatgggttaccaaagtgccgcctccatttctttctcacttatcgggtggaccgctggcccaaactaaaacaaagtgaaaacatgaacttcagactcggtccaaattgccactttggtaacgatatatggtccaacatgtaattcggttgaaatggatggtttagaatggaagtactatttaatggaattctgaattcccttaaaaaacgagccagaatgttagtatgatatacgaatgaaagaaacattttgaaaagattcaggatggtatcagcaaatcatccgtttggttggcaacgtaaaaaaagcgccgtgcagagaacaagataaacatgaacctacagcaacacaaggaaggcataacaggagaggtaccatggatgaaagggcttggaggccagctgcatgaacaatggatatcttctccttctcacccatctcttgggccagttgacatagtttagggatttggctctctaaattgaacatgtatgtgctgtcaacctgtaatgagaagatgtaacagaactcaaaattttctcaaaagagagttttatcggaagatacacgtaaatgtcaagaccatttcaccttgtaaattgatgcctacccgaatgttaaaatacctggttgtttacaaagtaaaaaagtgttcgacacgctattgtccgcaagtcatcctgtctgttctgttccaatagggcttctacgatgtttagcaagctattggcgaaaagaggcctgcaaaacagcggtccatccattatagcaattattcacactaatataaccaaaagaaatgcaacaaatacatcttgtaaactccactgattgccagaggaaagtccacccaaatagatgacttcacccaaaaaaaacactaatacatatatatatataattgagaatataattgccacaccagaaattaagtatttaaagcaaacaaaattatcattgataaaattataatttaactagcatggtggcccgcgcagattgcgcggctagcatcatcatattttctctcatatattaacatatatgttttctcattatattattaaaatatattacaatgacaacataattttaaattgagcaaagtacacggccggtccttaaagttagaacgaggtgtcacttaggtccatgatctaggaaaatcgtcattcgggtccgcggtcttgtttaagtgaatcatttaggtccaaagcgcctttgactggattgattggcttacgtggccgtccacggtggcagcatgtttgcattttagcccccctcccatcttggctcccccttgtctctatctcatttctctatctccacatgttgtcagttgctgaccaccacgcgtgcatgcatgagccactagctgcacccgccgaacaccccggagccgtcgcctgcacccgcgttgtgcgtgtccttggagaaaccgagcacggtctgagcttgttgttgctcctgctgtggcggtggcggcatgcggaactcgccgagatggaaccccacggctgcatactccgccggcatccctagcggccccatctgaggcagaggaacgtagcagccaatgctcctcagcaactccatcgccgagaacacgcacccacgctgcccctgccaccaacgccgttcgccaccgccatgttgcctccggggttgcacatgttgctactctccaagctcgggaacgctgtgaactccggcgactgcagggcgcggccgtggtgatgcgggaacgccaggttgaggtcctgcgcgcccttgtgcatcgacttcaggttcttagccgccagccccacggggaccgagctagacaccgtcgcggaggtggaggccgacgcggccgctgatgacaccatgaggacgacgaacgcttgttctcccttaccgttgccgccgtacgcgcctccctcctcatcgtcgttgtcgtcctcgcggccgccgccacatctacaccgccacccaatcgccgttgcaatcgctaaccctagaaatcacacaggaggagccgaggaggatttgggggagaatggttggatcgtatatgggagagccaagatgcggggggctaaaatgcaaatatgctgtcaccgtggacggccacgtaagccagtcaacctggtcaaaggcgctttggacctaaatgattcacttaaacaagatcacggacccaaatgacgattttcctagattatggacctaagtgacacatcgctccaactttaaggaccggccgtgtactttactcttttaaattttgcaataacttttcaaaactactaatgtgtaataactactctagtctcctcttctaatattccttattttttaattctaaatttcagctatttctaaattgtatttctatatggactctgctttttctttttctcttattaatgtgagaatttctaggccatgagagtgaacgtggaggctcctttttattccgaattttagttggttttaaattccaatatgaactctatactctacttctaatattccttattttttaattccaaatttctattttttttcttaattgtatttctatatggactctatactctacttataatatttcttatttttaattccgaattttggttatttcctaattgtatttctatgtggactctatactctacttctaatattccttatttttaattcagaatttctattattccctaattgtatttctatatggactctatactcctcttctaatattccttattttttaattccgaatttcaactatttctaaagtgtatttctatatggactctagtctcctcttctaatattccttattttttaattccgaatttcagctatttctaaattgtatttctatatggactctgttttctttttctccgattaatacgagaatttctaggctatgagagcgaacgtggaagctcctttttctattcctttaattatataatagattgcagtatgatgaaattgttaagagatggatattacggaaatccaacgcattgcctatggaaccttcagcaatatattcaagggagcacatgtaagtatgtaactatgtttataagcaaaaataacttacagttgctcctgacaagaacatatcacctttcggtaaattgccatgacaactttcactgacccaaaatgctcaactctcaattccttgtagaatttttgctctaaataaactgtaatctgtcaaagtgcaagaacaattttcaatgaagacaaaaggatcaaattcatgaataggggaaagaagtaactccaaaatcttaaattttgataatacatcattggtttttctataaaatacgatttttttacagatttaaagtaggatatatcttttttctagaagaaaattaggatataccttgcttcagattgaacataaaccatcagaataaagctagatatgtgaaaaaaggcatgcccaaatgttctgtatgaaaagtacccactggttttaactaagaaagtcagcatgttgcacaattgattgacttttgggagggatatagatatgaacagaaaatgaggcatgccctgcagcttcctctgatgattaataagcactcgataataattcactttctaaaattattagatgaatcatggcagtgaaataatatataaaagagatgagaaagagaatcacacctttggaacacgcaaaggattcctcgaaatatattcgcacaatttgccgatctttcggtcattgggttcttcatcctaaaagaacaagacaacatttatagccttttccaaaaaaagaaagaaaaagaaaacatttataggtgtgttactctcgcttccccagataggtttatatggggatgtattttaacttttaactgtgcacatatactgatatacaacagtagaacttgccgaacatagattttcttctttttgtaattgcgttattagtaccaatctgtactacaacgagagatactaaaataagcaactactgttggagtatgatacagaaggaacctaaggaaccaacaaatcgatcaggatgaaataagcaaacctcaaactacacaatatgatccataatgtgcaaatgtaggatacagaacaaagcctaatttatccatgaacatctacagcgggtttcacctgtgacttagggaagatttctgagagcaacttcttgtatcgcttgaccggatgccgagacctcgtgcgcaatgacgggcaaaggaagcaaagcctctcgcatgcaggcaatacctcccttgacaccacacccatcgtcatcgggatttcttaggctccaccattactcatccacaaagcgaatacgatgcaccatcgctccaaatccaagccgggttctgaacatcgtaagagcattggccaaacatttttcgcatcagttacatctcacatgcatcggagcgaatcacctgaaaattaaccaaatcaaggcaaacctcccacgcggctaccaaggaaacgatcgaatctaccaccacagcacaatcgctcacaccgaatggtaattccgccgaacacggcagaggcatatcccccgcattctcccaattttagcaaaaggcaaaagcatcacacacacgcactaatactctgctaaggaaattcaaaatgccatcaatttgggccacacgcagcagctcatgaatgatgatgaattaatcgatccctctatcccccgcacccaaaaacaaaaacaagaaaaagccgcccccgatcagcggcgacgcgacatgcagaaaagaaaaggaaaaatctaaaatcaccgcgatcgcaaggaatccgaccatacctgcaggatggcgatcggctagctggctcgcgatccggggcgaccgatcggacgaacgggtggaggggaaagggaagggcgctcctcctcttcctctctctcctcagcgcgtcgtcttatcgcgcgcgcctttgttgcttcgcgctcgcggcggtcgcgtgggttttctatatctgggaatgggggcagggcggggcagcgttttccggggaggagccttttataatggccaaaaggcccgaggcccaacggtccggcccatggcacggcattttggtccggcccaagcacggcatggcctgacggaggtcaggcccgtgccggcccggcctgaataccggccgtgtctgggcccctccaccggcacgttgggccggcccagcacgaccaggccagcacggcacgatgggccggcagccaggcccgatataaaaaaaataggggagtaaaaatagacatattatatgccatggacgaaagaatagggatgtaaaatagacttattttatctatacatatgctagcctaaagaggtgggacgaaaagtagacttatttagctatacatatgtcagcccaaaaaaggagggatgga

SEQ ID NO: 13806 - DNA, 673 bp, Oryza sativa
tttaccaaagttgctacgaatagaataatgagtgttgctcaaaaggtgattagccctactcaaactgcttttatacctgggagaaatattatggaagggttgttattttgcatgaaactatgcatgaattacatcgcaaaaataaaagtgtgatttttaagatcgattttgaaaaagcctatgacaaggttaaatggtcttttgtacaacagacgctcagaatgaaaggtttctctcctaaatgatgtgagtggataacttcttttattcaagggggacatgttggtattagagtaaatgatcagaccggtaataattttcaaacttacaaaggtctaaggcaaggagatcctttatctccaattctttttaatatagtagcagatatgcttactgtcacgccctgaagttttcccccttttgcttgctttaaaaattggttaaataaattgcccgaagaaattatcttaattaacctagagctgaattccttaattaataaatgcaaataataatcggaatcggcatgtggaatttttcttggattctacatgtcaaaatatgctaacaggatttttagtggaattttcagagccttggaaataattttaaccaattaaaaatgagcatgtgcaatatataaatcccaggaaaatcctttttcttttttttt

SEQ ID NO: 13807 - DNA, 1074 bp, Oryza sativa
ttggtgtccagtccatgttgcaccattgctaaaaggacttccatggttcatatctgaagatcatgtggctcctccaatcacaacaaggccaaaatcacaaatgtggcttgtttcatcaaaaatgcggattcttagtgctgattcttgctccatgtatctgcaaagaaaacttggttggttagacccaccaaatgcaaacattttatcttcccagttagttgagatctccaagtcttatgatgaactcaagatgttttctgaagacagtaccaatgatgccgttccgcaaaaggaaattcaactgatctactcaaaattgcaagatattattgacacagccgataccaacattctaaaacggaatctggatggacacccatgggtttatataggtgataggttcgtgccacctcaggcacttgcttttgattcacctgtaaaatatcacccttacctttatgcagttccatctgaactgtcggaatataagaggttactgtcggttttgggtgtgaagcagacatttgatgcagcagattatctgaatgtacttcagtgtttacaaagcgatgccaaaggagagccattgtctacagagcaactaagttttgttcatcgtgttttggaagcatttgttgattgttatcctgataaccaagcacctgatatgatggtgaattcattgttgattcccgattcatttggtgttttgacacctgccagaaatcttgtctacaatgatgcaccctggatgaatgctgatcctacttcaaagagctttgtgcatcttagtattggtaatgatctagctaataggcttggggttcgatctcttcgtggatcatcattactggatgacgagctaatgacggatttgccatgcatggaatatgctaaaataagtgagttgctggctttatatggtgagagtgactttcttttgtttgaccttatagagctagctgatcattgcaatgcgaagaaagtgcaccttatctatgataaacgagatcatccaaagcagtccttgctgcagcagagtttaggtatgatagaaattttgggctgcaggaa

SEQ ID NO: 13808 - DNA, 3306 bp, Oryza sativa
ccttcgagaagattcctcatcccccttcccttctcttccctctcatggcgtccgcaccgagcaccaccgcgtccggcctcgcgccgccgccgttctcctcggcgcgcggcgcgcgcctcctccccggcgcgctgctgcgcctcccgccgcctccggctcggtgggtagcttccgcgtggtggggcccgccgccgccccacccggcggccgccgcatcgccagcgcgcgcgtgcggtgtggcgcggcggtgaggttcatcgggcagagcgagttcgaggcggaggtgttgcagtcggacctgcccgtgctcgtcgacttcgtcgccgactggtgcgggccgtgccgcctcatcgcgcccgtcgtcgactgggccgccgaggtctgctacttccttcatcattctggtgttacatcttgtctgaatagcttagaattgagaattaataaaccaccatggactcaaaacgattgaatttttggtgtgctaaataattactagagatatcaattccatggagacatcagacatggactatagactaagactagacagcagtgacgatgccaatgttaccagctaccaaccgctgtctgtgggttttaggtgttcatctgagaacaacaaaaagctttcagatcagtctattaagtcttactattagagagtaaaaagatcagtctataacaagtatacttctgttgtgatgtacactcttcaagttaagtgcaaacgcatacctcctttatactacctacatcccaaaatataacatcttttggctacgaatctggacatgtgcatgtctaaattcatagtcataagtggttgctatgttttggaatggaggtagcagttcaaaaaatggcatataggctacaccatttcagggcaggtttggtgaattggtgggatgatttcagcaaattctaaaattggcagttgccaggacttgctatcatggccaattaatgggaggacttagtttgcaaattctaactttgatatcttgatgatggaaaagggtctaatgaatcaaccaatgtgcagatacattcatatataaagaattaagttctactcaagcgaaataacagtccaaaacaagcagtgcaaccttggtcagtcatgcaaaactgcacatggttggtcgtatgggagtttgttctctatgtttcaacagaaataggttctcaagttatgttagttggactttgcatctctaattgtttaattttggttgaaaataggaatatgaagggagattaaagattgtcaagattgatcatgatgccaatcctcaactgattgaagagtataaggtttatggtctcccatctcttattctattcaaggatgggaaagaggtaccagggagcagaagagaaggcgcaattacaaaagccaagttcaaggaatacctcgaacctctcttgtcaacctcaacagttgcttaatatcatcatctgcagtatgcatcactgaatctgatgtctggagggtgccaatgcacaacacgacctgcatgttgaagttttttcccccctccatgaactccccattctaatttgtaattacctcaagatcatggttgcatatatttttcattattgatggtaaaaattagtatgtacgaagggctatctgaggtgcagtttgacctggcacaattcctgaaattgaacttctgccaattagtttcttgtacaattcattgttaatacccacaggaccatgcttatatgaaagcatttttcaaatgtgattgagatggagtcagctaaaataagatgctttttagagaggcaaaataaggtgtttttggaataactattggttgaaaaaaaaattgaggctcagcgtgtgtaccttaagaaaacaatagaaggggtaattgctaagcaagttcaaatgataatatttgccctactgaaaaccaatttcgtttacgaaggattaaatttttacattgtatttgttggtcaggtgcaactttttacccacgaggttatgcagaaatccatcgagccaaaaattccatcatttggacaatcaatcaacttatctctgtagaccgtaggtgatgcctaccaggtgcttgtacaaagcttgccttctctcagcttttctgacatggaaataggaaattgaaagtgtgcctggcaacagttctcaggcatggactcgaacaaaatagagatgggcagcttcatggcttctctgtccccttgagtcctttcacctctgctgccattatgtatgcttaacagcaacaactacaagctcaagtgcatgctttacatctcgtctgcctgcagtctcgttgctgtgaagttgacaagcatcatcagatcacatccaaaatttcaggcaacaactccagggcgaaatggcatccgagaaatcagctcttcagcctcttcgatgcgacctgcctttgtgagcagatcgaccatgcaagcaaagtgatcctcgcctggctcaacaccaaacttgtctgccatggcgtcgaagtatatccagccttcgtccacaaacccaccttggctgcaagcatacaggacagagtaaaacgcggcgtggttcggtgccatgccttccaacagcatgtcgtcgaacaccttcacagcctccctcgcttgcccgttctgcgcaaacgccatgatcatcgccgtccaggacacaaccgactgtcgctgcatcgactggaacaccttgtgtgcaccggttactgatctgcacttcgcatacatgtcgatcagagcattgttgacacccacattggagtctcctcccagcttgatcacatatccatggatcttccttccttggttcagattggcaaggttcgcgcaagcattggcagcagctacaatggtgtagttgttaggcctgattccatccaggatcatgtcactgacaactctgagggactcagcaggctctccacaatgtaggagacctgcagccagctctgtccaggacacgacatctctatggcgcatctcggtgaatgctctgatgccggattccagctgtttgttcttcatgtacatctccagcaaggagttgcccacgcagacatcgtcgacgaagccgctcttgacaagctgcgcgtgaacttgtaagccggtcccgccacgttcgcgcttccggacaacccagacagcacggtgctgaaggagaagccgtctgcgctgacaccttcgatggccatccttcgccagagcgtgcacaggcgcagggatgaacggtgcgcgaacgcggtgagcagcgtgttccacgacacgatgtcccaggcatggggg

SEQ ID NO: 13809 - DNA, 1447 bp, Oryza sativa
agcataccatttgttcacattgattggttcacactagttttgcgcacgagtgagagtgggtggggagtgggtgatgggtggggggctttgaggaactgttcagcaacgaaaaagaaaatgcctcttttcggctcttcggtcctgtccatctgttgaatggtttgtgctcagcacatagagtatgggaagtaatgacactcaactacacttacaagggttcctttttttacccctgtttgtatctgccaaggtcggccattatgttaagaatgatatactttgaactgcaggtcataaatgtctcttccccaaatactcctggtcttcgcaaattacaaggtagaaaacagttgaaagatctcgtgaagaaggtcagtcatttccttgaagtgcatcctttgtttgtcttcatacaaactttgtttgacctatgctgcatgtacaggtgcaagctgcaagagacgagatgcaatgggctgaagatggtcctccaccattgcttgttaagatcgcaccggacttgtctaagcaagatcttgaggatattgctgcggtaacatagttaacttagccttgttttctgtgctcttccattattgagttgaaaattttcttatgctttctcattatgttctctaggttgctcttgctcttaggttggatggcctggtaagctatggaattcttccttattgattttactgacgttaactagcacactcctatttaacttccatgcccaatcattttacgcttctcttctggttttgtactgatgtttgtttattcttttattatgttgctaactgcacagattatatcaaacactactatttcaagaccttctcctgcagacacacatccattggctcaggaagctggtggactaagtggcaaacctttatttgacctatccactaatgttctcagggagatgtatatccttacccgggtatatttgttgcccctattgctttcttggatatatagtagcatacctctttgaattaacatgatttttctgtcattgtattttactccaatgtccatgaatgactcctgcatttctgttacagggaaagattcccctcataggctgtggtggtgtaagtaggtaatgtcagtctctgcatttgcttttttaaattaaaataccaacacccaatattcaatcaaagtttatttatgttattacagtggcgaggatgcatacaagaagatccgttctggagctacacttgttcagctttacactgcatttgcctatggtggcccagctcttatacccagaataaaggtcataagtgaaacatatttgttatatcccaagctcgcatcacatgctcactatctttgtcataatggactatatatacactgctagcctcttcttttcccttctattttttttttagagaaagaccatacggcccatcctatattgaag

SEQ ID NO: 13810 - DNA, 1043 bp, Oryza sativa
cttttggtaccccttttgctgtaaaacctgactttgtggcccctggggcttaggtcccttccttttgtttttgctgtatgcttgatgtaaaatgggtctcccccccataatgggtctcccccataacgttgctgtattcggctttcaatgtaagccgggcctaaggccttttgatgattaaaaaaaaaaaaacccagctccatcgtgtgctcttcagccttatcagccgcaggcatcgtttatattttaaaagcttaaatcttaaatttagaaatgatttcaatgtcggtttcattgcagtttattctttgtcgttggcttttaagtagctaaaaatacatatataaacagttttattccccagattttttttctctgaacgactttataacctgctgtaagcaaaacgattggactgttctatctatcaaatccaaacagctactaaattaaatatatccgatcatcttaaaaataaattctcttcatccccaagctggtttatactctattttcttagcaagccaattaacactgctattatttctgttattatattatcccgatcggtaagatctgaacttttgtcgataataatatcaagcgtgcacttaatcgaacaaaataagtccagaccaatgtggcgaactgggccaagaagaggcacgaaaccgcaattctgggccgtgcaacccatcttccacgcgcggcccgattctctgattctctcctcgcttaagccctcctcctcctgcttctgcttgctccccacgccgacccagtctcgccgccgccctcgccgccgccaccgccctccccaccctcgcgcgctccgccgccgccgccgcccctccccgccgtcccctgccgggcctccccgcgctgcccccatgtcgtcttccgcagcggcgctcgcctggcgccgctccctccgcgacgccctcctgcgcggctccgcgtggcgcggcgcgcccgccgccaactccgccgccgcgcggttggccagcacggcctccgcatccgaagcggcggctggtccgaag

SEQ ID NO: 13811 - DNA, 563 bp, Oryza sativa
caatccggctaacatgtaatcacatcatagagaacagaagcttttatttatatctgaatagtgaagctagcaggcaggcaacataccaagcttcaacaacgctagaagggcaggattaactagctcgagtagccggtgtgaaaaacacacaaagaaacgaagcaattaaaccactagtactcatgtttcctcgcttcgatcgatcgatcatggcgccgcggcgaagccggcgaccatctatggctttgccccacctccacaggcgggagcttggggaacttgaggaatggattcttcttgatcaatggcagcagcttcttgaacagctcggggtcagcctccgcgtcgtcctgcatcgccaccttcttctcctccgccggcgggtggtagatcggcggcgacggcgtcggcagcggctgcttgtacaccggcgtcgggtgagagtacgccggcgtcgggtaggagtacaccggcggcgccgggtgcgtgtacgacggcggcggcttgtggtacgccgcccgcgctggcggcgacgggttcttgtagtgaaagaagaagtcctt

SEQ ID NO: 13812 - DNA, 562 bp, Oryza sativa
aatccatacacaccttacgatcatttgcttgatcagcgtgtccatcttgtgaaaaatatgccaaaatcaagttccccaggaaggccccaatgtcgtaacccattgggccatagaaagcaaattctggatcaatcacttgagtagaatctggtgtcaccatgatggaactagtgtggagatctccatgaagaaaagcctgtgctctctcaataaacctgcatatgcaaatcatgtccatcatctccaaatgaaaaggaaagaaaaacgctggtttaatcaggagagctagttacattgattttaattcagcaatctccaacttaagctcagcatcctctcgaaccgctgcagcatcattatcaaggaagggtgatgtgcagcgattgtatttggcgaccctgtatggatctgagaatacaacttgttctgtgagcctgctcatctccacattatcgcaatactgagcaactgcaattcacataacacaacatgccatcaattcggttctcatttttctcccttctcaattttcacaggcaaaccaaacctgtaataaatcaac

SEQ ID NO: 13813 - DNA, 736 bp, Oryza sativa
tttttagggcatatttggaatgttaccgtacaaatattttgttaatgccaaaatataagcaagttttggcactaccaaatatttggtaaggtaaaattgcatttgatcatatttggtttgctgccaaaatgtaaaattgtagtgaagaatgttgtacataatctcaattgtagattacgtattaccaattaataggcttccattttcatgtgtgctgttgtggactgtgcgcgctactggatatggcactaccgtgaagcgccgaaagtgtgttgttgtgagcataagttgttcgagcacaatacgaatgaaaagaactacgtagacgagacaaacacaagtagtactgcagtagtaatagcaaaagtagtactgctttacaagtttgtaagccaaaagaaacggtcacataaggactgaagaggtagaacactactgacgaggcctcttacccctgtccctcctaccctgcgccctaatgtgcccctgggagtacgtgagtcggtccgggggtacggcacggccaacccgtcctgcctgtacaggtgtgacctctggctgctcctgagtgtgcgcctctggagctcctccaagctgagaggagcctagtacgtcctggtggtctgcaccgtgcaagtcgtcgtcgtagaactggctagtaggaccagtcctaccgcgtgagacgaagaggccccagtaccgaagatcccggctgcaaatcctgctggacaaggac

SEQ ID NO: 13814 - DNA, 3480 bp, Oryza sativa
ggactatgcacatgattacaaaatgatccaattattcaatgaaatttacggctcgccgattcgttaaaaaaaattgatccaatgttttttgttttatatttctttatgggctagtccttatagaaaccccttggggatagcctcttgcaacgttagattgaagccagtaataacttcacttgactccacaaatcatgcaaatgtcactactatactatgacaccacaagctcctcaaatgcatgcatgcatgatgccacatacccccagttggcaccactacaataaatattgctatacatgctaacatctgtcactcatggatactaattaactccagcctaatttgagtatgccaaataaggaacagaactaatgctggagataacaaaaaacggaagcattgattcttgatgatatactcttgtagtcgtgtccctataaatcccatgaagaggatattgtcattgtggcagtgaccagcaacgattctcctctcatggcggctatcaagaacaacggtgccatggttctgtgttttgcaactctgtttgctatgtctgttgttttcatgtcttgcgatgcaacaggaaggcataatgctggtaagttccggcctatccagatccatttctactactgtagtacttgttctctctgttactgtctatgttgctgcaatgtttattcagatatgcagaaaagtgaagtgcatctgacttactgattgatactgtttggtggtcaccgtgcttcatgatgtgcaggtgttctggacgatgctggcgtgttgtgcttcacttggctgaactgcacgaatgcttcatgccaaaaagaatgtaaggctggcaaatgggatgctaagaaaagcagttgcggcgcaagcgacgtttgctgttgccgagctgcaaagttgttggtgttggatgagcaagctgttagatgaaattttgtgcccaaattcatcaaatcagcaagctgttagacttagatgcgacggggaataaatatatgtatgcaattatgacctgatttggtcagcatgtccaacaatgaagttgtttgatgaaattttgttcccaaattcatcaaacgaaataaaggaagaaattcaaatttaccaccttgagactcctgaggtacaaaattggatatatggtccctaaaaattgaagtgtgaccgaccataacttgctgaaaacaatcatttttcatctatatgcatcatttgtaggaggatgcaagctttcagcattttcttcaacattgacttcaacataggacagagcagtactgtaccttgaagtctctttccacacacccatctccatccttacatccacaacacgtcgccaatcctcattggcagcatacaagtttgacgctagcacataattccccccgtattcaggctccatttcgatcacatgatcgaccaccttcctcgcgagaatggcatttcctagatcccgacatgctccggtcaatacacgccatattacagggtcaggcctcactggcatagccaggacgaactcaaatgcctcttccagcataccagatttgcacagcaggtccaccatgctcccatagtgctccatccaaggtgtgatgtgatactcttcaaccatagacttgaacaattggcgcgcttcattgacgagccccgagtgactgcaggcattgatcacgctcaagaatacaagttcatcaggctggaaaccttgtctgagcatctgcgaaaactggacaagcgcagccaccccatgcccgtgcacggcgagggcctgaattatggctgtccatgagaccactgtccttacagtgatcgagtcaaatatctcacatgatctccttaccctccccatcttaccatgcatatgtatgagtgcgttggcgacacgggtattctccaagaacccattttcatgggcatactcctccacccactcccccagctctgacctgcagtccaacattgtgcacgctgagatgactgcaagaagggttacctcgtcaaccttgaccccagcaagcctcatttgctcgaacacttgcagtgcctctgctggctttccattctcgcagcaagcattgatcatgcaagtccaagaaaccacgctcttcatactccctatgctgtcgaacaccattctcgcattcaccagccggccgcatctcccgtacatgctgaccaaagcattcagcaagggcaaatcaagagcagcgagatttctcaccgcgtagccatggatctctctcccatgcaccaagctcctcagccgcgcgcacgctgacaagaggatcgtgacggagacgttgtcgggccgggaagaacccgcccgcgccatggtggacgccgtcaccaacgcgtgttgggggagcccagaacgcgcacaggcagacaacagggtgttccatagcgggacgtccgggcgggggatttcgtcgaacagcttgcgcgcggcggcgaggctgccggaggccgcgtaggacttgaccagagcggagcaaaggtggagagacgaggggagcacgccgagcttcagcgctcgcgcgtggatttggcaggcggacacgtcggagagcgcggcgaggatggccgcgccggtgcgcaaggctgcggcggcggtggcgctcatcggtcatggcggcggcggcggtggcatttgcaagaaaagcacaagcatgtttggaaaattgtatattttgcgggtctcatttgcaaagttacccatctaacgctccccgcctcaatcttgaccgctcaaaatggatcgaacggtgttccgggatcctagagtggaccagaatattgggccaaagatgcaggagattacatggcctaatggctaatgcctaatgggcttttgaactagagtcaagttaggactgcttaaactgttttactgtgtttgactgaagatcacatactgtacttatttgtgaggatgagacatacaaaatatccataaacaagaacataatactcctgtcataatatttgatgtttagtataaaatttagtcgaattttataactcgagcaatcaattttatatttaaataagcttatgaaatctaataagctcatgattttatgatagtaacttttcaaggcaaatatctcacaattcccctttgttttacaaaccaggcatttgagagttattgattgatagagctttaaaagtaggaccaaatcttgttctaaacgttaaatattcattatcgactatcgagtcgtgtgagtagcccatgcattcagatttggacacattaactccagatcatttcatagaggcttcaaagcccacatatattttacagccaggagcacaagtataacaacatggaaatacagcatcgtactgactattattttctttctactaagctacaaaaaattacagcattcctcagcttgaagctttcagaggcagacatagctctagctcacctggagccacgggggatccact

SEQ ID NO: 13815 - DNA, 1622 bp, Oryza sativa
cttcccctggaatatgcattgccacaagagaaatatattttaggtaagccacatgattgacaaacgtccatatgaattaccacatagaacaatcaaacatgcaaggaaaatttcaatgcaaccataacatgcttaaaaagctttgtatgcttcaagggatataaaagtacagcaaagcttaccagcataattggcttcatcagttccattaggcgcccatgctgcccatataagattgccaggagcgagtatatcaggctttagaacatcagcatcttgaaagctaaaatcttttacatccggtcctcgagaagagaacaaggcaacctggggggcagagttgtatagagttggtgccaaaccatctgcaatagctgctgttgcttggaaggtcgtggcccttcctgcccaatctcttattgtagaagagttgtagtagtctataagatcctacagaaccaaaactaatgtcacctgactatatcaaaaaaaaaacgtattatctaactaacatgcataggttttccctactattcaattatcatgtcatcctacaatagcaggcatatacaattcatgtcactgctcttgaagcatgtacattctaggggactgactttctgagagtagctcgactaaaaaagaagacaactatacgagaatagtttgtgggcactgaacagacaccaaaactagatggatggttacacaagagctatacaatccactacgctacataaatagttttttctagttcatgtttacataagacgtagccagataaaagaaaaacattccagataaaagaaaaaacattagaatctgcagcttttcaatactccactcatggtgttctgcctacagatggcatccatgatatctacacactgacacttttggggatgcaatacttcctccgtcccaaaatgtaagcattttttaggttggcacgggtattaagaaagtatgtgagaatgattgaagaaggtgtgtgattggttgaaaagagaaagtaggtgaaaaagaatggttgtgattggttgagaggagaaggtaggtagaaaaatagcttcattttgggacaaagtactgtgctagaaatagctacattttgggacggaggtagtacctttgttctgctgacatctgtgatgagaataccaggcatgctgacaggtacaggatcaaattttgttcctgggtaactattctccacagcaacaataaaaccagctgcaccaagactcctagcagtctctgacactttcttgatagaagctgtcccagaaatatagttgaaagaatatccacacaaaagaattttgccctgaattttcctcttattcaagagttctggcctttggcaatctaatgcactgtacttggtggcagatgaacccagcagagcatcagccgcagaaatcaggctgaatgatttattctcatgggttgcagctgtagccaaatgagaaaactgtaaattaaccacaagtagaaatttctatgtaactgtcagattgcctgcatttgttgacatgattgcaatctagtaacatatttgctatgggatgcagtaacatatgacagtggaattacaaaggaagaaaaacagaggattgtct

SEQ ID NO: 13816 - DNA, 3395 bp, Oryza sativa
ccctcttcccaacccatctccctcgttttccgcgtgcacgcttttcaaactgctaaacggtgcttttttgcaaaatgtttctatacgaaagttgcttaaaaaaaacaaattaatccatttttgaaaaaaaaaatagtaaatacttaattaatcacccgctaatcgctgctccgtttccgtgcgggcacttagtgttgggaaccaggggttccgaacacaccctaagcgcagacaacaacattgagtgatttttatttatttatttattttgggggggggcgaagttaaaaggtaggccacttagcttaggtcattttaattcattttgtacaatttttgttgcccatgaatgcatataccatacatgtagtaatagaaaaccaaaatttgagctaaaatacatgaataaacagaacttacgtgatacaccaagtccaggaagaagtttcccatttcctagcaccaaatgatttttgtatctgcggtcatcaactccagcagcaacagtggttatccatgggctgaatgataccagtgttttcggaaatggtcctccatttcctgctgcttgggcaacaaacaccccagctttcacagcggaaagaagtgcagcatcaaaaggattcaaaaatgtagtccgcgtagcagttggcgggctatttgggccaacagaaaggttgagaatgtcaacaccatcctgcacagcctgcaaaatgcagattgccatccatgcattagttcctacatattgaaggcttgtgatagtgacatgcattacataactggcagatgttgtttcactcatttctgcaatagtctatgaagaaaacaactactatggcagattccagaaataattgttttgagtcactattgtcaggtactaagtactaacatggcagcacctgcattacagtggaaagaaattcagataagtaactcatatgttatacctgatcaatggctgcaacaacatcagatacataaccaccaaaaagcctgtaaaggactttgtacacggctatcctgtcaatcacaaactcaggaaaatcacaatccggaaggagagcaaaagcaaaggggaataatagatattgattaacaataacggcaagatagaaggaagtgaatttcactagcacaaggctcacattcattgaggtgatttttgtgcattattcttagttgttcaatgagatcttgaaattagaaaatgctgaagaaatggaaacttacctagcacgtggagccataccacttgctttgccaaattcgtgaccatgcattcgtactggaatcccattatttccagcagcaattgctgctgtatgactgtttaagggaaagcatctttgtatcagataactagataagtcatgccattcttctcaagatgaaacacaaccagaatagctaattctttggacagaacaattttcatgtatggcatttttcttggtataagaaactagaacagaacatatattaattaggagcatgaccttccatggccatcgccatctaatggagatgcaaaatcgacatcaggattaaacgctccagcagcaattgcagcttttgcaaaatgctgggcaccaactatcttcccattacaaaagcttcttcttgttactggatccatctcacatttccccttgtaatgaggaacaggcccataaggatcagttttgtgggcagagaagcttggatgttgggggtaaattcctgaatccacaaagccaatcacaacatcttcaccagctctatcgaagccaccacccgttggccatacccctgttggcaatccaagaaattgtggagtgtgtgtcgtcaatttctgtatcttcatatctctctccacatgctttactcctggggctttccttaggaattcagcctaacacagtgaaagattgctgtgttcagccaagataataatcttaaaccaggaaagaagaaaagatataaaaatgctaaatacctgtaagggtgacatgtgtactgcaaaaccattaataagatgatggtagctataaagcttctcataagttccttctaccaaaagtgagtctagaagcttgtcatggtaccttcgtaggtggagtgagtatgaagtcacagcctcactgaaatcagtaaattgcacatatacagaattgtcatgtttccaccacaactccacaaatacaagcaagctgtgattaaaaacttaatggggggataatcaatttcaatatcagagagctgaaagacagtaacagtggtgaccttttttttttctaatgaaggctttcgagcagatattcttaacatgttggaagactcttaacagctcaaacctcacacactacatatatgatatatcataatgggaagaaaatggaatccatttcaagaaacatttaggaggtgcacttcctcagtagcaagctccaagtgcaacaagacatgtgaaatgcaattcaacaataagaactaacaagtccaatatgccatgcaacccaacatagactccacaaattcaccaagagtcagccaacacaaaataaatgttcgaaggcatggtgaaaaaacatcatcaatagtaaactacctggtaatttccatatcttcatccaaatctatggcggttgcagggaatccttcaactccacctctgtagctgacaacaggttcgccttccattgtaacaatgtacacatcatgtgttccaagaaccacttgtggtacaatgataagaagcaaacacgcgagctcaagcgccttcatcttcagcaatatccgaattgccacaccacagaatcttccaaagaatggaactgtcagggaagtgcacttacaagttacaagtatgcatgacactagacatcaatttgatggtttgggagagtcaagagtacaacaactacaggagtacaggactgcactactgactgagtaaaatcactcactaccctagtcatccactactggtcccggcagtgcccacaatttctttgtgatactggagttgcccacctcacaagcctctcatggagcacgcatttacggaaccttattaaattagggcggccgatgacattaaatggctcttcagaacgattatactctacagtctacactacaatatagcgtactgtaaacggctagtctgtgtgtactccgtatgcattttaatagctgcattttctttagaacagattgattttgaaatgaaactaaaaatttataccactttgctaaaggatcaagcatgagttaagatctactagaacaggctgaacaaatattatctcactgtaaccaatactgcaagctgctaaaaaagggtgaaacaacaaaatcaaagatcaatatgaataatatcatgatctggtaaaaaatacgggggatcc

SEQ ID NO: 13817 - DNA, 3839 bp, Oryza sativa
caaaagtgtatatgtatctatgatgttggtatttatttgccatttatttgtaggtaaatatggtcaaatggacatcgactggcatatttaccttcgttccataataattttacttttaggattcaaatctatcttaaaataattgttaaataaaatattaattgtctcataattacttctcatttaaaattatttttattttattcttaactacccttccacttttacttatacgtcatttaatgaggggtattatagtttttatctcaaaccttaatatatgctaaataacatagacttgtaattattttacaacggaggtagctagtatccaaaactacagcggaaattatgtgccgtaagcacgtcagttatctgtggttcctgctgtaagtggcattgtactgtaggatagggtgtagtactcgtgagctttttgtcaatgtgtaggccgtttatccgagtattctctctgtcttaaaatataagggattttagatggatgtgatattttctaatcctatgaatttggatatactctatatccagattcattgtactaggaaatgtctcatccgtctaaaatcccttatattttaggatgaagggagtactatccggtgtatcaaccaagtgagaaaaagatatttttatgaaaatatgtatgtcaacaaagtgaagaaaatatatttaaaagtaaaatttgtttgttttccttagtaatcattgggcttaccatgggaaaagggtaatccctcaccaaagaccctggtgttacctaattatggactttacatatgttgtgacagttttcaaaatgtatatttagtcactaaattttattataagaaatttaaaaatctcatgaagttatgattctaatgccataagtttttcttacaatttaacttcaaacttgttcaagatgacatgttattttttatcattttctggaacaagattgtcgatgtccccaatgtagccggatccggtttgcaacagagagatactttgtttgtgccgatggaaattactccattggcttacttgacgtcttgacgtgttgaccaacgacatggccaagcttcggcttggactcttgttggttgaaacgctcaaatcaaatgtgactaactcaaattacacgcgtttctacacttcgctgatcacatattcatacaacaaagtggtaattaagtctaaaattagctgacaacttctctctgtttaaccagccagccactgcacactgatcagatcaagatatatacagcacaacattactgatattattatatacatacctgctgcattaatttttcttggaccaaaatgctccattaattttgacttagaaatacatgcgagctcatgagctcgtcagcttcacttcacagagacgaccatggcggcatggcactcacgttgtcggcacctgccgacctaattctcattcattcgttcagtttttttttccttctctgaccaaaaacaagaaattcagttttgagtgtagctcgacaaagatcgataattcagtcagagttttcacggacggtgtttgtctgaatctcttcacctcttcaccaaaacgacatgtttttgttatgggtgtgatgtgagtccttaacttctcatggagaaattgatatgattctttgtattcgcttaagacatcattggtcgatgatttcagagaacccggttaattgattcagacagaaatggtttctttgtatcctttaaaacatcatggtatgcatgtgtatactgttagtcagattaagcaatggcaactcagtctttgtttaatcatacatatgtactcctatttaccgctactgatttgattctcatctctgatgaaacaataatgaccttctatcaatggaaaccaccggcggcaaagcaaaacggcggccagtttcagagtttttctctgaaacatacggctgttttttttttcatatcgtacagtacatagtccttttgcagatcatatgtgcctttcaatctgtcattgcagttcgttccttcttgactatgtatgcatccatatgttcgtggtgacccactcgggctagctgaaagtctgaaataaagtaggagtagtagtattcattgactttaattttaatattcagagaaatataatacaacgatctctctgacttgcgacttgttgatatcagaaattagtatactactgttgcctgtccaagtattcaaggaaaagagtaaattgcgttcacgatatataaacttgtatggtgggtgcaaataggtacaataacttgtaaattgcttattccggtacaataacttggctagttcatgcaaagatgggccaaaccaatccacacaagtaaaattgatgtaatatgatacgtactagtgtgtaattattgttacacatcaaaattttttactgacacatattattagtcgcatgatactttcaagatttagaccaacgaaaaagcaaaataattaaaaatacctgattgttaaaatacactttcaatgaaagtgtcagaacatgaacatgaaaattaaaattttcttttagtagttaatagtacatataacaattgtcttggtcttgaacagacaaataaaaattagacgagttatatagatgatcaaatttttccaaaaaatgaaacaaatattgtaccctggacatgaaaaataaacttttgcacatttttatttggattcgaaataagatctccaaatcacagttatatgtatatgctgttatgtcattagtgtgcactaatttagagcaattttacttgtgtggatcattttggcccagttcgcaccaactagccaagttattatatcaaagtgagcaatttgtaagttgttgtatctatttgcacccaccacacaagttcatgtaccgtgagtgtaatttatgttagagtaaattacatgtcaaaataatccacacaagtaaaattgctctaaacagtattttagagcaattgggaaaattttaggcatctgatttcacaatgaatggacaagatcgttccagcacagcacctataaacagtattttactgtgattttcactgttactacggtgcctacgctgtaataacggtaaattctagcatgaatgcaagtataaaatggacgattataaaaacacatgaacgatcttttgattagatcgcatgaaaaatataggaatcggtgtcgctctttgtttcagcgataccgttcggtctcgctcgttctttccgcgagagcgcgcggtctcgcgcggcttgcgccgcgcgataccgccctcgacgtcacgtctacgctattttcgctcaatggttatgcgagatcgacatcctgaatattcctgaaataaaattgaatgtgcggtatattttcaaatttaattccctcggcaccacccctgccggcaagcatgactcagtgactcctcgtctctaatgtgtgggaggatggggggcaatgttggaagggagaaaaaaattaactggccttgtgtacctttccaaatcttccccatatagtagtccttcattttgtgggtggaaggtaagattcagcagcacacatcttgacacacacggacggcgcagatgaattcgggcttactatatataatatacacacatacatgtctttgtcctaggggtgtaattttgacaaacatgaggctttgtatcatatgtgtaattaatttgactctaagagaattcagttgcataagttgaactcttgtgtgaaaaggtgtaaagttgattttgttttctttctttacaatgggcttggatcaggttgggtttagtaggctagatatctctcct

SEQ ID NO: 13818 - DNA, 4729 bp, Oryza sativa
catcacagatttgtaaatagagcatgtttcatcgtcacggtcaatcgccgatggattcgacagccactatacacatctctattcagaaacagatactttacttttgggccctgtagtccaggattcataaggcttcccttaaacccatgccggctacatgttccttgaacacgttgggtggtaggcctttcgtgagcggatccgcgagcatcctttctgttttaatgtgctcgagactgattgtttgatcccggactttgtccttcacaacatagtactttatgtcaatgtgtttggcagcaccacttgactgattgttgtgagcgtacattactgcgggttcgttgtcgcagtataactttagtggtttctcaatactgtcaaccacctttaaaccgggtatgaacttctttagccagttcacctgccccgttgcctcatagcatgctataaactcggcatacatagtagaccctgcagtgatagtctgttttgagcttttccatgaaatagctcctcctgccagggtaaacacgtatcccgatgttgactttgtattatcttttgcaaagtcagaatctgagtaccccactatctggagtgattctgatcttctgtaagacagcatgaggccttttgttccttgcaaataacgcaagactttctttaccaatttccagtgctctaggcctggattactctgaaatctgccaagtaacccggtaacaaatgccaagtcaggtcgtgtgcacacttgcgcgtactgtaggcttcctacagctgacgcatatggctttgttttcatttcattgagctcatactgatttctgggacattgcgatgccccatacttttcgcctttcattataggagcaggtgtagcactgcatctgtacatgttgaatttcttcaacaccttttctatatatgtcttttgagaaagtcccaatgcatactttgttctatctcggtgaatctctatgcccaaaacatatgaagcctcaccgaggtctttcatgtcaaagtttgaggacaagaatttctttgtttcctgcagtagactgacatcactactagccagtagaatgtcatccacatacagaattaggaaaataaatctcccattcttaaactttgaataaatacagttgtcctcgacattctcttgaaacccaaatttctttattgtcccatcaaacttcaagtaccactgtctcgaagcttgctttaatccataaatggatctctttagacgacatcccatattttcgtttcctttcatgacaaaacctttcggttgcgccatgtatactttttcctccaaatctccatttagaaatgccgtttttacatccatctgatgtaattccaaatcataatgtgccactagtgccattataatcctgaaggaatctttacaagagactggagaaaatgtctcattgtaatcaatcccttctcgttgcgtgaagccttttgccacaagtcgcgctttaaacttttctatattccctctggagtcatatttggttttgtagacccatttacagcctactgttttggctcctttaggaatttcttctaaatcccaaacatcgtttagtttcattgatttcatttcatctttcatggcttccaaccattcagatgagcgagcgcttctcatggcctcttcatatgaggtgggatcatcctccatatgcgactcttctatattataaactttatagtcatcacggatagccgatcttctgactctttcagaccttctaggggcctgcacatttggcacatcctgtacctgaggctcttgatgagtctcctgtactggcacattatctatttgaggctgttgtagctcctcctctggtgtggcaaccatttctgttgaatcctgtataacaggttcctcactctcattcattgttgccacaggaggggtaacaacaggtgctggtacctcaatgacaggcattgcaggcacaacatcagcaggtagagagaagaaaggttcctgagtcgacggagcgggtacagacacccgcctctcctcaagatcaatttctcgaactaccgagctccccctaatcatttcgtcttccaagaagacggcgtgtctcgtttctacaaactttgtataactgtttggacagtagaaacgatagccttttgatctttcaggatagccaataaaatggcaactgactgttttggggtccaacttcccaatatttgggttaaatactttggcctctgcaggactcccccacacacggaggtgagttagcgagggtactctccctgtccatagctcatacggtgttttgggcaccgatttgcttggaactctgttgagaatatgaatggcggtttttaacgcctccatccataaaccgagtggtagtgtggagtagctcatcatgctgcgcaccatatccataagggtacggttgcgcctttcagctaccccattctgttgaggttcgcccggtgttgaatactgggctactattccattctctagcaagaaccttgcaaaaggtccagggacttgcccataaggcgtatgtcgaccatagtactcccccccacggtcagatcttactactttaatctttatatcatgctgattttcaacttcagctttgaatatcttaaatttatccagtgcttctgatcgctctttaattggataaatataaccatagcgggagtaatcatctgtgaatgttatgaacgagtcatagccatccacacttttcacaggaaatggaccacaaatatctgtatgaatgatctctaaaattcccgcgcttcgttttgcaccctttttgatgctctttacaaattttcctttaatgcattctatgcattgttctaagtctgagaactccaatggaggaagaatttcattcttaactagtctctcaattctccccctcgaaatatggcccaaacgacagtgccataatttcgatgagacatcgggagttcgctttcttttcttgttttcttttgtcaacgaggacacaacattcacattctcagaaagagataacaaataaagctcgtctcgcaacacagcaagaccaatacatgcattattatgccatagttcacatttgccacttccaaagcggcaatcatatccatcaaaatccaactttgatacacttattaagttcctttgcaaagaaggaacataaaagacatctcgaagtaaaagtatgaagccattcgcgagctctagaggaagatctccaacagcttcaactttttcttcaactccattggcaactctaatggtgctttctcttctttgcgtagtcctcgtcgaacggaatgcctttaaacaattacaagcatgaatagttgctccagaatcaatccaccatgtggatctagagtaaccaacataatgagattcatttacaaatgtaataatgttctcacctttctttgccatgatcattttcaaaaagtcaggacaatctttcttgtagtgtcctgtcttcttgcagtggagacattgatctttctcaacagcgaactgttgttgttgaggcagatgctgagactgtttaccttttgaggtgggagacttgtggttctttttcttatctttaacatagtttattgaaccaccatttgattctttgattctctcctcctcttgcacacaattagcaatgagcttctcaaagttccatttctctggacttatgttgtagttgacaataaaattgtcaaactgctttggcaatgaggccataaccagatggaccagaaagtcatctgttatgcccaaatccattggcttcaatttggaagccatgttgctcattctaagtatgtggtctctaacaccacctccatggtacctttctgtcacaagctgcttgatcagctgtgtagcataagtctttgaagagccagtaaactgactctttattctttcaaggtactctgagacagcgtcacactctgggatcgagcccaatatggtaggctcaatcgtattctttaccacagccaaacatttcttgttggctaaggaccatttcttttgttcaatgtcatacgacatgacgagaggagcattgtccctctgtctcttttgccagtcagcatctgactcattttcacctctgacaaggtcagcaggttctataggacatggggtagtcaatacccagtccacctctcccaagataaaagcaaggtcgagttttcttttccattctgcgtagttatctccttttagggtcggaatatctttaatgcaacccatcaaggagtagccacctgaaataatcatgtgcggtgagaacaaaattaacattaaaatattatgcattaagcctacatcaccgttgggcagaattagacataacacatataaccataactataatattgcaattaacaacgttggtcagaaaattacaacatcatagcacataattaatgttcctaaaattaaattctcccgttggttcgaaatttaattttagaaacactaattttcatcaatttcatctatttgcagcggaagactatataaaatcatatgaacagtagcaaaatctctgtaattctctctctgtgaaaattctcccgttggttcaaatttaaacagaggtaaaacatgcaaaaatctattcaaaattctattgaaatttgcatgaaaaattgacaaaataaaatggaaaaattgctactgttctct

SEQ ID NO: 13819 - DNA, 6538 bp, Oryza sativa
atcatcctaataaatacaatgcatgcatccaatagaattagagaacatgagagtggagaattttaaaaagtaataatttaatggaaaattggtcatagttaattgcctacatgcatgcataccttgtactcactccgtgctcgtaaaggaagtcgtttaggacaatgtttaagtcaaacattgggaatataaatcatgaataactctcaaattattgagtttgaaaatgtaaaaattatatgaatagaattttcttgaaaaatactttcacaaaagtatatatatatatatatatatatatatcacttttcaataaatatttttatagaaacaacaagtcaaagttgtgttttggagaccgtgtcgttgtcctaaacaacttcctttacaagtacggagggagtactattgaacatctaaaaaaatgattgtgccttatattatggaatggagggagtacttagggcagtcccaacccatagtgtccataagtagtgtctatggtgccatgtcaataagacatcataatagaaactacactctacaatccatggtttcttaaagtgggccattaataaatatatcatctctcttctctaccaatcatatttattcttcatctattatgaagacactattctctcccaatgcaaaacttgatagtgtctagtgtataggttctcgtgttgaagctgtgtcttgcatgagacctagtttcttcctctcttcacactctctcttaattaatatagtgtcacataagctaaaagtcctacatggcaatatagttaatgccatatacaccatcctaagtggagggttgggattgcccttattgtttgcccattattccttaataagccaaaacaattttgttagactttgctctaggatcacctaggttagatctagtcgggtggttctatttgggtttgatgaacgacattgtagatgaaagggagagggtttagataccgaccggttgaggagttcgtggaggaagaggcgccggacatcgtcgttgtcgtcgcggcttgacgtggatgcggcgccggtgaggtcgacggtgatgacggctgcggcagtggtggtcgtagacgtcccggcgatgaggcgtggcgcggcggtggcgtttcccgtcactggctgcgccccctctcgatcggattagggttttgtggggtggagttggcggcggcggtgaatctagaaacatgtgccgtgccggcctccaccctcttttatatggcgcagtgtgacgggggcccaccagccattgggctgggcgcccccgatcagggcgcggtcaaggcccccttgagccgttgggctcaaggggagagagatctatctaacaaatttatcaaggaataaaaaataatttataagtaaaacatttatatatgtgttttagtgatttaaaaggcaacgctgaaataaactactctgaaagtaccttaaaatcgacatcaaaattaaatttacaatttaaattttgctttggcttcgacttattagggcattcaatggggatcctacatactagtgatgtcattgcccatgaagctacaacgatcaaaataaacaaacttaggtgtgaaatatgacactgtccatttattttgagacagtgagtagatcgtatgaaaatgaagatggaaaggcattgatgctgttgtctccgtagatctcttttgttttttcctttcgttggcttgtgcaaaaacaaaatcctctgaatatatgtagtattctttagatcccaaaacgaggccccagtcgtgttaaagattgcggtaatgcaaatgcggttgttgtctctgtcagccggcactcaccacatcagccacagctagcttcccagctctttccatgtcaaaaaaagaacatattttttcagctctttctgtcacgccatacatgtgccagtatcatgccagtgaatgggcacacagctgacgtcttgctgactccatgtccgagccactacaccctctgaatggccagttttttcagggcctaattaattaattcgatccgtagtactaccgaaaattcaatctaaactttgaaatcatcagcaaatattcatagggcttatgattctcaaatcaaaggaacagaaaacgtaaaggattaagatgtcacctacactccatccttcagaaatttttccaagagctctcatcttatcctaagaatctatgaaataaatttgcaagactacaatcctcaggaaattggtagtgtccatttctataaaacgaacaatacatacaatggaaaaaaaaaatctaatgattcagttcctacaataattctataaaagtacttaaaatttaataatcttacttggctagtagcctagtactactcctacttgccacagcaaaaaagttttcttttcagctcccctcgtcagaagaaaaaaggcacgagaaatggggttcgctttcagctacaggcaggccgcaggcaccactccactgctacttccccttttctttttcaggcctctcacagtgtaagctacggggctcgtacccctagcctaaaaaatttaccccaagacactcaccccacagtgtaagcatccatatatgtgtggcttaattggatggagacaggtgaaggaaacgaagcccacagtgcctgttaccccaaatacgttacctcaagcccactgacgaaatttattccccacctacccttccacctagcgactcgtcttctcctccactccatcaccgtggcctacctctcctgccgcgccgccgctctgcttctcccgcgcctcctcgcctcccacaccgccgcgcctccttctcctctcctcccaagcagcagcagcaggagatggggcggtctacggcggtcggcggcggcggcttccgcggcgcggtctttggcggcacggtctgcggcattcttggcaacgactcaccatcgtgtgggcggctggcggttcttggcagcgcgcggcgaagactcggcggaggcggactcgagcagctgctccatccacggccgccgctctgcttcttctccctcgccgcgcctccttcccctccctctctgtctgccgcccctcccctctccctttcccactccgtcgcggcgatggtgaagggccatggtttggttgcgttgcaaatccatccattcactcccttgcgccgtcatggtcttcatcgccaccaccacagcggcactggcaccggcgtcatggcgcggccgccgcccgcgtcacactcaacgccatcggagagacgctttgccacagctgaatgtacacagaaaaaacataatattctctctctctctttgttttttgatctatttgtgttcttcgatttgtttgcatggttctgatttgattttgattttgatttgtatttgtgttgaagcaactggaagtgttctaggcccctccccggcagccaccggctcgtcgtcggcaccccgacccagcctcccgcgccaagcccgccgcccccaggagggcggttcggggatttcaccaggcgaaatcgatgtgagggcagagctcggccaggaacgatgcccacagtgcacgcgccttgctttttcggcgccgcgcgcttcctcgcttcgacgaagtttcgcgctccttagcttagggacaagtcgccaagtgaggtcccaggcgcatgctccacgtagaccaaaagctgagctggcgcgacgaggttacgcgccaactcagtgaggcctcagaggttggtgcactgcactactgtatttcctattcatctagtagaacactaggtagacctgggacttgggctgtactttatcgggccggcccaagtcacgtcggcccacacggtataaaaatcctggcccgttttggcactaagcacgatgggcccaagtcccacatcaactaggcacaatttccatctctgcagggcccaatggaccaactataaggctgtagctaattcaaccaagtaaaaaaaaagctctttcttttaagacaagactattcggaaagcaatgattattttcgaaatcaagctctctcacgaaatttctggcagtgtacggcaaatcaggtcgaaaactaaatctctgcggactaaaaggaacatatgattaattaaatgtcagctgtagcaattttaaaaaatagattaatatgtattttaaaaataaactttactataattttgttttaaaaatgtggacacaagagttggaacacaaattttgacaatttgactctttccaaaaactaattttacaaatgaatcgtggccaaaacttattttaaaaatgacactttttgtttagcgtcaaatcgtatgtcgctaaacttagacacctcagtgctacgtcaattggcgcagaatatcgtgtcaccgcggacgagagactgagtcggcgtgccaacgtgcattcagcgtcgttctatttggcgttgaggtgtctaatttcagcgccatacgatttgacgctgaacaaaagcgtcattttttaaataagtttgggcacgatttatttgtaaaattagttttcgaaaagggttaaattgtcaaaaatttgtggaagttggaaaggcggaggaaaggacacagccgaaagtttctgaaaaaaaaaaaaaactatgagcaacagtaggggagttgttgagtagtgcgatgcgatgcggtgggaggtggcaggcggcgaccggcgagatcgatgggttcttcgtcttccacctccctcgtctccctcctcctcccctgcctcctctccttgctcctcatccgcctctccacccacctcaaccctgacccgaccgccgccgcgccccgcttcaagaggacccctcccttccccctccgcttccgccatgacggcgccttcaagatcctccaggtccgtccgtcgcttcaagctcacctccactcgctagctagctagctcagcgagcttcgcctgatggccttcgagatttacctctggttgctcaccgggcgcggcttctgttctgtgcgtgtgtttgctatgctataggtggcggacatgcacttcggcaacggcgccgccacgcggtgccgggacgtggcgccggaggtgggcggcgcgcgctgctccgacctcaacaccacgcggttcctgcggcgggtcatcgaggccgagaggcccgacctcatcgccttcaccggtgcgtttttccccctcctatccccgctccgctcttggtggcgatctgcttcgcgcttgctcatctggtcgctgcccattagtggcggtccttgctaatcatgtgcaaaacttagtgctattgatatgtgattggttgattttttttttcactctcaaagtcatggaactagtactaaatgtgagtgttaatttacaagcaacataacagttactcacaacaaaaacaaattagttaatgctccatgtagtagtagcttagtagagttagctggcagaatgtctgaataattgtgtttacattcagaggggttgggtggaatatctcgccaaatcacttgttgtttgcctatgttcgcaattgtggagaagtatctccggcaatccactcgtgtattttcacgacccaaatgaaattacttagcaactagcaaagttctgtgaatccatgctttgggttttctgctgttactgaattagtggcagagtagaatcacatgcagtttccaaaaaagtttgactacatctcttcttctgggggtaaagaggttacctttttgaatctctacgttacgtgtttttttaaatttccttcaccaacaaaaagggggtcaatctggtttgcattgaatgcttgtgttgtttttaatcaggagacaatatatttgggggcagtgcatctgatgcagctgagtcactactcaaagcaattagccctgcaatcgagtataaagtaccatgggctgccattttaggaaatcatgaccaggagtccactatgaccagagaggaactgatggtgttcatgtccctgatggattactcggtatctcaagtaaaccctcctggttctttggtacatgggtttggcaactatcatgtcagcatacatgggccgtttggttctgagtttgtcaatactagtttacttaacctttacttcctggatagtggtgatcgtgaagtggtcaatggagtaaaaacctatggatggatcaaagaatctcaacttgcttggcttcgtgctacctcacaggagcttcaggtaccgctgatgataattactagcataatcacagcacccaagattttattggaatatatctccgtcattgtgaaagggggaaaatgcctttgttcattacttctgtgtttcttcttttacaaacttatgatgtacatgtaaatctgcattgagctgcattctctggtcaaatattttatcatttgcctgagcaaaacacacacccattagttaatctcagattattggttttcatatatcagtgttttttttcgaattacaaatacagtacttttgaatctatgcttctgagttctgactcacggtacttttgacagc

SEQ ID NO: 13820 - DNA, 986 bp, Oryza sativa
ataaatacattagcttaatgactcactacggtcttatttgcaacaggagcagttctaggggcttctctgatgtactcttccattgttccaagaaatgatgacggcggctgaagaaagtacagagaagtccatttggcattagaattctcagtgaaaacaaaacaatgataggctaagataaaggtaattgcctctcttaggactggaaattggaaattcctggcgagttccaaacccctgcagagatcgtagaagtcggacaggctttttgcctgatattctaaagctcattagctctccatatacatttctagagaatcaaaatgcatgcaactctacagaataatgaaagcacactgtgattacgcgtaccagatgtcctgttcttctgtagatgtcgaaagctttgatagcatcaatttttgtcatgtcgaagaactacaacagttcagaaatttaatttgatcaggatcatatccattagatccatcgatgattcaaatgcagagaaagctggtaaataataaaaggtaccatttcgacaagattaatgattccatcattgactgcacaataaatcttgaaactttccttcagcacctgagtaacattttcattcatcatgagcaagagcaattcggataaattgttctaactagtagtatctgaagttcagatatcagaattaaggtcagccacaataccagagctaatgcatactgtataagatagtttccaaatgcggctccttcaggcttcacacacagttacagcattggtaaaaatgagtcagaaactaatctagatcaagcagataacataccacaaagttaggtgtgtacattacctggcagccgactagccgatagagcagctgctgcagtgcaggaagttgctccaagagctcatccttacctaagcttctagttctactctgaccctgaacatcatatttcaattggtacatatttgtcaccaaaaaaaac

SEQ ID NO: 13821 - DNA, 3447 bp, Oryza sativa
atcccctttcagatcagcattctggcattgtctcaaagtaagccttgagagttccatagtgcgggcgaaggaatttgagaggctttgggacagaggtcattgaacttgtcgcagaacggatctcctgcctgttaagcataaatcaccattaacaagagaccaataagagaaatgtgaaaactgtctatgcactaactggttgaacaatgcaaagtgatgccaccaatagcagcagtagccactcagatgcgacattccagctgagcagatcaaacaatctcactatgacgcggtagagattagagaaattgaacagttaaagcatgacctcatagtaattgtgattaagtagtattatacccaagatttaagggcaaaaggataaacaagcctccaacaatgtgccgaagatctacattcttgcaacaccagcaattaagcagccaaaccaataactcgggcagaatttatgtggattttcaattctcaggactgtaagtttgcagaacaacaaactcttgcacaggacaagtaagcagtgcaaccaaaatacctagcagttaataatagtctactagatgacatgatcatccgtccaaaccatactatgaataatgtatggaacttgtaataaactaataggtagtgtgataaatgcatccacccaaacgaggtaccagatgacacaaaacagaaatccctgaactacgcatcacgcacaatcagaattatacagttccacaccatcagaacaatcctcgttacctcatgctctcgagggcgagcttctggacgccgggatcggtgtcctgcgcccgcaccacgtagagctcgagctgctccttgagcgccctggtcctcctaccggactgcaaccacgcaaagcaatccgtaagagagagatggggggagggaaggagatggcgaatcgggggtgggcgggtgggtagctcaccaggtcgtcgtccttcttctcatccttcttcttccccttgcccttggccggctgcggctgcggctgctgcggcggaggcgggacggggtccgagggggaggcggaggaggcgtccccgttggggtcctcgcgcggcggcatggcggagggcgagggcgatctccccggcgcgcggcggcgcggcgaggtagggtttaggaatcgagctccgcgcggaggcgagagcgcgagatgaggggaagggaagagaagaggagttggagactgctgctactggaacacgccgcaactcttggggagcgatgaatttcgctccaagaaagaaaaagataacgagagagaaagagagattcggtttaataaaggttttggtaataaactttcagtttgatgaaattgcattcttacattgttttcttattattattgtgatgatgattagtcgacggtttggctgattacatgttgggaatgaaaacataacatgggtacaaataaaataaaaacataacataggtaagtaggaaaatgagcattgaaatatactcctccgtttcatattgcaagttattttgactttatactagtaaaaatttcttaagtttgattaaatttatagaaacaattaataaaataaacatcaaattatattcattaaaattaacatttaatatatttttataatatgtttattttatgtcacaaatgttgttatgtttttttataaactttgtcaaacttaaatattaagaaaaatatcaaagcgacttatagtatgaaacgataatttttttattattttttgaaacttttgattttttttattttaaaatcaaacaattctaaaacttattttcaaaatctaaacattttagcacgtcaaccctcgtggtgtggcaaaatagtactgtcacgtcacccacaacgggcacgacaattttgtcatgccacgccagacaagatgacgtggtaagacaaacgttgtcacaccaattagaccgcgtagaaaaaaaaattgctagcatggcgaaacaacactggtactcatccattccatgttttttttaaccttttgaactttttaattttaaaattaaacatttttaaaactttgattttaagacctgaatcttttttagcgtggcaaaacaataccgccatgacaatttcagagaaaacgttatgccacatgcataaagaaataattacccgtaaacacggacacatatataagtcgttccattcgtaaggaatctaaccaaataaattatgctcaaattgtaaatgtttttcattgttttatgagattattggacaaattctctaggagaaaggttcgaggtataggtagcaaattgtactaaatccaaaagtagttcaagcaagctataacagtttgcacgccctgggcacttagtgacccttacataatttctcaggtgaagacaagactactttgagttttttagtgatttttaaatctatgatatgttaatctcgtgaactagcaaataattagtgaaattagggtaaaaatatcactggctgtctccatggatgcaataaaatgcaaacatttaattgatagaaaggatttataacagtagaatttcaatatagtagacactacatatattgtggcctatcatcgtctacgaccaaaatttatttatggtaaaacttttatactctattcatatagagttagcgatttaaaaagtcaaaaataagctagataagaaaaattcaaaatcaacttaaaatgaagttttaaatccaaaatttgccggtgaaagataagccaaccagcgaatgacggagctgctaacattctcatgccccatcgggtgccctaatcagccaaagataaaaccaaaaatagctaatcatgtccccatcgaatgccctcaaccttaatttcgagattgatttcaaaatattttcaatatagttcctttctcagtattggcttttaaatcaccaagaaacacgtatataaaatttttacctataaattatttttttctctaataaaccaaaacggttttgtagtgaatatggcaacccatgggctttcaaacattctacattctgtcagcctagtttggtttcaacctaaaaaagaaagcctgatctgatcggtgacagtcggagccacatgaaaacaacctcgccaccaccaccggcgcagcgcgcagtgtcgttcacgtgctgttgcttcttcaatgccgttgctgaataatcttgcgcctgccgcgaggtcactgacatgtcggtggtgatcagctcatcagtgccctctgcccatcactgaaagtctgaaaaaactcatccataaaagcagagccacttcaccagaattcaaagctaaatttatatattaatttagagtattaaatatagactacttacaaaactaattatataaatgaaagctaatttatgagataaattttttaagcctaattaatacataattagagaatgtttac

SEQ ID NO: 13822 - DNA, 1311 bp, Oryza sativa
gaacaaatttgactgctctttcaactgcaaaccatgcaacatcttcgcgaaaaaggaaaatcatttgatgttccaagagagatcacaaaaaacaattcagcgagtctctctgggtttctgattttccaaggcctatactgtagtgttacatgcaaactaggtttttgattcatccttcccttagatgatagtgaagtttgagaaaatgttcatcagattgtcgagtgcctcgggatagaatttccgtgcaaataggtagcaaggcctcttcatgccattccataggcacggtcttctcatcacttggtgctgcaagaccaaacaatttatcaaaatcctcctcaaaagaattgtgaaaatgtgaaaaaaaattaaatcgatttgtagaaacagtgttgattcaagaaatttgttcagccagtcagtcacattagaatttcaagttaaatctaggtaggaacatgtcaaatatgcatgcagtaaagaaggggagaacttgttcagtctcacagaactaacttgaagattctagtactagaaagcaagaagaggaaaagatcaaataactctacctttgcattgcttgtaacatgaatactctcatcaatggactgcaaaaattcattattaattagacaaatcccaagaatgcagatttttgcgaaaattggccattaaggaaataagacatgtatgtttccccttcttttgcatgtacaagtataccagaggctcaccgaaatattcttaagcagttcaaagcttgtgtcaacagccctgtaagctttaggatgccattttccttcagaccaatcaacatgtgtcactgaccaatttgcaattccagttggatcaaccatctgcaggtacaataacggcctgaaatcactgggaagtaaacacaactgaaaaacatcatttaagagtttttgagagttcttacattaaagagggttggcaaatagtgttcatcagaatagcagttatgccattcgtttcccggctgcaaaagtgcaatcacaagatcagtaaagagctaaaattcaggaaacaacagcaattcagtggtcataaagatgtagagaaatgaaccaaagcatttcattggtcatcggaattgattaaaaacaatagtagtacaagtcaaaactcaaaactactgtgtaacaaatgcagtaaggggatttgcactcgttatggtttaccagtgctagaccatataatgctgcatggtgtgcagaaaatacaaagtggggctttctatgtgcattcactgaggaaaaatcacaaggacagagcaagtagcctagt

SEQ ID NO: 13823 - DNA, 4359 bp, Oryza sativa
tccgagtgcaaatttctcaccagcacgtatgagtcatctcggtccattcacatatgccagcacaatgatgtgtttgactattatcggaaatgttgggggaaaacatgttgttttgttctgggcatctcagtataattgtattctgcacattatcctatccttgagcttatcagctaagcagactctatctagctatatgtgtttgtgttgtttaaagctttataattccaactaatttacaccacaggagatgcaatccattcaatacattgaaaaggattatgaaggacttccatttgacttccatggtggatttgttggatacatagggtatgcagatttgtttttgcaattcatatgctcttttgtaacttgtattggatatatatgcatagttaattggttattatatgttgtactgtcttgttttatccacagctagcttattttttaaaattaacatgtccactgttttttcctggatatgcgtagtttgttactccttccgtccacttttatagggcttgttttgatttggcatagtcttcagaattaaatttgaccattgagttatcacaaaatttattgttaatagctacaaaacggtgcaatacacgaatctattgttataggttttgtacactaagtttatgtgtaatctgattattgttgttcaaaacataattagcttgatttttgtaagtacacatatgctttattttttgtggatgaaggagtattcaactttttttctcaatctgtgctctttcacgtgtttgacttacatggttgcttcacttttttcttacatggttcattacatttccacttgtaccagatatggtcttaaagttgaatgcgatgcatcatctaatagtgcaaaatcaagtacccctgatgcatgcttcttctttgctgataacctagttgtggttgatcacaacaatggggatgtgtacattttatcattacatgatgaatattcttctggtaatggagatggagattaccaaaactcaatacatagtttatggttagcaaatactgagaagaagcttctcaggatggatgccatggccccaagattatcgatcaatggaaactcgtcgatcaatgggaactcatttaccatatcatccagtgtgaataagcaaagatttgtcatcgagaaatcaaaagatgaatatatcagagatgtgcagagttgcctggattacataagagacggagaaagctatgaattgtgcttaactactcagatgaagagaagaacggattatatggatgctttgaaactctacctgaaattgcgaaaacaaaatccagccccttatgcagcttggcttaacttctcctcagaaaacctgagtatatgttgctcttctcctgaaaggtttctgcgactagaccgaaatgcaattctggaagcaaagccaatcaaaggtactatagcacgtggcagaacaccagaggaagatgaatgcctacgtttgcagttgaaatacaggcaagtatctgatagatacttttttcactgttcaaacattatgattttggttttaccagtcctcacaatactgatattttcttatgtgtttcaacagtgaaaaagatcaagctgagaacttgatgattgttgacctcctaagaaacgatcttggtaaggtttgtgaacctgggagtgtgcatgttcctcgcctcatggatgtggaatcatataaaactgtacataccatggtaagtaccattcgtggaaccaaaatgtcggacctaagccctgtcgattgtgtaaaggctgcctttccaggaggttcaatgaccggggccccgaaagttagatccatggagattcttgattcacttgaaactagtccgagaggaatatactcaggatcagttggattcttttcatataacaagacttttgacttgaatatcgtgatcagaacagttgtcctgcacaatggagaagcttcgattggggcaggcggggctattgtagcattgtcagatccagaagcagagtacaatgagatgctgcttaaagcaaaagctccaacaaaggtggttgaagagtgcagtcaacaaatatacaacccagatcgttcggattcaatgcagacaaccgtaagttagaatggagggtgaaaacgagtcttcttatgaaaacacaaccagcattacaaggtttggtatacaatgaccatcagtttggatctgaaaaattcgatctccgctgttggtgcacatattaatggctaaactacaaggaagtcgcagcacacctattctataattgggaattctaaaagcaacaaaaggacattttgctgaaagaaaggtgcctatgccaaggtggtgaaaagcacattggagcaaaattcatggtgtactacaatgtagagttagactagattacagctgacatgccttctccacaaaacaacagtgcacatgattttattgattgattgattcccctattgtggtgattgcactgtgtaataataataaactgataaaagaaagaaacccatactgaaatgcatttcatagcagattcatatatatatatattggcatgtatttgcaagattgcacatgtctcacctgagttcaaatatctgaaatttaccatgtactgtttctcaattcatgctagtattgatcctactggtgattgccccatcttgaaatttgagatttgagggcgagatggctgtttgctaatggcagcacttggttgagcatggctggcatgagcactgaacaccagatgtaagcaagggttgtactgcaaccagatcagatttgtgagctgaagaaatcgtctaagattgcatcttttcaactgattccaattccaaattacaatgggcggccggcctggcacgccattattccaatagtgtttatgaatcaattgcgcacgtcgcattatcggattgtgtcgtgccatcatcccagaatgtttctcatacgcaaatacacccctgtgagtttcacaacttttcgtagcctttttatctctgctcatgaatatttgactttaggacaagatttgatcaaatttttaaatgttgataataatgactcatatgtttacttttaaaaaaaacaaaaaaacgtgtggaatttctttgaaaaatgtaaaatttgctagattttacaaatttattttagtataacatcaacggcaaaatcttcaaaagtttcaatctttacttaaacgtcgattatttttggactgatagaacacttgcaattttggatggcttatggttctaagtttgggaataatgaaaaggtgagggagtttagtgtgattttgggaggatgagaaatatatatatggaggcgaaaatttaaaaaatggagccactcgcgagccacgactcgacctcgccgcggcggcgacgacgacgacgaccagcacgcactcgcaccggcggatcgccggcggcggcggaggaggagacgatgggcacgacgtcggtgcagaagagctggcgcaaggcgtgcggcgcgatcaaggactccaccaccgtgggcctcgcccgggcgcactccaaggacctcgacgtcgccgtcgtcaaggccaccaaccacgtcgagcgcccgcccaaggagcgccacctctccagtacgcctccttctcctcctcttcttcctcctcgcctccgccgcccaatccatcgctcgcgacctcgcgtgctaactcgattgccgtcgccgtcgccgcagagatcatcgccgccgcgtccggcgcccgcccgctcgccgacgtgtcctactgcgtccacgccctcgcccgccgtctctccaagacgcacaactgggtggtacgccgccatcgccaatgttttcctcatcgctcgccgccgcgtgatctgctgacgacgggggtggatggatggtgatgcaggtggcgctcaagacgctggtggtgatacaccgcgcgctgcgggaaggcgacgccgcgttccgggaggagcttctcagctaccggcgcggccgcggcggccattgcctgcagatgtccagcttcaaggacgactccaccccgctgggtcagctcccaatccaatctgaattcctgcataaactgaactggattaacatgaactcaatcggttcaaaaaattttgtcaccgatcgttctcatttctttgtgattgcaaatttgaaatctccaattgctttgctcagcgtgggattgctcggcgtgggtgcgcacgtacgcgctgttcttggaggagaggctcgagtgcttcagagttctgagatacgacattgaagcagagcgtctgaggacagcagagggagctccaaaggtttgtgaaattgtgattatggctt

SEQ ID NO: 13824 - DNA, 1662 bp, Oryza sativa
accctgctgccgcccagcttgaagagaacaatgcactggctctggccattgtatcaccaggtgattagcatgcatctgcctatactatctcccgattagataattcaagaatcactagtaattctcccaaatccatgcataatcacatccttttggattataacaggtagcaacacatctgctggtgcaggcagtggcttcggtggcatgcttggatcgtcaggttgggagctagcgttggtcactgaacccaccaacagcagcagcaaccaactactgacagagagcaagctggtaagtcaacaactctctattgcttatttcaagaactctctattgctcaatgccattcttttgatcatactgtgactgagagtcatttccaatttttgcactcaatgactcttgtaggctggagggttcgacaagctgctgcttgatagcttatacgatgatgcatcaaggaggcagcaaggagcccagatggatcatcctcgggatccgttcgccatgtcgacaagtgtcgcgccaccgaccaacgtgcagatgtcgatgatggcacagcagcagcaatatttccagcaggagcagcagcagcaaatggtgttagggatgccacagcaattctcagggtggcctcagtatgctggtgtttctcaggcgaatcctttcggtgatacgtattcaggtggtactctccatggaagcagcagcttgatctgaacatttttttttctgattaaaagtagagtagctttgatgtgataatctgagaactgccattaattcagcttgctcttgttagcaaaacgttgtatcttcttcagtcttcacagatctcacttgtgcacagtgcactggcaatttacaagactggaaaacagaaattcatttgttcatttctcaggacatgcttgtatattaccagttaacgatgacattagataaacgagtacagttcaaaggtaaatttgtattttgggtattacacgccgtggaggatgtccaaacatatatggacaagcattgcgcagctttgatagcatagtgccatcatgtagtagctggcgtatacccatcaggatatccccagctgtatcctgtattcagtgcaaacatcacatgaagtacatcgtttctgctagacactgtaacaaaggatccaaacaaaaaacgatcaatccaaagaaaaaaaaaaggaggggaacatcagacaagcgagtagtcgtacatatgtacatggacgtggcaacaaactctcgggtcattttcattctggtataacgagtcaaaaacattttcggccatgccattacacccaacgattctattcctagttcttataaagttctcctgtcatattggccccattatacctgaactcctgttaacccagccctcaccgtatctagtatgcatcgtcttcatcgtgctatttgttcgtcgctttgtgtgacaattagatattgatccaagcctcttcatagtactccaggccttaatcttcatggtattctgggttcttccttaggatcacaaaaccctcaagaactggtgtcagtggaagatatctgcacatagaaagagcataagcataagcataagcaaagatcaactgacaaattagaatattgtactccagatgttatagtttacttttca

SEQ ID NO: 13825 - DNA, 1889 bp, Oryza sativa
gggacagaaggacccgtcagagtaatatggtaaagggtcagcaacccttcccaaggtgaacaagactttgagcatccctcacctgaagtcaaatgaaatgaactgatatgaaacttgaatgcaacagcatgagatcacaataactggcaaaacaaagataaaaatgtttattttagatttgaacttacacaaaacagatgtcctgcttctttgtaataataacttgagaggttccgaagcatcccagctatacgggcattgtttgtaccagcccctatcaagcccagggagatgattgcagcctgcatgtaccagtttgatcaaattaaaatcaatgctcatagaaattaatatggtaggttttgctggtgaggttactaaccatagaaacttccgcatctgcatcatggctcagtctactcattgtgtccataacatttacctaattgacaggcaagtggtagaaatgtagacatcagaaaactagataagatatttatctagccaaatgatacaatctactaattttcctcgaataaccaggatcaaataatagtcatctgacaaagcacattctcaagagtattgaattgaaatagatgatgcagcagagtacaaaactaactgtcacggcatgctattaaatagttctttctcaacaattcaattgaatgattgtgtgcaacggcatgaagatagcacacatttaatgctactagtatacaaaaagaactgttacctttggattggatatgcaaagcaaacccagagctagaggaaccgcccttctaatattctgctcgccatactgtaaaagacgctcaagggaacgtacagccatttccgcccctaattcttcagccatggcaattagggagattccaagaactgctggcccttggtgggtttcacctttctcaagatgctcggagcaaattccaaggagtttctgaacctgcaaatcaaacgggaagattcatcaaaaacaaataggcgctaaaaaaatgtaatcctacaacctatgcacaattcttctgttaattgggaatcaccttaagcacgttccctgtcccagcatatgccagtgacatcaatgtcacgtcacaataattccttatcttctcatcaaaggttttagaaacctctgcagtcgcctccacactttcctgagaacagtagtcaagaatgagtataatagtatattaacataaaactggctaaaaacagacggtgtaggttcatgaagaggttgcatgttacatatgcaagacaattgacagtgcttaatccagagaaaaaagcaattaccaaaagaataaaattgtacttgggatgaatgaactaaaaatacatttgagccagttcaactacttgcatggtgcacgcgaaccaaggccaaaatagtccacgttagcgaatctgagcgttatgctgctgaatgcatgcataaatcttgtgatccagaaaagatagggatagttctcctatgccttttggaaattatcttgctaggggaatttgcagaagattgatagaagtgcctgatgttcctgataatgatgagcagaatgagtcaccatacataccaaattccagtttcctttatcctgattgatctccctcctcactgcgcaaatccctcatctcacaactcagtggcctggttgcactattggtgccgcactgcatgagtgggccccacgtgtcgcatgaaataattcaaagagaaggtagcctccatcaggaaagaggcaagtttcggcagggcatgttactgttcgcaatgatcacatgccttatgcgcactcacatgcttgctggtatggcatcctagtcagcactcaaatgatttgattaatcagatgtgaactattctcagggggatccac

SEQ ID NO: 13826 - DNA, 632 bp, Oryza sativa
cctctctccacatgtttttaaacttctaatgcacaagtctctgtactgatgttgtgacatcttctccaggcatttgctctcatttctgagtatttcagcagggatgagtcaattatacgaattggagcaatccttggtcttggtattgcttatgctggctcccagaaagaggaggtcaaatccttggtcttggtcttgctatcccactggttaaaaaatattaaccatgtgttattttgtattaacatggtttccaaaaatttcaggttagagagaatctcacagcttttctgactgactcccaagtacctctggaggtcttggtcttctctgccatctccttaggtttggtgttcgttggttcctgtaatgaagaggttgcacagacaatcatatgcgtcttaatggagcgtagtgaaccagagcttgcagagccaattatgcgcttgcttcctgttgcccttggccttctatatcttggaaagcaggtaatttgattgtatacttattcatactcccaaattctacatttatgtttttattgaggtcaaggaccgtatagtacatatgaacatatttactgtgcatgactgccttttctactgctctgtacattgtttcatgattaatct

SEQ ID NO: 13827 - DNA, 601 bp, Oryza sativa
atattgctttgttttcccagttcatgtgcctagttaatttacttttctgttatgcgcttatcttgttgctaactggaactagcagatatctccatcacgcatgttctcctctgtcctactttctgttcttttggctaacatattatcttattaccacagtcatggcgggaatggcaccagagggatcccagtttgatgctaagcactatgattctaaaatgcaggagcttctgtaaggaatcttatactgatacgttttatctcagccatcattgtgtacggcaatgtctgtctatttcctgtacaggatctaccgcttactgggtagtcttttaatgcaggaaccaaggtgaaaccgaggagttcttcacatcttatgatgaagttcatgagagttttgatgacatgggtctccaagagaaccttctcagaggcatctatgcctatggtaggtttataatctttcgtgctttttttttgtgtgtttgccatttgaactgttattcatcagacctttttttttgttttataggtttcgagaagccttcagccattcagcaaaggggtattgtccctttctgcaagggtcttgatgtgattc

SEQ ID NO: 13828 - DNA, 41369 bp, Oryza sativa
aacctctataaataaacttttaaaaatacacacctatatatatatatatatatatatatatatatatatatatatatatatatatatatatatatatatatatatatatatatatctactactacttaaaaaataagaggtgcttccatcgtccatcaaaaaaaccgggtgaaaaaaaaccgggcagaaaaaaccaagtttgtccgataaaaaaaccggacgaaaaaaaaaatccgatccaaaaaaaaagtgaaaaaaaaaaccgggcgaaaaaaacacccgtccctggcaaaaaaacacccgatcccttaaaaagggaaaaaaaaagtccgagagacaaaccgtttaatgaataaaaaaagcgaaaaaaaaagagtccgattccctggagaaaaaaaatctgatttccctggaagagatccgatctgtattggattggagaaaagaaaaaaacacttctctaggtgcttctgtcgtccgtcaaaaaacgggagaaaaaaccgagcgaaaaaaaaagaaaagtccgataaaaaaacctggcgaaaaaaaaccgggcggaaaaaaaacaaatatgtccgacaaaaaaaaaggaaaaaagggaaaaaaataccgaaacgaatccgactacatcgacgcggtaaaaagagtttaaaaaaataaaaagaaaactgtcctattccaaagaaaaatgaattatatgtatcgtggagcaaaaaaaaaaagaaaagtccgataaaaaaacctgggcggaaaaaaaccgggtggaaaaaaaacaaatctgtccgacaaaaaagaaagcaaaaaaaggaaaaaaatcgaaacgaatccgactacatcgacgcggtaaaaagagtttaaaaaaataaaaagaaaactgtcctattccaaagaaaaaggaattatatatatcgtggtaaaaaatcgaccgggcgaaaaaaagaaaaaaatagtccgatccgaaaaaaacaggagaaaaaaaaatgggcgaaaaaaaaatttgtccgataaaagaaaaggaaaaagctgaaaaaaatctgactccatcgacgcggtaaaaaaaggcgaaaaaaaactttccgataaagaaaaaggaattatatgtgacgcggtaaaaaaaaataaaaaaaccaggcgaaaaaaaagataaaagtccgataaaaaaacggggcgaaaaaaaaacaaatctgtcctatccaaaaaaagccaaaaaggggaaaaatcaaaacgaatccgactccgtcgacgtggtgaaaacagggcgaaaaaattccaaagtaaagggagaaaaaaaaatcaaaacgaatccgactccgtcgacgcggtaaaaaaagggcgaaaaaaatccaaagtaaaaggaattatatgtgacgcggtaaaaaaaatcgatcgggcgaaataaaccgggcaaaaaaaaatctgtccgatccaaaaaaaggggaaaaaatcaaaacgattccgactccgttgacgcgataaaaaagggcgaaaaaattgtctgtttctaaagaaaaaggaattatacgtgatgcggtaaaaaaaatcgaatcctattatatctagaaaggtttgacactatgtgaaagtggtgaaaaaaacccttcgtaaaagaaatgcacgagaaaaaaaaattaaaaggacggaaaaaagcgcggaggaaaaaagtcaaatttatattcgtcgttttttagtccatttatatatcttctttatctctaatctaatctaatctaactataaaaagagaagtttctacagtatattaaaaaaggaaaaaatgcgcgagaaaataaaaacggtttaaaaaaacacgtgagggaaaaatgtcagaaaaaagcacaaaagaaaacgcgctagaaaataaagtttcgtagttctaattttctgattgttatcgacatggttatgcatgaaaaacgtatattatcattacgttttttcacccgttgcaacgcacgggcatatttgctagtatatatatatatatatatatatctcaccacgtacatatgtaaaattctaagatcaaaccttgagttattgacactgacaaatgaaagcgctcctcactacaaaactttgattattttataaaaacatggtgattttttaaaaacttgagttggtcgtttctctaccacaaggttttgtccttacaaggttgtaaactatatcacctcctctgatttgttttaaaagcatggtagttcctgcgtaataggtggtaatcttcaccacatgtttttagtttccaagtttctaaagtcgtatagcactcggccagtactcgcaaccatatatagtaatagttactcactccgtcccaaaatataataatttaggattggatggaatacatcctagtccaattaatcaatctggatgatgagctatccagattcgttagactagaatatgtctcttccaatcctaggttgttatattttatgatggaggcagtatctaactagtgtttcttcacgcatgatttcattccagtgggtggagtcatgcactataattttaagattggacttgagtttttttttgggagggggggggtgaaagatcaaaattgagttagtgacaatgacatctcacaaatgaaatcgctcctcgtatgcatgtatgtacggaattttttaaaatcgtggtggttcctagctagtactctctccgtttctaaatatttgacaccgttaactttttagcacatgtttgactattcatcttattcaaaaacttttatgaaatatataaaactatatgtatacatataagcatatttaacaatgaatcaaatgataggaaaagaattaataattatttaaattttttgaataagacgaacagccaaatatatctaaaaaagtcaatgacgtcaaatatttagaaatagagggtgtatgtggcaatctccaccacaagtttttttttttgttctttacaaggctgtaaactatatcacctcctcagtgtatgtatgagatctttttctaaatcttcaaatcatactagtagttcctgcctagtaggtggcactgtggcagtctacactctacaggactcaacaattaactaataactcacttagggtaacatctatctgagagcagagatagatatagcaaggggcagagcccctaccagtcatcgaattcttcattgaaattttagttgtggaattgaggatataatttttatagctatatactagatatagtacaggttggctgaactcaaaaatctttctagctctgtcagtgcatagaataaacgttggtccacttgattttttttatcaatcctgatgggtagagtcatacaccgcataatttcatcgccgtagtatcgatgcttccataatgtttcctttttaaaagtatatatatacaatattgcccatgagatgatcctgttaattagacatatatatgccgtgcataattaaagatagcatatggtttgccggtaggtgaaatgaacagtatagctacgcgttcatcacgcgttcggcctcaatggcaaatagtcatgggcgctgggaattagtagtcttcgatcgattacgacgcaaccaatcaattaaggtcgaacttaactacagcttcatcatccaaatatataaaaaaagaaaacgtcagattaacaagattttcttcagtttgatcgaaacctagctagccagcgatcaacctgtacgatgcctacacgcacacgtcgctagctgcccaccaataatggcattgttaattcttccttggcagcaaatgatgcactattttttttattgcaccttgttgctgccgactaaaataacagcgtaacctagtaagaaacaaaacaccagagttagtacctctgtcttaaaacaatataaaattatatgagatatattctagtgatataaatttgatatgtatagactctctgtccagattctctctgtccagattcgtagtcctatgatatgtttcattcaatactaaattgctacgttatgggtcggagagtagctaattggtgatcaacatgacagaaacaacccatctagcgtaggtctcatcggtagataggcttcaactcgatctgatccatttgtaacagttcttgttgcgtgcctgcaatgaatttctcaaacagctagctagctaaccgcaggcaatttatacttgtacgctgcgctaaatgcgagtccatttgctcttttgcgctgaatatggaatggatgacatggtttgtgataattattcgagggtataaataaattaaatgaataaactattataaagttgaatatgaatttaaaacggttttctcatatataaattttttctaaaaaaatatcataccgcttaggtttgaaaaacatgtgcatattatattcgtcacatcattctatcgtaagttgaagatttgaactcaaaatcttgggatgctacttagatcattgcaaccactagactatatgctcattcgcaggggtgtaaatatggagcaagtatactactcactctgtcctgaaaaaaacgaatctaagactagatgtggtatattctagtacaatgaatctggacagaggtatgcccagattcgtagtactagaatatgtcacatctagtactagcttgattttttatgggacggagggagtacatatgacatcaattgatgcaagctagatggttttctgtcagattaccaacctcaagatgcaggtatttgtttcttaacatcgatcaatctataggaataaactcagtaatgatcggatcagtgttgtcgacttgtcttgtccatttgtctcttggccatcgtctgattgtgtcccttccaatgcacaaacgggcgtaactgtcgaggcaggagccaaagaacaaagctagcagaagctctgatcacttcgtgtccccactccccagtgggctgatgatgacctgatcacttagcttgcaatatggctgacttgaacccaaattaatgaagatcaagctcaattatgcagaaatatattccacttatccatttttatcctcctctgcattatcttcatccattattgccgctttgacctgcagctgcatgcaaatgcaagagaggatcatatgctgctggttggccggtgaagccatattgccactgcatgggctcatgcacttggatgcaggacaagtgttcatataaacgtacatgtacttgatgtactctgaactcaaagatagaacatggcctgaatgcagtcagctgcttgattgcctcaataattctgcttgtttattgccattttcagcagtatgattgtccatattgtatttatgccttaattgctgccgttagtggttgcacatgcacctagctagtagttgacaatcaagtaccaagtatcaactatcaacccatggtcggtataatattcttcagttttccatcaagtccaactttatgtacaatggagatttcctcgatccaaaatccaactttaatactttgtgtacaatgaagatttcctttttttttatccccaagtccaactttgtgtgcaatgtaattgtagatttctttgattttccaaggccaatgtcaatttgtttgtcaccataattaataaaaaaaacaaggcgctggaaaataccagcgaatcggtcattgataattggtggcaatatattatcctattattacaatgaaaaataattcgtggcaatatattgtcctattgcaatgataaagggcttgttcagattgtagccaaaatgaacattaccaaattttggcattaattttggcaatttggcaatattgacaagttttggcatgatttcttatgatttaccagagtttggtaaaaaactaaatggatgcacatatttggcaactttgctaaaatttggtaaggtttattttggctacaatctgaacaggcccaaaattttctgcaacaaataaccatattttgttgaaatgatttataatcgtcgttttattcaatatttttgttgcaaaaggaaatgagctatcgccacacaaaaaagttattgttgcaaaaaacatattctatcgccacagttttatttttctgccaatttgcatagtccatggccatgataagttacttttcactattttctattgctacgattgttgacgaaaaaatcgaacacaccggcctgagagatctgcttaactcctgtgcaggtccaaaggttgatgagatgcgggcgtgccagtcaatttgatcctgcaactgacaagatatgtaaacagctgatcaaatagccgatcggctgacaagccgatgtagtagttccagctgatagccgataatagccgatgccgataccagccgatagcaatagggtttaagcaatcggctatatgtccaatatagataatgatatataaggcaatcggctgttgatgatgtgataaaataacaatataatcgagtagaaaccaatcggctagaaacccaagatatagatagaggcacctcgactcctgatatgggttcacaagccattacatttcggttgaaggtccgatgtcattaaatccacaggattagataaacagtaaaaactatgttgcgatcggctaaaatccaacttatatgtatatgcaatccttacaagccgatgcaacgttcagataacttatcggctagcaccccgataaaacattagcatgaacttttcggcttaacaagacttatattatcaacaacaatctagtaggtcgaacctaaccgatgcagtatgagattgtatatgataatctaatactcgatgagccgatagatctatctaatgtgatggatataacaaatctatttagaacaacattgtgattgtagagatatatcggctaagacagaagatcggacctaaccgagacagttccaacaaaaccgatgcgtctctaaacacaatgcgattagagatagaattgagatattaggtaggcaaatatatcaaccaaaccagagcgatccaagagatcgagacgatgcagccttgaacaacaccaatacagccaacagattcaccaaggcccgacggaacgtaggacttatcccttcaccggagatcgaaacccgatgcagccccgcgtcaggtgcccaaatcccgccggaagataagtaaaaaccttagggaagagggtggcgatgcgccgagagtagttgtattgatcgagattgatagattacatagaccccgggtgaacatatttatacccatgggttgatacaagtccttgttggacaagaaagaaactatcctaaagataaaaggaaaacataaagtccttatcggacactaaacacacttttctaaagataaaaggaaactaacaaaatattcctaattaatagataaactgccatgccgcatccttcttgaactcggactcttctggataaattccctttagttgatccgactccatctagaacacggttgctggcgattcgacgactcccatcggctgattccataactctgaagccgatactgactctaagccgatgatgactttgggcttaccaaatttcactattaacaacgatcaacaaatttgttgcaataaaaaaatttgttatctcataatttaacttaattttttatatggacacggattgggacaaactttatatgaaacttataggtctagatgagacctacaattttataagtgacatctttttcatttgaaatcttttagatactcaaatccatgattcaatctcagctaggtggctcaaatgaaaagatatgtaatttctaccataattgatgcgtaggtgagttagtaaaggagagcgtgcgtgggagaggtcaagggttcaaatcctaggcatgacaagatatgaaaaagaaatagttatgattatagtttaatattaataaaaattttgatttgatatatatatagctaatgccacgtatgaagtagtggcaataatcatttattgcaatatgactttttttgctacattgtggcaatatcaaaatttgttaccacccaataaaaatcgttgcaataacctattaccactatatttgttaccacggctagcaacgattttataatggtggcaacatgtatctattgtcacgattttaacattgatgccatgatgtttttcgtggtgataaaatcattttcctagtagtggaccaggtgtcatattttggtttttaatttgcaatttgcgtagctttatgatggtgttttcctactttttttttctatggaagatgtgatatctagcacgaggaattgtcctatgttgaaaaggaataacttagtcttgaaaacacagaatttttaattgatcaaaatgaccagaagcagaggtcatccattcttcagcaggtgaatttcaaagatcaggttcaaatttgctagtctaaacttagttataaaagacaaataattgtgaagaaatccacgaagaaaatctcatcccgacaggtactaatcagcccgggcttatgtagaggtcatccatggcccatggttactgattacatttctgttaatccacagaacacttaatttttagaatacaacatataataggttcatgattgcactgctcacgtttacaaaagaattacaccaacttcttcatggctcacatagagttcttctctaagtgagagcatttctggagttctcttttcttttgtcctcaccaattgctggtgaggaggtattgtacctacagaaagagacaatgtttcttacttcagaagaggaaagaaactctcttggtactcagaataatctcttataatagtcttctccaatgattgattttaaaacaaccagatgcttcaaagccaatgcttcattgccctatatataacaccagctgcagaccggtcttcgcaaaaaggcactccatttgctttgttatactcatagctcctttgcttcaaaatgacgagcatttaccaagaattcattcataccaagtgtcagagcttcagaagcatttgtagatatgttcttcattcaattgtcctcatctatagattcgtttccttgcatgttcacccattctggatccaactgtcctacttcttcttaattaacctcctaggttcagttttattaatgtttctgaagccaagcagcccaaagttcaagccaggttacattgacatgttgttcttgtcaacctctgctatgaaaacggagcggatacgaacggataatgcttataccatattcgttttcatattttttaccggataggaaaacgaatatggatagctcgaatacggaaacaaatacggattatctcgaatacgaataagaatcgaatatgatcggacacgaatacggaaacatttttttctcggaacacgaaaaccaactcaacttctaatagaaacaaatatcaacatatataattagctcattttatataaaatgaggtataatttataaatattttttaaaatttaaataatattaatagtatggactagtgttaagagataaactactattaaaaatctataaaggtatattgaaggttatagagttagaaagaaatggggtatgtctcatgggtcctgcggatatccgaatagcactgttcaccggatatccgaattattatccgtatccgacggaaaccctgataccatatttgtattcgtatccgggagaaaatattcgtattcgtatccgtatctgaactatccgagaattatccgatccgaaaggtatccgtatccgtttttgtccggatcggacagaaactatccgctccgttttcatccctacaactaacccatagatttgtcacaattgggggatttactgttaccatataagttggcccaataggcacaatatagattacatgactagaggaaatgaccaaaatacccttcacatctatacctttaacaccccctatcaaatgcaatgtgtatgcaatagcattgcttttgaaactagacaatgggttaatgaggatgatgatccatatatttcattttgaaactaaaatcaaagccatgcttgaaaatattgttgaagcgtgcaattcttgaaaaatgatgacgaagaagaagaattcatcccctcctcaatgaagtggacctcggttcttcggctctcgttaccttgaagccttcacaaactattcttcggctctcttcactaaatcggagacgttgatgacaatggtaaaggaccttcacatattgttcttcagcccttcactgattgatgatgatgatgatgatggtgaaatgacaatgatcagctctgatgtggagctgatgaagttggagatagattggcatgactttgacgaattgaaggatgtgcaatgagtttgatggactcgatggcaactagcaaatgacacaatgataccagtatatatgcagctggacttgaatagatagactagataggaaacaaaagaaatcgatttgtagagtacattgatatgccagcaaaagacaaaatgctggctgcccagaaactgcagactagctgattctatccaatttggtagcagagagcagcagctgatgaagatggacaactcctggtgatgaaagaccacgaaaactttcagtaaagcacaggtttggacagcaaaagcatgaccaggagctgtgagcaactctttgaagcattttgtcaagcaccttgtgttagtagttgtgaagaaatgatcaggaaatcaacctaatgaataaggtggtaatgacagtagcaagcatgagaaataagatgatatgaattaatgagccgagcagagaccaatccaagccatgcgtagaatggaatttgctacaatgctgctgctagcccagaagaaagaagaggcatttgcttttgctgctgttactagctgatgaagaagagaaccacaggttgccactgctgctactaaagatggtcagccctaaacccaacctatccgaagagaaagaagacagaataaatatgcagatcagacacctttctttggtgctgctattggttgcctgctgaagatggacgacgatgcaatgcatactgctggctgctgcttgtttgctgacgacggcgccgcggctggatttgggactgagatcggatctgatgacctcagggccggatcgagctgctctcaaccaagatgacggctgccgctgcacctagttgacgaagatgacgactgacgagacgattggagttgatctgaactgaggtaatgatgtgatggggttttgggcatcgagccaccggtggcttgccggagcgccgaccgaggctcgccggagtgacggctggggctcccataccatgtcacaattaggggatttgctatcattgtatattttttttgactgggttatatattattatattgggactatataaaaaaaaactgaaaaaactttcaattctaactaaagtataattatagagggctgctacaaaacgggattccgttacaacgggatagacatattaactattctcttgtacgagtatcataggtattaggtcctaggtatcacaggtaccgggtaacaggtatcgggtattatgcagctgataccataataggtatcaggtactgtctcatataagggtatctcgttccaatgggataccgttgtctaggttttctaataattataatataatttcactataactatatttatattataacttgtatataagtattttttaaaagcaaacttgtatataagtattaaaataatatatgcagctatatatatgacttgtgaagatattacaatgtagatacagtagagtataattacattgtagttacactacaactatactcaagggcaaattcagtgtggatactagggggaggacttaccccattagatcaccattgatagaaggagatgaaatgagaagaagagggaaaaaatgaagagtaggagggactgaagaatgaagaaggactaaagaagaaagaaggagataagttcccctagatctgtccctaattatactatatactatagttacactttaagtaaaaaacttacgatattttttttgtctaaaaaacttacgatattttttttaccaattctgtgttatattaccacagaagtggcccaatagacaatatagtagattacagggctagagaaaatgaccaaaatactctttacatctatacccttaacaaacatctatacccttaacaaggttgtacttaacaagataaaaataataatattctgtctttctatgggaatatttctcatattcttcttttttttagtgcatatgggaatgtaggactaaccactggttacagctgttcgaggttgcaaaaactgcacccggggagcatctgccaggacaagccgttcagcttgtccggatggtggagcgatgaaggaaagttgctgctagtctttgtgatgctctatggaaggctcaaggccttcaccaaaggtacgggtgaatattggaggctatggtagaagctgaagcctgaacagaatcacttgcaaaggcaggtgaatcaagtgcagtgtatgtaactgtttagggccttttgaatcgtagaaataagaaaaatgaaataatagaaaaacacatgattctgacagtaattataagtgtaaaatagatgattgcaaaagataggaatgatcgtttgattggacatttggaccgcacaaaaaacacatgaatcggatgaaagagatagactcaaagaaatttttccaagagattaaatatcttgctaaattttgtcctaaacctacatgtaatgagccattccatatggattttataggatttaaaaaattcaatccttctaatcaaagggtcaaattggaaactttcctataggatttcaattctataaaattccttcataaatcctttgattcgggggttaagtggatccatgccattgcaaatttacccaattgaaaatatatcattactatttatgaaatcaggtggatgccactataatgtttcaaaattagaacatgccaccccgtcacgaaatctgtcaactctgtcatgtgggacctacatgtcagtcccatcttcaccaccctcccctctcttctcttctccccttctctctcgacgtgagatggttgtgatcactgagttcttgacagtgaacctgtatgtatattattgggcttgtatgtgttatattggttgttaattgggcttgtgaaatattggattttaattgagcttgtcagagagtggtcccctccagcgggaggctgtgaggcccccctttgtgagttcggccgggggcacgggtgaattcttgaggagtttttaggacgtatgtgaagtggattagagggggttaatttctaagtgacgatgaggactaggggatgattcttttgtgcttccaaagtctctgaatccctggtgggcaagctaaggcagatcaatcctttagccgctggcctcgaaggttcgatcccccctcctccgctaggcgcggtcctccttttatactctaaggggataccacatgtgccgcaagagccaccatcgggaagaggaaaatattctctacatttaatgcatgtcttgagccttgatccagaagtcatccgcacgtcggctgctgggcaagtcccatcaaatcctgctggctgacacaggggacaacgctgtcattcggtatttaatgcatgaggacctttggaagtatgcatgtaccgagagcacaatgtcggccacgtcccggctggtcaagccggctgttgattggatgaggggcacagagctcctcatcatcatgacgagacagggcatacctgccctcatgccgcctgacatgagctcggggcgtggggggcttgccgctatcccatccattcatcacccggtcgcagaccggtcacaggtgggtcacagacgggtcgcaggcgcacgacgcacgcttcccgtcgcattcggtgcgacggagcgcgcctgccccgcttgccataaatgcggttaggtgggtagcagtcgttccacttaacatgcatgcatggttgccatgcggcacctgcccgaggggctcgggataacccaaaccctcgggcccgaggggtgcgggggtggtcccgagcccgaggggggatggccgccccccacacaaggacgtgctcccatgggggatttattgcacgtgtcctgtgggggtagcctctccctcctgggtttggtacccccggcccccgggcccatatcgccgacagagcttatgcaatattggatgttaattgggcttatataacctatctgatatatgagctattatttggtatagtgcttaggtctatacgggctgttgttgggtgtaatgcttgggcttatataggcttttgaaattggcttagctcacttattaatagatactaatgcaaatggatataatattgggctgaaaactatgagtaaagtgctacatcttaaatggaccatgcctaaatctaattgggttaacccataaacaggctactcactatatggacctagataggccacaaagacattttgtgatgttttctgagatagataatgacaaaaataagtgtcataaagttaatgacgaaagaagaaacgtcactagattaatgacaaaaaaaaaagttttcatcaaagaacataattagagacgcatgataggtgacgaatgaatttttgtcacgtgagcgtcacggattttgaaacatgacataattgtttgtttttgtgatgtaagtaaaacgttacctatcataagatttcttatagttatagttatgcttgaatattcaagtttctaattgggccatagtggataaaaaaacacccaatatcatttctcttactacaaagatacgtaatacttttgcatattttgaaaaaaaaaacccaatatgttgaaattgcaattaatataaaattgttgtttcccaaccaagtccctttttttttacttgtattgagtcagtcgccatcaaattatcaatgcaactactccctccatccaaaaaaatcaacctctccctcctagaacaatatatctggacatcccttcataggacaatgtatctagacatacactgtcctaggttgattttttttttggggacggagggagtacgcatggaatcatccatccacgtgatgtatgtacctagtaggtgctaattctcagtgagtggtcttaataaaccttctccggtgtcttttccaaaatttgacgaattcagagaaatcttaagattagattaataatgatcacgggtttagctccagtttcaattcagtccagaaatgcttttccactcaaacaatcatcctttgtttggatcagtcgggttgtaactgcatgctttcatttatggtatgccattttttcacgtataacgaactcgatctctactcgtcccctggccgaatcttcaagggggctcctctctttcctattatgggagatccacactccaacatccacataatacaatggccaatcaatttgtcaataatacatattggataatgacctaggtgagcatagactacatactgtcaaaaatcccaggtcgcagccatcagatgtgggagcatagacttaggtgaaatcctagaaggtgtcccggcagtaagagcgtaattcccaatgaaatatcttggactacccctagccctaggaaggataaaaactgaaagtgcattaatccccttggtgggtttgggtgattaatgacaaatgtggttaagggactaatgagtttattgagctactttcagatgcattagtctaaggtgtggaagatggatgcttggagaccccccccccccctaaaagtataaaatcaaagcggaccggaactcgagaaatgcataggatagtttatttattgcaatcgagttttaggaaaaaccgtactattaagaggggttccaggtgatgctctgagatgtgtcaagtgctcttagtgtgaatcaagtgacatttccccttggagtcatttttgcaaatgctccatctgtctagaaatgcatgtccggaacttcctgtcttccaggtccggaagttccggtcttgtgaaaaagattttcctaagtgttgtccagaagttcttgtcttccaggtccgaaacttcctgtctagtttccagttcaaaattgtgagtagcggatagatgacgtcacctagccgttatacataactagctcgtttccagctcgttttttggccattccacttttacttttcgaccctagagctgttactagcctctcccaagtgttccttaccttctccactcaatcttgagcccaattcttgtgaaaaagagagattgagagtgagagaggaagatttggagatgtgtgaagactaggatcttgggtgagcacttgaaatatctcgtgggctgtcatctcggtgcttattactcttggagatgatctcctagacggttaggtgtcgcccgcgagaatccgttgcatattgtggatgtcccgggtaagtttgtgaaggatttcctctcctccgaaagggaacgaggtaagttaatgaagttcttgtgctgagattctagaggttttccaagtagagcaactcacacttgtggcgaatttctataagaaggttgagttggatcttggtggtcactcaattctagaaatttgcctaggggtgttttgggttgaaggctgtggatttcctctggggtttttgcacaagtgaggcaaggggttaattgagacccagctctttagagctcctcaacggagagtaggatcgtaagatccgaacttcgggaaaaaatcgctcttgtctctttctgtgatgtttctgtggatgtttctgtgatctatcctctacttagaatacctgtgcatcatcgtgtgaagattggcttagtctcctattccgaaatttgaatttcatctttgttctgttacccggaagttcctgcctaagaacaccggaagttccgggcctagcagaccggaagttccggtgttccttaccaggaagttccggtatgtttgaattttaccgctgcgatttgtttttaatttttagggacagcctattcaccctccccccccctctaggcttcatcagcacgttcaaaaacgtcagatatgtagtccgtcttcgacaagatcaccgggcgcatagccaggtggagggggaagaatgtcacgccccgaactagtaccgaccggaactagcctgtgacgctccaaattaacctgttaatcgataccagtcccaggaaacagtgctggtatcacagggagacagaatatcacagcaacagagatctctttattatagagtagaagtacagtcatgttgggctgcggacagatcccgagctcacaactacattacaaaagggaaacggaagccaggacttggaccaaacatcacaggcgcgacttgggaactaggccgaaaccctaaaactcatcgaagccggcttgctcctggaagaactcctcatcagtgggatccgcttcatcttcttcagcaactgggagggggattatttatatagagcaagggtgagtacgggagtactcagcaagccaggggaaataagtgtttaatgcaggcttcaaggagaggctggtgtttttgcaattgattttatttgaactcttttctgaaacaactaagtgagtgcttctcaaacgacacggatgagacagtgcgtctcgtccggtcggagtatgtgcaatgtatcagtctttagaatttaaacaaggttggcacccggccaacagctttttcaacggccacccgggccaacaacttttcaaacggccacccgggccaacaacttttcaaacggccacccgggcctagctgatcccatcagctgcagatttttcaaacaccgaaccccttttcacacagcaatttcacaagcagtagtcaaaccaaactacgctaggaatcacctcacatccgcccatgaccgtgggcacggttgttcgaacagtttgttaacctctgcagagggggtacactttacccacacgacattactaacccggatcacccagcccgtggggatcagccacgtcgggagacctccaagctttcatgacaaggcatttcgaaagccgacacaggtttaccatatgccgacgagaggggtcccagaccaacaacaggttaggtcccagaccatactgtgccaggaagcccaggggtcctccccgacaccaccccggcgaatccacatgtctctcggcatcaaggctcccctaataagctagttactcagccaggggtgtcccattccacccatgtagtcgtacttgtcttatgtttggatgaaattccaaggaatcggtccttaagtgcgagagcgggaaaccgtacacccggtacattccccggtccacgattttggaaattcatttagttcgcaagcgccgacccaggtgtcgggttttccaagtcttttgtaaaacccaagttttacccaagttgtttttcagattttaagtttgaaggcgaccatcggtactcgcacagagtgcacgaatatcgaggcgcaactgggtggttacaaggggacatggtataacaattaacaaaggaaggatcaaatgcaacaaattaggcaggtccgccaatctgccttgcagacgggacaacagattaagtgcgatcctatcaatgcataatattttgcaagcaatataattaaatttcaaatataggctcaagatgttcaaaggtggcttgccttgctcgaaatctggagcttgatcctcgaaatcctcgcactgcgggtcttcgggctccgaaactacacgtgaaacgggacaactcaacaaacggcgaaaataaggccctattaatgacctctaagcgtgccattagatggatctcgagatttgaggaattttggaagctgaacggagtcaaacggatttacggttgggaagatattgaatttctaagattattggatttttggtctaaagggaaaaggatttaattaaatcctttttggaaaaagaaaaagaaaagaaaaggaaagagggagggattatagacttttccttgggcggctagggcgcggcccaagggaaaaggagcggaccggccgagctaaatgggccggccggcccaaggcggcccaagtgcgcgcgcgggaggggaggagagagagggccggtggaccgggctcacctcgcgcggtcccaggtgggacccgcttgtcagcggctcggctcaccgtgcggagggagcacgcggcgcggcgctagggtggaggatggacgtgatacacgcgcgcggttcgcggtggacgcgggtgcggcgggtccacgcgcagcctcacggctcgcggtggaacgcgcgcacggggagggactgaccggggtcggcccgtcccgacctcggctgagctggcgccgtcgtggcgcctacgtggctgccacgcgggccggcgggaggtagacgacgacgccggccggaacggacggcagacgacagcggtgagcggcggagcgaaccacggcgataccggcgaaagcgagtacaccgggtggctgcacaggacgagaggagatgagccaacgacccggattcgccggaggatgcccgacggcggcgaattgcggcggcggcatccggcggcggaagaagggggaaacggcgacgaggtcacgaggggccgattcccggcggcgagagcatctacgcggctacgggaatccgatgctagcgtcggattgggcggagctacgccgagcgaggccggcgacgagcggggcggcgacggcggcgagcacacggcgagcgtcggcaacggtcggggcggcgccggctagctacggggaggctactcgtgctaccaccgaaaactaagggggggagatggagcgaggaggaagaacggagggaggcactaccgtgcgggcggggcgccgtgacgagaggccgacggcgcgggagtaatctctccggcctcgggccgaggaagaggaagaagagggcgcgcccggagtgcccttccgcgtcctagtgtgcaccggctcctccggcacacacgcgacgacgaacggcgacggcgaacaggggcgacagcaatggcacggaggcgaatgggagaggaagggaaaggggggaagccgggtttaaatgggcggcaatgtcggtttgggagaggggaaccggcattggacggtcaagccggcgagctagcgctccggctagcggccaaaactgcgacaggaggtgacgccggcgagggggaaaaaggggaaaagagggggagaaaaggggagctcgtcccttgccactttgggaaaaaggaggaggggagcgggagcgtcgcggcagagggaggagggctctgcctccgtctcttggcggcttgcgcgcggggaggcggggccgaggtgatgacgacggcgatgacggcggggcggtttggagcggcgcgacgacacgagcgacaggcgctgacgacggcggcgaccaggcggtcggccaccacggcacgcgcgcgcgggaaacaacgggcggcgcggcggatttgagcggcgcggctgatttgagcggcgcggcttgggcacgcacgctggcttgcggggccgggcggctgcgcggctgcaggcgcggcagggcagcggggccgggcggcgcggacggcgcagacggcgcggctctcgcgcacgcgcgcgcggcgcgcgggcagagcggagggaggggcgctgggcgcggctctcgcgcacgcgcgcgcggcgcgcgggcggagcggaggaagggagagagagagagagagagagagcgccgggagggagggggagatgggccgagagaaattcggcccatcgaacccgggggaggcaaaatagacttttgcggatggatttgatttggaaggatttggattcggaaatgaactcgacgatagatcggggattgagatcttgagatggcacggacactagacaacaagcgaagaaacaaatttcgcaattagggtttttaagagataattttcccgctaggcgccacgacggaacgggcgctacaaagaacatggggccggctggaagagccacgctcgtcaagtcagtcttaacggcccaaccaatctacctcctcaccgcccttagagtttcaaaggaagctcttgggcaactggacaagcaacgacgccgctttctctgggccggcacaggtgacatcacaggaggaaagtgcaagatcaattggacaaaaacgtgcatgccgacttgtcatggaggtctcggggtacttaatttggaaaagttcacgagggcactacgtttacggtggctatggcatgaatggaaggacccaagcaaaccttgggcgggcctagaaacgtcgtgcgatgaagtagacaaggttctcttcgctgcgtcaacaaagataaccgttggagacggaaacacaacacgcttttggtattccgcgtggatagatgggcgcagaccaaaggacctcatgccactggtctatgcaatctcgaagaaaaaaggcaagtccctatgacagggaaaggaaattgatgcttggatcaacaacttggaccttgaagccaacccgtcaatctcggtggaccttattgaacaactagtctccttatggattgccgtgagagacattcacttaaacaatgagcagtcggaccaaattgcgtggaaactcacaaaccatggagaatactcagcgtcgtcggcttaccaggcacaatgcttcggcgcgacagacacgaactttgactcgctcatctggagagcttgggcgccagggaagtgtaaattccacgcctggctggtcatccaaaatagggtttggacctccgatcgactcgcgacgagaggatggcaaaataatgggctctgcccactttgccgcagagaaggcgaaacagccctacatcttcttgtcagttgcaaatacacgaaaagaatatggagcatggtagccacctgggtagcttactagcagctcgaccctgggcgttgggggatgacccaaactgtcaaaaattggtgggagactctagctaacacggcagaggtttctaagagaggtttgcgcaccctcatcctcctcatagtttgagagatatgaaaggaaaggaaccaacgaatcttccagcacaaggaggccacgccatctttgctcttcgtcaagataaaggaagaggcgcggacttggacgatggcaggagcaaagcatttgcgagaccttctacccctccatgtataatatttaaagtgtataaagtttttcgtttttttgtatttaggggttgttttttcttccgctatattcaatggaaaggtacaacctggtgttgttttcccctaaaaaaataatgaagataacattggtacggcgccagtaggtgatagttgaacatgtagctatacgcggagctcacgcgtccggcagcctcagtggcagaaatcattcatcatgggctgccaattcaagtctatgattacgatgcagccaatcaacatctaattaactagcttcctcaacaaattaagctgaaaaaaaaagagatagagatcgagctagcgacctgtacgatgcctacacgcacacgtacgtcgcagcctccaataatggtattattttttttcttcactgaataatgcactttattttattgtaggctgtgttcgcatgcaccttttcccatcccctctccttcgttttccgcgcgcacgcttttcaaactactaaacggtgtgtttttttgtaaaaagtttctatacgaaagttgcttaaaaaaatcaaattaatccatttttaaaaaaaaattagctaatacttaattaatcacgtgttaatggaccgctccgttttccgtgcgcaggagttaggttcccatctcccccatccgaactcagccgttaacgtccagcagccaggttcaactggatcgctccacgtttacattaatttctagcgtcttccatgaacttgtcttctcaaactgctagctaaccgcatgacaatttgtatgctactccctccctcttataatataagcactgtttaaccatttatcttatttaaaaaatttagaattattatttattttatttgtgagttaatttattattcaaagtactttaagaacaattttttattttttatatttgcacatttttttcaaataaaacgagtggccaaacaatataaataaaaagtcaaaatcccttatattatgggacgaagggagtagctgtgtgcatgcttgcgaggttaattacctcattcggtcatagatttacttaacaagacaagattcgatcgatcgaacgaactaaaatccatccataaatcttagtgtgttatcctaaacatttaatatttaatatttataattggagagtagttttctctcttaacagtattgttgatagccaaatttgtattatgatccaattatagcaaagtttagctgaattcaaaaacagacccgaacttcccgtatgagacaagtctaaccttaggtatatggcgggtctgaccaggccccaattggaccttaggtgtataatcttagagaggggggtggggtgggggtgggttgtgttttaatacaacgcaccacatctgtagtatagtatatatatatctctctagatatagccatatttcaagctttcagaagttcattgcaggtatgcaagtgatgtatcatctctgtttatatagaaatgtccatactacattcgtccttttttaagtataattatagcttttcgtgtctaacgtttgaccgtccgtcttatttaaaaaagttatgaaaaaaaataaaaaaaaagtcacacataaagtgttatttatattttatcatttaataacaacaaaaatactagtcataaattttttttcaaataagacggataattaaacgtttgacatatccggtgtaaaactatggtctttctggtatttatgacgtagatcaatcccagataagattgagggatttctgtcagagattaccaatcaacctgaggaacctgcaggtgtttgtttcttactgcatcaatcagcctgtactacgaacaagaacaaactcagcaatgatcgatcaattgtcccaagtggccatgtctcttgtccattgtcggattgtcccttccaatgcccaagcaagcgttactgtcgaagctagagccaagcagatgagctagcagaagaagctacatatgcaaatgctccatcattgtccctttgaccttgatcagttaattagctgcatactagtctgtccaaaaaaaaaagtaaactctagctacgaacctatgtatgtacggaggattatgcaagtgagagagagagaggatacatgctgctggttggccggtgaaggatgctttttgcatttgcttttgcatgagctcatacactactgagatgaacgtacctgtacttgatgtactctgcactcaaattaaagatagaacatggcctcaatgccttcaatcattctgcttgtttattgccttctttaattagcagtttgattggtccattttgtatgccttgattgctaccgttagtagttgcacatgcacctagcaatagatgccgatcaacgttcccatccatggtcagtaccatgttcttcaatttttccaagaaaagttttgtgtacgatgaagattttgttccattttttccaagtccaacttcaaggaattaaatttaaaaatacattatttatttatcttttcctcaaaaatatacgagatgtaatttctttggcacaaatttaccaccgtcgttgagtaggaatgtgaaaatggcacgttatatatcgctgaaccgttgcacgaaaataacgacaccggtggccacgccgcggtctcgcaggacggtgccacgagggcgcgggacccagcacggtgtcattgggcgagtgtctgagacaccaacaagcgagatgaaacaatgattagtgattaattaattactaatgatgctgattaaagaaataacaataattagtacggtctcgcttcaccaactactagcaaaatggtataatgattagtattaatcaaaagaaataacaataattagttaattgttaatgacgctaattaacctattaatcaccgagttagccagttaagagatgcgaagtcgtagtctcgcgcccgcgtcgcgggacattcgccgcgcgaattggcacggtaacgcacgcacgtactcgcacttttattctgcaacaatgatatacttatgtaaatccttctaaatgtgtatatttatgtaaaatcagtggaaaatgggtatattttttaaaaaaatttcccaattttaagtatcgatggagattaattttctctattttttttggcaggtctaatcttgcgtacgtacaatgaagatgtgatattagaacgctgatgtactagttgcaaaggcagaaatagtctcgagaaactcttatttagggcctgtttagatcccaccctacaactttacaccctatcacatcgaatgtttagacatatgtatggagtattaaatatagaaaaaaaaaaactaattacacagattccatgtaaattgcgagacgaattttttaagcctaattagtctatgatctgacaatgtggtactacattaaggccctctttgtttaggattaggcttattggcttagacttttaagtcagcttattggcttatatgatttataagccggtggatttaatgtcctaagtttagtggtggagtcatacatcaacctcacataagccaaaaaatcttctccaacctagtttttggcttaatagtgttagagtggcttatggcttcaaaaaagccaaacaaataagctgcttgtttgtttaggcttagacttttcggcttataagttggcttataagcctaaacaaatagggcctaaatatttactaatgacagattaattaagcttaataaattcgtctcacagtttacaggcggaatctataatttgttttgttattagtctacgtttaatacttcaaacgtgtgccagcatatccgatgtgacacgccaaaactttacacccctggatctaaacacccccttaatcaaaaacaacaagtgttgggacttcagttcttttctgagaagatacctggctcgaaggctcatcggttcgctcattggcaccggccgtatacacggttgtccctgcccgtttgagaaatcgccgtacggtggctgaggcgcttcacgacagagggtggattaggaacatcaccgccgctcttggcgtccaagctatcctggagtatttcaaactctaggacatcctcagatcagttcaactctcggatgagcctgactctctgacttggaggtgggagtcctcaagggagtattcttctcggtcagcataccgtgctttgttctcgggtagaatccgttttcaatacaagcctaattggaaatccttggcgcctcctcgttgtcgctacttactttggttggtcgctctcaacagatgctggacggcagaccgtctccagagccatggcttgtcgcaccctgtgcgttgcgttctttgtgatcaaagtgacgagactatcgatcaccttttggttgcatgtccagagtcttggcagctgtggtggattgctctcagagcaattgggctttcgaaatgcttgccgatcaatgaccttcctttcatcattggctctgtgatagcaaaaagaagatgaccaaggcgcatcgtcggggatttgacaccatcgcaaccctggtagcatggacgatctggaaagagagaaacaatagagttttcaatcaggtcagcataacttgggtggagatcgctcgggccatgatagacgaagctgatctttggaggctggctagggctgccatacacaccttagtagtccatgtagatagagagaggtcgcttggagattaggctctaatgctcttgcacctctcctgtatcctccccgtcttgtttttcttttgttatgtccacttgtacataaactttatttcttcttaatataaagatgcgctccttgcgaattcccaaaaaaaacaacaagaagcaagtcatctttctttttttttttttttgacgctgagcaggtaatcattagaacagttagaacttttaaaaagacaaataatgctgctgaaaatattccacgaagaataatctcatccggccaggttccaagcagccagaacttacttatgcagaagctagtcatccatgggtagtatcagtgtttacacttctgagaatccgtatagtaattcttctcagagtgtgggtgtttctcgagctatgcatctgataaggaagcattgcatctatcaccaggaaaaccaaataattgagctacagattagttataccggtcttactgtccaataattgatttttttaatggaatcatagtctcacagataccaccaaagccaatactcctccattgcctgcatataaataacacaaaagcagaccggtcttggcaaaggacactcactttgctttctcatactcgttggctcgttgctcctttgcatcaaatgacgagcatttaccatgatttcattcataacaagctgcagagcttcggaaggatcggtagatattttgttaattttgttgttctagcccatagattcattgccttgcatattcacccattctggattcagttgtcctacttccttctcattagcatcctaggttcagttctattgatgttcctgaagccaaccaacccagaattcagaccaggttacattgacatgctgttcttgtcaacctctgctctgacactttccagcctcatcaccatcgaaatggaggttctctcaagctcacaaattgtggttattacactgctgatgcttctcgggggtgaagtctttgtttctttcctaggcctcatgcttagactgaaccataagcacaacccagagttttcaggggacaaggtcagttcagttcctatcgagcttgatacaatcaactcggcaagcactgtgataagttgtgaagagctgcagctggaagcagcaattcctgaagttccatcttccaccattaaggatttgaagaggagcaagcgcctgaggtggttcttaggatttgtagtcttcagctattttgttgtgatccatgtcgctggctttctgctggttctctggtacataagtcgtgtctcatctgcaaaagctccactgaagaagaaagggatcaacattgcactcttctcattctcggtcacagtctcctcgtttgcgaatgtggggctcgtgccgacgaatgagaacatggcaatcttctccaagaacccgggcctcctcctcctgttcatcggccagattcttgcaggcaatacactttaccctctcttcctaaggctattgatatggttcctggggaaggtgaccaagttgagagaactgaagctcatgatcaagaaccctgaggagctacagtatgattatttgcttcctaagttgccaacggcgtttctggcatcaactgtcattggccttatggcttccttggtcacattgttcggtgctgtcgactggaattcttcagtctttgatggactcagctcttaccagaagattatcaatgcattgttcatggcagtgaacgcaaggcactcgggggagaactccatcgactgctcactcatcgcccctgctgttctagtactgttcatcatcttaatgttagttcatgacacctcatctatttatgtttcatgtcatccaactaatactgttagcttcagccttcaggtgatgacatatttgtctgaaactttactttcttggttttcaggtacttaccaccatcgacaacatttgcactgtccaatggagatgaaaaaactgcaaataagaaagcgaaaagaaaattaggtttagtggtgcagaacttggcattttcacagcttgcctgcatctcagtctttgtgatagttgcattcatcactgagaggagtcgtctcagaaatgatccactcaacttctctgctctgaacatgatatttgaaatcatcaggtgtgttcctctctcttgattatgcaatcaaaattctcgtatcaatctgctaagttacactgggcatcaagccaatgatattgtaggcaaaataaaaacaacgaaacacgataaaataataaacttcattagcaaagcaagccaagtagtaagatccacatctgacacctcagaatctttcagaagacaagaaaactaacccaaacatagattgttctcaacaagataactattttgtactattctgtctttctaaaagagtatgcctgttctttcttttttttttttgcagtgcatatgggaatgtagggctatccactggttacagctgttcgaggttgcagaaactgcacccggggagcatctgccaggacaagccgtacagcttgtccggatggtggagtgatgaaggaaagttgctgctagtctttgtgatgctctatggaaggctcaaggccttcacaaaaggtacaggtgaatattggaggctatggtaaaagctgaagcctgaacaaaagcacttgcaaaggcaagtgcatcaagtgcagtatatgtaactatttagagttctgcctgaaagttcaggtttctaattgggccatagtgtataaaaatacacccaatattattcctcttaatacagtggtgcgcaatcctttagcgtattcccgaaaaaaagaacacccaatatgttgcaattgcaatatagaactgttgttctccaaccaaggccgagtttagttctaaaatttttcttcaaacttcaaatttttttatcgcattaaaacttttctatacatacagactttcaacttttccgtcacatcgttccaatttcaaccaaacttctaattttgacgtgaactaaacacaccccaagtctttttttttgtacttgtattaagccagtcgccatcaaattatcaatgcaactaacacatggagtcatcagtccacgtgatgtatgtacctagtaggtgctaattcccagtgagtggtcttaataaaccttctccggtgtcttttacaaaatttgctgaattcaaggacatcttaaaacaattagtaacgatcacgagtttacctccagtttcagtccagaaatgcttgtccactcgaacaatcgtactttgtctggatgagtccggttgtaacagcatgcttgcatttatggtgtaccatggtcagcaaggaactgaatagagcagtggctgatagaggattgatttctgtccagtgatttctgtgcatgtcctttgaagcatggcatcagaatgcttcctagccatgaattttgtaacagctaaacatgctccagtgctatcgattggtagtagctgcaatctctttctggatcatcagtgcaggacatactcaaggcaaccaaatctatctattaacttattaacttattaaaggaaaagaaaaaggagcctacacgttcactctcacggcctagaaattctcatattactcggagaaaaagaagaacagagtccatatagaaatataatttaaaaatagttgaaattcggaattaaaaaataaagaatattggaagaggagactagagtccataaagaaatacaatttataaataactgaaattcgaaattagaaaataaagaatattagaagaagagtataaagtccatataaaaatacaattaagaaataatagaaattcggaattaaaaataaggaatattagaagtagagtatagagtacatatagaaatacaattaagaaataatagaaattcggaattaaaaataaggaatgttagaagtatagtatagagtccatataggaatttaaaactaactaaaattcagaataaacgtaataaaattaaaagtagagtttagagttcatataaaaatacaatttacaaataactaaaatttgaaattaaaaaaaaacatgagaagaatagtctaaagtcgatataggaatacaatttatacgaatctgaaattcgaaattaaaaattaaagaatattaaaaaatgagtttagagtccacatagaaatgcaattagaaataataaaaattcaaaattaaaaaaaatattggaagaagtgactagagtctatataaaaatacaatttacagataacaaaaattagaaatttaaaaaaaaataaatattgaaagacgagtctagagtccatataggaatataatttacaaataactaaaatttgatattaaaaataattaatagctaacacatatataaaatacaatatgaatactacacattagtagtttcgtaaagttaattcaaaatttaaaattatgttgtcattttaatatatttgaataatacattgagaaaacatatatgttattatatgagagaaaatataatgatgttagccgcgtaatctgcgcgggccgtcatgctagttcaaataacttgcacgaaagagatgagttgaatatacttacctaaatgatactaagtggtggtaccgtaataattctattaaccttcttgttcaaatacaaaatttcagagatgctttggcatccataaaaaaatcaccatatcattccagatgtactgtaatcattttcgggttttccataaaaattcagagatgatatcaaacagaggcactgtaataactctattaaccttcggatgtcggcaatgttataccaattgccaagaatttcagtcaattggttgaggagcatgcctgcctgctctttcaataacatgtcatcttgctcaaacagttgctattctcacccattacacttgcttatccacagtcatagttgccttaccagtatggcaaatagaggaacaaaaattcagcacgcatgcaagcagtagagcacttctttctatgctttttgcaagcattcgtgtatctacctgcatgctccgcaacttaacatcatgttctgaaaggcatctcaactatgttacacatgtcttcctcctctccactaatattaaccaatagacagatacactattacagtgccttgtatatatatactctcactgagattggttgtcacctttatatttcaatacagcagttgtagttccatcttgaatcaagacaaacacaataaggagctagaggctctgccctctatctccaatgcctattcggctgcatatctttgtcagttctgcaaggcatgccatcaactcgtcggcattgatttgtcggttcatcgcattccatcttagcccgcttttgattcacctgtcctattttcttatcattgatgtacttggttttgttgccttggtggtgctcaggccaagcaaccacaagtacaatcctcgctatatcgatatgtttttcctatcgacatctgcagttacagtcacaggattagccaccacacaaatggaggatctttctagctctcagatagctgtcctgactctcttgatgttcttaggaagtgagatgttcctttcctttcttggccttgtccttgagtcgagcaagcaaaacaagcatgatcctgaaaaccgtagagtaagttcagttaccgtgtgtgagcagtcacatctagaagaggcaattccacaaactccatccatgaactccactgatatcaagaggagctgccacaaatacttagtgtttgtggtgttggcatacatgattattattcttgtcactggttctctattggtgttcatgtacatagctcatgtttcaagtgctagagatgtgctaacaaggaaaagcatcaacaaagctctttctcgatatcggtcacagtctcctcatttacaaatggagggttattgccgacaaatgagagtatggctgtattctcctcaaacaatggcctcctgttgctactcatcggccagattcttgcaggcagcacactgctccctatgtttctgaggttggtgatatgggcattgagaggactaagattagcaaaagctgaagagccagacttcatgatgaacaacagcagctcagtaggtttcagtcacctgctacctaacttgcagacaatatttcttgcagctgtggaggttgcttttgtaggcatgacagtcatcctcttctgctgcttgaactgggattctgcagtgtttgcagggctaacctccctccagaagataaccaatgcattgttcatggcagtgagtgcaaggcaggcaggagaaaattccattgattgttcccttgttgcgccagcggctttagtactattcatggtcatgatgtgagttcctctctttcaagctcttcacatttttcaggcaacaatcagaagagataacataacacggttgcttacatttctcaggtacactccatccttgacaaagttgttctcagcatgtcaagatcacaaacaaatcggcccggaaagcgacgatagaacaagcaaggggaaaccattcctgaagacgatggcattttcaccactagccttcaacaccacagtgataatgctggtctgcatcactgaaaggagatcgatctccactgaccctctcaatttctccacatttaacatcatctttgaggtgataaggtaattaagttgcacatctactcaccaaattcttcttctgatactgttcttgctccctccatgattaattcagctaatttattcatcacccattgcttctgcacacagtgcctacgggaacattgggttgtccactggctacagctgctcgagacagctacagcaccaggatgggattgcttgccatgagaagccatacagcttctcggggtggtggagtgaaccagggaagctgattcttgttcttgcgatgctctacgggaggctcaactcaaaggattccacaagcgcacgaactaggtgatgatgttatgcaagaatcaagaatgcagtgtaccatcccatcaaaaaaaaagaaaagaaaaatggatgcactcaactatgatctgcctctatgttcaaatttcaatgattggcgacagcgcacttaccggaggcggcggagggtgatgcccttcgcgggagtgcctcgctgcgacaaacagacggcgccgttgcgattcctgcaatttttcacaaatgtagacagtcaaaaaaggccctccttttcttaaaaattaatggattattaaaaaagaacacatttatcccccctttaacctttattattatatcaattagtaaattacactaatttaattgtcaatcatagccaggatcatgttgcatgcaagtatctagacgatgaacaggggaacatgttctcaaatgaattgatagatgagagaacaggtaaatgaacaatgtatctaccaatgcttctgaagttctgaaacttgctacgaatgcattcatggtaaatgctagtagtcattttctgcaaagaggtccgagtatcacaaaccaagttgagcttcttgccaagatcccagaaatctcataaaccattcccctcgaggaactagtactgaatataaggagtatactataaaaaaaatgaatcataatcagctataatatcactatttacagcaagaaataaaataataaagaaatagaacctaacaaactctgataagatcattgtggtatcctaaaaatagcaaccagttcctaaaaaacaacaaccaaagtatccacggactgcaagcaaaagggaagaagctaactttgtgaaagcaaacccccactgtaccaaaatatatgaacaccacaactcatgcaaaactacaagcatggaaagcatcaaagggcatcgatacacatcctgaaactcattttaagccatatcactgcagtatattataaataaccatccagtccacataaaactataataaaaaaagataccttcattaaaataagacatcggaatacacatcacctatactctcaatatcactctagcttgcattcacccataaagcagttctagttcatgcctctcaatgtcactctagcttgtattcacccttaaaatgtcactccagcttatattcgcccttgaagcagttcggttcatgcattgggcgaacttagcatctcgggtaggatcgaaatagatataatcgtccccacacatgcctactctattgcctgcccacttcccaccactaatgattcttgcattggtcagctcatgcgtgccatgcgccatttctgtgaagtccatgtcgccaccacaataattttcaattggatgcgcaggatgcataatcctggtcccttcatattcataataacaacaacgagcttctccaaaaaagacataccaaaaaaaggttagcatcaaaatacaagaaagaatcattctataaattatatttaagaaaaggacacaatcatatatcaaacataccatgttttgattttcttgagacagtacagcaaaaggatacatcatcatcatcattactgaattcagcaaagaataacttaagtccacttccaacttttgggcttgccaaaaagtttacatgtgaatatggacacttgaagtccaagaagttcatctggctgcccacacgctcatttgcaacacagattacttgaagatcatatagatatccctacaaccatgaaagaagtgaacttgtagaaaaatggcaattataatgacattatgaaaaggaaaattacacactaaacagatactcttgttatcctaatcaatagggaagaagtgaacttgcaaaagaaaaactacaatgacattatgaaatgggtaattccacactgaacaaatcctttcatcgttatcctaatcaaatcattagggaataagtgaacttgcagaaaagtgcaaccataatgacatcatgaaatggataattccacgctaaatagatactaaactaggaaagaagtgaacttgcataaaattgcaattataaatttataatgacattatgaaatgataattccgcgataaacagatcctttcattatctcaatcatcaggtaagaattgaatttgcagagaagagcaattataatgacaatatgaaatagataattctacactaaatatatattttcatttccaaatcaatagtctaactagagagcaatactttgaaagtagcacataatatggaatggaaggtgctaacctttttccttagtgcagcttcaatctttctacgaaaaaaaccctattgagtgacacatttttccttgaacgctataaacatatccaatgcatctgtagacagatcaacaattgtctccaaagatttagcagagatgcaatttgaagatggcaacaacgtagctagctgaagaacatcattcgaggaaagtggggtagaagcacacaatagtgatttaacggcagcctgcaccttaggtagagattgagtggaaaactgtacataagcttcgagctcaggatgaaacaatgcatccgctgcagccttgtaggcactgacatcccagctggattcccacccttacactcctgccatttcaactgctttgcaaactttcagattattctttagcagatatatcatggcatcatgctcaaaaatctcaggaatgcatgtaagcaattgcttgataaggccacgaagggaccgggactccacacgaacaaaggtggaggtgcagatcatgtccacctcaagtttctccacagcagggaaagcagagtcataccagagggtattgatgatgatgttggtcacacaactgaatgggccatagcagtaaccaccattgacaaaggcaaggtggtaatgagcccgaacatcttgcattggtaatcgagagattgccttgatgtacttggcatgaatcttgtcaagtaaaacagcccggagtgatattgtcaaaccacctggcaccttctcaccattagcatcaccagtatgacagttacgaagccgccgttcatcagcgaaaaatcattggattgtcagacttcaagcgtgagcggcttcttcttcttcagaattccagaaagcaacaagatcttctcaagccgcgatctgctattatcacggcctgggtgacgaattcaagatgagacgccagcgaaaacgaagcggcgatgaagccgtcgacgttcggttgcctcgcggatgaggctgcgcatgtaagggcagccctggcagcgtaggaggagatttggaatcgttcgtccttggtgttgtagcagccgcgattgagctcgatgaggcggacggcgacgaggaggtcggtgttcgcgaggcgcaggtagcggagcgcgtcccaggtggggaggtagcggaagtaggatgtgaggaaggtgacgagcccctccagcgatcgctcggcgatggctcgtgtctccgacgacgacctcgctgctgctgccgatggcgccgccttcgtcttgcgcttgcgcttcttggcactgtgatcgggagggagggaggagagggtgttggcgatgatattggtggtagggtcggcgaagccgaagcagacgccggcggcgacgagaagcggggcgagctccgtcggccggcgatttggttggaagacttgggaattcgagggggtttgggacggggaattaaaaggtcgaattccaaccaatctcttatctggggaagacctgttaattcgtgagacttggagggaattcaatgtgaaaccaaataagggatgatgactaaaaatataactcccacgaccaatctcaccatcaactccctccttaaaactcccattcctctttccttctcttcccaaacatgccgttaaggtttggcgtcgacaggggatttgatttgatctgatttgatctttttttttcctcccctttctccctcgctcctccggcggtccggccttcgacacttcgacagacaactcaggggggaagacagagagtgagtgggcctaaactgggccagattcaatgaataggagttccgtgtgtggcgtgaggaataagttcattttaggtcccttaacttgtcaacgaatccgattttcgtccttccaccgaaaaacaacatgtctctcaactgtcaaaaccggtgaagcccaaggcgttttggacggcggtttgcgctgacgtgatgcctacatggctaatttgactcggcctaaaaattgtgggcctacatgtcagtaacaccaaaaacaataacttaaaaaaggtgggggcccacatgtcaatctcactctcttcttcttcctcctcactcccccatctcccctatcttcatctctcccctctcctctctcgggcgtgacgaccgatgggcggcgggaagaagagcggtgcccggcggggagaagggacaacgtgcggtgatggccgccggaggaggaggagatgcggggaggcgtaacggtggcagccagaggaggaggccgtccgccacgcgctgctcccttctttcccgtctcctccaacgccaccatgccacgagctccccctcctccagctcaacgactgccaccaacacgaagaggtatatgacgataccaaggatgagaagcggtggcatggggagcagtgccgcggctgcggcggcgacggcgtcgattggaagaaagagaaggggaagcccctcgctctggccggccgcagaggacaccgccgacgccatggagatgctgcggtccaaccggatgctcgacaccgccgccatcgtcagcccgtgcgccgccttggtgcatagtgggatctgtgcagcagcgccaactacccggaggccgacttccactgcgccttccgcatgtcccgccccacctttgacttcctctgtgccgaactcgctgccactgccgcacgtcgccccttctttgctactactacacaagtagcagtagcaaagaacactcttgtactacttccttttcaacggactgtccttggttaaacatgacatcttgacctatctcagcaagtacatataattattgtagcaaaaaagaatctataccagaataccccaagcatgaaaagcatctttatcactccagcttgcattcacccataaagcacttctgattcatccctcgcaatgtcactccatttcgtattcacccttgaagcagtttgatcggttcatagctaggattgggtttttttcttttgggacggagaggtacacattgtttccgagaaactacaattcatcacaaaacttgaatttcttgatcaaagaagatgcttcaatgcactatagaggtaaaaatcctaatttatctttcttatgagttagcagtgtacatgatatctatcacacccgtgatgcttaattgtcacacatgaaaaaggtgttagttgtgttgttattgctagaatgaggttaaaggtgagttttgttgatctgtcatggggaaaatcaaggaattgagcagttggtgggattgctcacagagtaacataacgaggctccaaataccagtaatataattgttcctcatgctgaatcaataaaaaaattgagttgatgcaaaatgatattaaattgaaggatgtcaaaaaatatttgagttgatcagagagaacattattgattttgaagactttttttcctttagtgcagcttcaatctttctacgatgtattggactggctgcaagcagaggaacgaaaataaagattagaggtggttttggtatgtttaggctgggccaaaatttggaagagtttttacatgggcttttcatgggccagagcctaagctggcccagaacaccactacataagctcgggaaacccagctagggtttcgatctccgcctctccgacctcccgaatcctcccaactccgccgccgccgccgcgaagcgcaagccgacatgggcgtgtacaccttcgtgtgccggagctccggcgacgagtggacggccaagcagctcaagggcgagctggaggcctccgccgccaccccctacgagctgcagcgccgcctcgtcgccgccgcgtccgccgccgactcggccgccggagtccagtcctccttctccatggtctcgcccagctccgccgtcttccaggtctgcctgctccccctcccttcccatcgcgccctgctctctgttccccccccccccaatcatctcttcgcgttcctgcttccgatctaactgtatgcttgcgcttgtctagttcttggcttcttgctcgttatatatgctatagaagaaatatctcttgcgattcatgtgctagctggatctgaatagcacatttgttccagatatgcgatattttgcattgattggtaggtaggttgatgtttcatgttcaatatatgtttggtgatattctgtccttgttatgtagccgttcaaatgcatctcgttgcagtttgcagtcaacagagtgatgatacacatatttttttagtctttgttgctttgtagtgtaattacaatgctagtttaatccagaggttcaccttctgatcatgtggtcaacattgccatcagcatcatttgttcgtgtgtatttttatttgggcaagattgtgccttatagctgcgtctagctgttttgctgtttatacaggtggatatggttcttggttagatcccagaaaatatctgtgggctttgacacaaagctcaccttagtaagagagaaaattgtttgactaatatgaataagctgaagcgactaaattgtctagccagataattgaaattggcatctgtagatttctgtataattcttagcatgactgtatgtggctctgtgatcttatatcagattcttatcagttcttttgctgtttatcggtaatttttgtcacaaagtaaccaatgtatatgtgaagtcaattctagcttgttggtagcatagcatgccattatctgtgtattgttgatgactagtgtatcaaccaaagctatactcggcattcataagtcataccattttatgtagtgctgaccacaattctcatacaggtgatcattggtgccgttggtggtggtgccgcgattggtggaggtgctgctgctggtgccgcctccggtggagctgctgccgaggcccccaaggccgaggagaagaaggaagaagagaaggaggaaagcgaggacgacctcggattctccctcttcgattagatatcacttcgcttgtatcccacaaatttgtcatggagttcttgcagtagttttgttgttctatgcatatgaaccagaggcttgtgaacctgtgaaatcttcttaagagaaattgtgttctggaatgctggctgtatctgcgttacttccgttcgacttcatatttctgttatgttgtattttgcatcaacagaaagttataatcagttacatgcaa

SEQ ID NO: 13829 - DNA, 2910 bp, Oryza sativa
actattgcccttgctcttataggtgagtcccaccttcatagcccatatgtcagtggcaacgctgtcgttctctctggagagggagacggcgacggcagtgatggcacagccgccaagacgataggaggtgcggtcgccaaaaaagcgcaaacccagattctcacccttttataaccattcccccccaccaaaccaaccaccgccccaaaaaatacccgccgccttttctcccctccccgccctgatccaccgcacggccgcgcgcgcgccacgccggtgtggagaacgatggccgccctccgcctccccaccccgccgccgccccgcgcccccgcgccgtggctccattcttcccaccgccgtcgggttgcggcgccgcggggcgcgggcgggggcgggggcgggggcggggcggtcccgccgccgccggtgaggacgctcctgatcgacaactacgacagctacacctacaacatcttccaggagctctccgtcgtcaacggcggtgagcctccgcctcgccttccctctcgtgaaaccatggcttgtgattgtcactgcttttgctcaacgtttccatggccggtgttttttttcccagtgccgccggtggtggtgcgcaacgacgagtggacgtggagggacgtgtacaggtgggtgtacaaggagagggccttcgacaacatcgtcatctcgcctggcccgggatctccggcctgccctagcgacataggtgagcatctccacttcagttcaatcgtgtggaatcagaattagaaattgctgcttgtgcttgttcaccatttctacgtttgtatctatgcaggtataggcctgcggatactttgcgagtgtggagatatacccatcctgggtgtctgccttggccaccaggtcgattccttttttgtgttaatccttgtgaactcatgatcagtcctgtaaaatggaaaattcatggacaatttggtggtaggttgaactgaaatggccgttttgttttaccactgcaggccctgggatttgtccatggtgctaaaatcgtccatgctcctgaagctatacatggccggcttaggtaaggccttgaactctattacatgcttaatactttcagctttctgacctgtacagcatttattttttatcttgtgcaattgctatggattagtgtgtgtcatgcataatcttctaagttctaggtgttctttcagttaagtagttaacacatgtcttgattttgataccccttttttttatgtcagtgaacttgaacacaatggatgctacctctttaatcacatcccatcaggtataaactctggattcaaggttagtgtaccactcatgttgctagccatattattggggtttcagcctctatatgcaccgcaaagaacactctacttacagttgttatttttcaggtagtgcgctatcactcacttgtaatagaaccagactctctatctgaggatcttatatcaatagcatggactgcttctccaaaaatgctctcattccttgaaagcgataagcctgatataactagcagtaccttgtggggatcattggataacttattcgtaacaaaccagtcagagtgcagtaccactgatggaaaaatgcccagcataaacgatgcaagtgagttagatggctacagggttctcatgggcgttaggcactctaccaggcctcactatggagtgcaggtatactgtctatatctctgcaatgttttttatttctttttttcactattcttatatttgattaccgtcaaattcagtttcaccccgagagtgttgctactcattatggaagacagatatttcaaaacttcaagaagataacaactgactttggattacagacaccattgcttcaggaaagaaaggttcacagtattggtaaactggaaagatcccaagtactaaattttttgaagactacaagtactatatgtgaacaagtattttccacgcatctcctttagactccaccttattgactttcttattgtactgcagatcagttctccagatctcaagaactttgttgcaaatgacttgttacattctgcaaggttgaaactttgggattctgttgggccttgtgctcttccaaagcgaagcagtggggacaaatgcttacggttgcaatggaaaaagattgataacttcctcaatcgcataggtggctctgaaaacattttttcagtgctttttggccatcatagcgctgaagatacattttggctggatagctcatcagttgaccaggtgctaattcagctagctcttaatatcgtttagttctgtcctgtatagattttatctgatgttaaacgaagattgaagggttttgagtctattaacaaaaatgactagatgatcatggacatgtggaacttcactgcatgaagaaacaaaaaaagtattcccctgattcaatatacttaatttcttcattctgacattctggcagatatagtctgcagaaattaaatgagataaagttattgataatgatagttttttatgtacatgaattgagttggttcaaaccagtgcctatttgacagagagtagtagatgtgtcaaaacttatcactgttatcctgtcattttctccccctcatgaaggcaatgcatccacttttatgagttgagaggttttttcttcaaagttgtgatgtggtgctacttgcagaatagggcacgattttcattcatgggcggcaagggcgggcccctttggaagcaaatgacatttcaccttgccagtcaacggtaggaaggcactttcctgaaacagaagaaaaacattctctatgtatttatataaaccttcatgttatttctgattcctcctatttcgttctagagccaattgtggaggaaacct

SEQ ID NO: 13830 - DNA, 3111 bp, Oryza sativa
aagacggattcgacgccgactctttcctcgccgtcgatgacggcgtggccgagggcatcgatagaatcatgggcaaactcagcatggagaagaactccgcagccgcgtcccgcgccgacgccgtcctgtccagcgccgccatacatccatacattagaagcctcatggtgctcggtctcgggttccggcaaggccggctcaacgccggccaagcactgaagcggcatgacgatgagagtgattggtggatgtgccctgccataccagtgaaggaaatcgcggcgcctcctgcgccatcggtggctatgccggtgccagtgccgatgccattgcaggcttcagataagaagaagaagaagagtaagaagaagtcactgaaggaaatagaaagggataatgccattgctgttggtgaatgtaagtttggtgatgagggaactctgggctttgatcatggtgatgctggaatttcggcgctgaaggacccaaagataggattgggcctgaatctgaacactgaagaggtgctgaaggcttggtgtaacagtggttctgttttcgctggctgcgatgcacttgaatcaccaagatcctcctctgatttgcatgtaagtatttctagctcatttgacttaaatctcttttaagatgataagaagaaattttgaagtgttgtatacttgtattataccttagttcagaattatgtttcatactgcttggcatataaaaactttaggcttttgtgtggcatatgttgtacaagtgcttgaaaaaccatttatgatttggttagtattactctcttcttctgggactattattttcttttgaatcaagccagcagttctattatgttatcctcatgtgtaccataattttgtgtcaatacacttctttaggagaaggggaccatacgtagattttgttcgttcaaatttctgctatataaatgtaaaaggaaaacatattatccacaattccaatcatcctatttttatgtgaaaatataaacttatccttgataattgtaatgatgtggaaattctcaagatggtatatgaaaagcacaacatgaaacttgataatggtctcatttatagagggaattttcaaagcctataagaagaactataagaagaacagaaaacttcagcacgataagtgttatatggctcctttgtttgtctatgtctgaagtaaatccttcttcaactaatgggttattacaattagtactaaccactctgaaaatatttagaacaaggagatgccagaacagaaaatcaagttttttttattctatcatgggggagtgattatgtgaaatcaacttttggtctgactgctaattactattacctccgtttcaggttataagactttctagtattgcccatattcatatagatgtttaatgaatctaagcatgcatatacgtctagattcattaacatatatatgaatgtgcgcaatgctagaaagtcttataatatgaaacggaggaagtaccaattttgatgaacatgcactgtcacgttaaagaaaactgctgtttcaccctttacaaaaaaaaaaaaaaaaaatctgctgttactgacaaactttaacattcttcatcgcaggctaaacttgcagacattgatctatttttagataataatacaagcggtgttatccgggaaggaagcatgctgaaattgcggcacaagcagaagcagtgcactcccctcctctccaataagacccggtatcaatcgcggaaggtgaatgctgaatgtcggcctcgggtcaaggcaagttctaagaactcattcctatgcaaacaacttatgcaaaggcaaaattgataactgttccaaatcaatttccacaagttttattccccatctctctaaagtttcttatgtatttgtctatgtttttggttctttgcaggggaagtatgttagccaggcttctcttcttcaacaagcctcagagaaagagaggtagaaaatgataaaagtcctcccatggacatttttggggcctcactctccccctcctaaagagaagcaaatgtgcttctctctttttcatttctgcactttaatcatgtaaagggtagagatgcctgtagagtggcatgttgctatggggatcagataatctttgtccagttctccagctataaaaatgatgaggttatcacccccagttaatggagtagtagtattttctgttctgttctttcatcttaatcctctgaaaggcaaaagaagagaaaaaaaccaaacagggagaaatgattatgagatgaaatttgttagccatcatgtccatatgacgcctgcaaagccgtcagagaatagaagctgctaaaacacctctgatgctctaaaattgtcaaatggagtaaagtttatccactgcgcctgaatctggaaggtttcctgtctacgttcagagattcccctaatcaagatttccttatgtcttactccaatcgaaatggcttgtccaagttgcaggctttcagcttggaagggaccaaaatgctgtagggttggtgaagattgggtatttgggttggtggagattgaaatcctgtgctttggccatttctatggtctcataaatatttgatgcttattagatttgttttgagaagtacaattatagtatcatagtaataaacttagatagttagagttctacaaaatacagttctgaatgtcaaatactcaaatatttacaaccagatcgagtacaaaaaatagtttgattgaatggaaaatgaattaaaaattcatactgaaaaaaaaatgatgacctaagatccccttttgttctaattaagatatagattttaccttgattttcattagcacacatttcaatattgtatttcatacatatagaagttactaaccccatcctgaaataaattcatttgtcagccatctcacaatatcacacatgccaataaacacaaaatgaattagaatacctcagttatatcatatcccaatacaactatttttatattttatatactcccaatataattattctatatttttataaactccaatacagtaattacaataaaaataaacttgttttaaa

SEQ ID NO: 13831 - DNA, 966 bp, Oryza sativa
agtggatcccccctcgtttttgttcttgggcagaaagcctgacgaaactgaatcctccaacaaaagcaaatggcgaagcgtgggctttgttgttaattatactttttgagtttgcccattcctcgaggttggtagtggtgaactggttggtgttggtgttgttgttgatgcttctttgatgagcgcactgttgcttgcagggctccttaattaatcgctttttcccaagatttcgtttttaatttatatttatatactcttctttttttctccggcttctaggtagaagcagggggagacagagcggccagtgtctttctctacaagaaattcctcggtttccacgcgcgctttggcatttcttttcttttgtttttcttttttttacctttcctttcatctcttccgctggttttgtgggatatttgtggggggttttgggggtttagaatctctttgatttcttgtgctttttcttgctttttctcgtgatgttggagtggtgtgttttctgatttgatccgcccaagtagcgattttcttttttcttttcttgttgtttgtttggaggggggaaaaggttgcgatcttggtggcgcgccgatggcgtcgtcgtgcatccccaccggcctccggctggacctggagatggtaaaggcggcggcgccgcccggtggctcgtcggcggcggcgcactcgtcggcgtcgtcgacgctgtcggaggcgtcgaactcgtcgtcgtcgtcggtggcgtcgctgtcgctgaagcgggcgcgcacgccgcggaagcggcccaaccagacgtacaacgaggcggcggcgctgctcgcgtccatgtacccctccgtgttccccgtcatcaagggcgccgggacggcgccgccgcggctgctcggcctcgccaccgcgctcgccgacgacccctcctcctccgatctcctcccgccgttccccgtcctcgggaac

SEQ ID NO: 13832 - DNA, 822 bp, Oryza sativa
gctcacggacaccaccaggcatacaggtcgataatcgatcgatcggccggcggagaaagcagggcaaaaaaactggttacaaatttacaactgggatcctcaaccgaaaaaactctggagacagcagggccgataaaaatctcctaaccattggatcctaaattttcaagattcagcaaccacacaataaaccgtatgacaacagaattacacaaaaactggagaggtttaaggagtggagtagaatcgagagggtttagagtccatcagagaaagaagaggcagccaatgtctctgaagacattaacaccattagtgccataggaagggacaaacttctctttcagttgtcactatcacacaccttacctccctgtggaccccacctcctctcacgacatttctcctcttcttcttccctctaccattctagactgactgtgtttagttcaacgcaaaatttaaaatttgattaaatttagagtcgatgtaactaaaaagttgtgtgtatgaaatgtttgatgtgatagaaagttaaaagtttagaaaaaatttagaactaaacacacccacagccctattctaccctcacacctcatgcgtagtgtagttagcatcacccctacatacatgtgttcttctggtccaaagctatgagatacacgtgtgagactttgcacactgcgtctgcgagtctggctggctctcacggtcacacgtagtacgtgtgactgacctagtacaccatcccacggccaatgcggctctcacttgctttgcccgtactgctgctaacaggggaggatggaaaggcacgtactc

SEQ ID NO: 13833 - DNA, 1755 bp, Oryza sativa
catatgtttaaaaatagaagtttcacttacctccattagaagatccacagcttcaggttcagcattatgctgcaatataaataataatcaatatcatcagtccatccattgatactagttgtttattggctactacctccatcccgcaatagttgtcgctttgacttttttctttcaatgtttgcccattcgttttatttgaaaaatttgtgtaaatatgaaaaaggataagtaatacttaaagtacttttgataataaagaaagtcacaaataaaataaatgataattttaaaaaattttgaataagacgaatgatcaaattttacaaacaaaaactcaaagcgacaagtaatatgggacggaggtagtaatatttaatgcattacacagagtgtaacaagacatctgtgatgaaataagaaaaacaaatgacacccatggactagactcagaattgaccttcatgtggaatgaaacgatttgctccaccagttccttcagggaatcagttggcatgccatcatcctgcaaagtggaaaaaaaaagttaggattataaaaatgaggtccacacacctaaactttgtgttgtcttagtccatgcacgtgtgataacataattgacagaagaaatcatgtgtgtggcttctaacagaacaaaaaaaaaattatatagcaatcatgctatctcaattcttgccaaataacaatcagtacggtatagatgtgggatacaaaagtcaaaagggtctcagggaagatcacttaaaacacttgttattgaaatcaacagcagctagacaagacaatggatgctaaactaaagaatatagtgatttggataatataaataagggtaatcttatcttgtgactttatgacctattgttaatggaattagagttttgttagggattaaaacaaaatttcaaatacttctttcattggggtgaagaaatacattatgcaattcatatgatgatatggattagggtccaacctggcgcttctggaattcctgtgcaatttcaccagccaagtttctagcaagcgagacattgacattgttagaaaatccaattcaaattcaaaagacaaacatatgtattccaacagaagacctgaaaagaataactttttatcaataatttcttgagtacaattcaatatttttttaatacactgagaacagttaaatatttgaccacaccataaattctaaataagctgatatgaaggtaattgtttggtaattcatcataaactacctcaggaataaatctttacaattaagattcacaagcagcaactgtctcattaataaaattgcaagctaaacaatttaggaggcctggaaattggtgtcacctcacatattcatgaccccatgaaccaatgtcaccttcagagcctatcattcggtagttgaggctctcctgaaacgataaaagaaggcatattagccaattcttgaaggattgatactgtacagttaatggtgagaaaaagttgaactctatctgtctatcatttaaaacccacgaaaaaatgtatgactatttatagaagtaaatcattctcagaagttagcatgcaagcaaattaaaaaagcactgggaaattgacacaaggaaaagacatcagaatggtatttttcacatactctttctccttcagcggacattgtcagggccaatactgacaaaatatcagccatatacttctgcagaataattgaagaatatcatataagca

SEQ ID NO: 13834 - DNA, 743 bp, Oryza sativa
tagggattgccacctgggcccaggcaagcacatcaaccatgtccttgaaagatggcaagtggagaataccaggctcaagtccagcttcaaagatgagcttgcctattgactttcttgcctgagaattcaagtaatcattagttggctcctttgaggattccgaatcttgcatctgtgatgaagaattctccatagagaaactcaatggatcaattctctgccctgaagatatttccggtggcttattcatcatacacggattttgatatggaggcctagttacttctatagtctggcctcccttctgagatgaacttgcattgcaagaaacatcatgggcatttacttgtgtagtttccccgggctgcaccaaattatttgtgaagtgaacaaagcagcggtgccaactaacagagccttcttgatccgtaccggatgtaattggctgcaaaagaggtcggcaggcatgagcagatgtgagggatagatttcttactggaggaagctcagaagatttatgttttcctatttttcgggctatccaatctttcttgcgagcctctagtgaactctttatgctttgcctgacactgtcaggtactaagctgcaaggataaacattgcccctgatgcccgctaagtggtgctccagacggttgtatgtcctaaccaccttcccacagtaattacagctcaccttctgtgtttccttatcgacagttttgccatgcttttccttttca

SEQ ID NO: 13835 - DNA, 15565 bp, Oryza sativa
  unsure (1)..(15565): unsure at all n locations
tgcatattgttcctaaacctgtcaaagatgcaaccgaacatgccaaatcttctgtgttgcgtctataattatatacacagtctgttacaaagttctcctttacattttcacaaactgcttttaaaatgttatctaccatttcacaaaaaaacacaagcggtaggggtcaactatagaaatcataagcaccgtttcagaatttccacacgatcttttgctatgttcatatgggaattgttgctaataaaggtacagtcagggtacaaagaacttatttgtgtggaaacaagagcacggttatcactgaactcacaagcatgcactgaggcagagtattatctagacataagggtcctggcagaaaattctgcttaagcaggccccaaaagaacatatcatgaacattcgctcacttcacatgctatccaaatattatcacaaggcataaaaagcagtaaatatgagtgcatcgactgctaggttcatgaaattgcatgcttccttagctaacatcacccagaaaaccaaccgcaaaagtctaaatgtgtaggacatgatctgcaacacgatttagacctcaaccacaaagccagctctaaccctcacgaaaacctaatttacgtgctgtgtcgcatcaaatacactaaagcactcaagtttagactacaaaagacccaattccagttctcaattgttgtgagtttaggcatttcaatagtaaaaggcacgagcatgctacgcattggtgaagaaaacatggaacattcttgcacatgccaataactcttttaaaaacgagcgcatgacatattaatcactcggaacagttgggcattggcagaaaataagatgccatattcagttgaatctgcattttcttatagattggttttgccttattttgcgcacaccctctacgcacaggggcggatctaacatgggacatgggggcgaaccccccaaacttaacaaacaaactgctgttagtattaagattacggcaaatttctagaacagaaagttagggttaacgaaaattcgagggaaaaaagtgtgcgggtcgagagagagagatgggaaagaggatgcggatgcggtgggtgctcaccaggatgcggcggaagcagcaggacgaacggcggcgccccccctcctccgctccgctcgcgggatgggtggggatcggcggcgtcggcggcggcgaaggcgaacgaactcacgaggagtcggagtcgacgccgctctccttagcggacggggaaataacctcgaggcacaggcacacacggcgatttgctcttttttttttctttggcccaattaggcagggatacggctggcccgaggacacgcgcgagtgcgggcccgataggcccattagtgtgtactatttttttttacttttcagattcaagcaatttttttaaataaaaatggctcattttttaaattcttttgaaatttggcgcatttttaaaattaaatttcgttaggcacctcacctaccaatttcttcagatggaccgaagtggtagggcgaagaaattcgcatttcggtacaaatttcaaaagtcacatgaataaatggtaaatttcaaaagcttgcatattcagtggcaagtcgtgaaatttctcgaggccggaccaatctcctgtcaccaacatcagtacatcatctagagcaccagccaaccaaatccgatcagggcgagcatccatgtgcaatcctaatttagctaggaaatgccccctaccctgtctcaggttcttggacaatacttattaattgaagagtagagtccatcaccggtccctaaacttgtactgttgtgtcatcctggtccctaaactcgcaaatcgaccgtttagatcctcaaacttgttcgactgtgttatcccggtctctaaacttgcatatcactcgtttagttccttcaacctgttcagttgtgtcactctggtctctaaacttggatttgaatatcatctgggtcaaaatggatggtctaaaaactttatattcaaaaataagtcataactcttccatgtgaactctaatgaagataaactttatatcaaacttgtagccctcgacgctatctacaactttgtagttgattttttttattttaagtcattttttgtcccaaaatgtaattttaaaattaaaatatcaaaatctataaacatgcaacaatattttgggaccctaaacagttttaattcaaaaactttttaactacaaagttttaggtcgcgtcgagggctacaattttgatataaagtttgtcttcattagaattcacatgaaaaagttatgaattatttttagatataaagtttttagaccatcatgtttagagaccgggatgacacaactgaacaagttagagaacctaaacgagtgatctataagtttagggaccgggatgatacagtcgaataagtttgaggacctgaacggtaaacgagtgatctataagtttagggactgggatgatacagacctgaacggtcaatttgcgagtttagagaccaggataacacagcagtacaagtttagagaccggtgatgggctttactcttaattgaaaatacgtcctatgagttctcaaaataaaaaaaaaaagtcctatgccctaccatgttgtacaggttctttgacatcactcgattgagaatacgtccatagaaaaagacaatactcaattgaaaatacgtctagaatttaggggcctagacaggatagatcgtagtcaacagaggtcagtaatcgcttcataagtccacattcaactttaagaaatcagtctccaggataattttgttcgatcggatggctccgagcctctgatggtttccatgtcgggggaagagggcgaatcgaagggcacatcaggatcgtccgatcttaatcggatgggtaacaagagcgcggacctgccactgctgatgctgcaaacgaacttgttgtatccccaggtcctgctgctgctaaggaagttggctcactagaaaaagaaagaggatatgttgcacgaaaataatcatttggacaagacaatgttacccggccaatcactcaatattgcaatactgtttcttattccaataacttcctaacaagttttggaataaacaattacagattaaaaaaaaagaaaaacatactattggaataaacaattacagattaaaaaaaagagagaaaaacatactaactcgacaggcaagactgcagttagctggttgttagctctagttgcccacattcatgttccaggaataaataagtggtaccaaacaatgcattggttcatcagccttccttcactgttcactcttgcaaattctcttgtttgttgtataattcctttgtatcgtcatgaagctgcaacatagcagccagaatcaaggcccactgataaatggcatacaaactgaagggaaaagggtataaggtgagcatatatacctcgggcaagaaaagtacgacatatggtggcaacccaactacaaggaagtcagatcatagctgagtagttcatggtctcatgcctcaacaacacaaaaaaaaacacctttgagttcttaaaacacatggctaacgtgcctctgaggtggttcatccagcggtatctgaaaggaagtttcgtatgaatttaaattgtagaaacttgccaaatataaagaaagcacaagttagtaaagccaatgcttgttcaaactcttgataatttgcaagacgggaagatgcacactaagcaaacatgtacgatatgtagagatctttctaagtataatcttgcgcatgccacaaattcataatctagaccacagtctgtgcatgatgtcaacactactaaatgaacatgcgtacaatattaaggactaaggagatagagaactaactacaaatgtaccatagcaggaacaaaagttgtaaatgagcaaacatttctagcaaacagaacttcgaaaatgaccaagaggaaagtatcccacacctccccaattgcccatttttccttcaaccagatgctatcatcctgattttcatttttgttgttcctgtggaatataaacaaagaagattaaacatgatgcgaagctaatttaacacagcaacatgtattcccatcagcagaaatacattcttatcaagtatacagttataattatcacagaacttacccaacagattcctcaaacatcacactaggaggagttaccatcccattaagcaactcttgtgattgcctatcaatgtctctgtgctggacagaggaagcaggagacttcgaactgggaaaacgtggggcttgaaagctcccaaatggttgacctgaacccctggtttccaaaatacgacctgcgaaaattctacaatagttaaatgaggcaacccagacagcaactagttcattgattcgccagaatgggatgggagatcactggaaccgaaacgcctagtggaatcatagatcgcaaagatgcaggactagtacagagtgtactctagcaatagagtattcttgaagaatactgtagtccccacaagtaccgtagctacgcaaggcagacgctttctggcagacttacttttttgaagttaggccgcaagacatattcctttccacacataccacctcaaataggaataactattatataatttccactaggtgaacagccttatatgccgatcttatcttaccatgatacacagctacgaatatgctagtaaatgcacaactttcagcaacatactcgaaactccaaacttcatttgagaactgccaaaagtaggggcagcaagtggtgcagagcttggatgaccaaaaggactactggctggcattcctggtgcggtggttctgcatgagaggcagtcatttaacacacatcagaaccaaatgaacagcattagaaaattgatcaactatatgtgagctttgcaattgtgtttaaagaacttttctaagcgctgctttctgattaaattgtctttcttcaatacttcctccgtttcacaatgtaagactttctagcattgcccacattcatttaaatgttaatgaatctagacatatgcatgtgtttagattcattaacatctatatgtatgtgggcaatgctagacagtcttacattgtgaaacggagggagtagattagtaacacaatcactgcatattttacaaaagaactagtagagtagtaccctggcccaggtccaatattagttgctgctccaatttgactgaaactactgaacacaggtggtccattggtttgagaagccccgaatgatgagttgtttttcacttcagggaaggaactcatagtaggaaagcttggagtttgtgatggacgtgcactattgagcagattagtaaactccattaactttgcgttttgtagatttctttctccctcaacctgaaagagatcacatcaattcaaatttacatagatcagaccatgtaagcaaagctaatgaaagcaggtattacttctgctaaaatccacagataaaactatcaatgaattgggagtgctggaaaatggaaaacttactattgattgcagagaatgcccttgctttccttcctcataggctttagctcttagttcctcgaagctaatgtctcccttaatattgcaagggccactgatgcaaacaaaagtgcattattaagtgcacaaacatttggcatggcctagagcaacttttgaaggcttgaagcataggacatgaattatttactttctgagatgagcataacaagtaagcttccaaataggagcctcgttcttaaaatcctcagaaatttgttgtctgcatgactgagggtcttcacaggagctggaaaacaaacatgtcggtgattcgcccatacccaagattaatcaggtgagatcaaaagcaaaacatatagcatatggactcacgtgtgggcagcctgcgcctgcggtggctgcaccgcctctgtttgcttcgtcggggccgaggggtcccttacccacttattttgaaaaggctgattcaacaatttctttattagtcatacacaacacattcctatacatggaaaaacactgcaattgaagaatttcctttgttctgattagcgctgacaaaccttcgcaggaccaggagcattacgtgactgggcattggcaccttgtaccccaaaaccaaaaggattgggcttctgctgctgctgttgctgctgctggaactgtgagccaaatgacggctgctgctgctgcctgcttccggtgccaaatccaaacgggttgggcttcgcctgctgctgctgctgttgctggtgaggggaggcatgcaaatacctgcactgcgctccgtacttgcaactgcacgcatcattcagaaacaagcattgcaaatcaaaaactcgaatcaatggctgggtaatcaatcgatggcgtagttctcactgagagagatgagagaggggggggatccggtaccttccgcgctggaagttgcggcaaatctcctgccgccgactcatcgccgcaaagcggaaggaaggggggggattcgattctagagctccgcctctagggtttagctcctcccaagcgcttgctcctcctccttccgccgccacgggattggcgtgggcacgcgacgcagcaagcgcggccgcacgacgtcggtgggtgggttgccctcgccggcttgccgcctccgccgagaactcgagacgcggccgccggccggagtagtcgtgcctcctcccttttgagaggcggtgacgacggcgagcagccagtgggccaggcgggccgcgggtgattcggcccacgagagggcccggcccagatagaacggccgtagcgcgctccaacaccaacaccaatacatagagatttttttattctttgaactttttaaatttttaattttaaaaacaaacatttcaaaacttatttttaaatctgaacctttttactacgccgaccggactaacgtggcaacattacacaccaatctaactagcgtgacaccgttatttggccacgtcgtgtggtagcgttatttcaccacatattcacaccatcttagctgacgagcataataaaactgtcaggtctgcagtatgggacgtgtcaatattgttttgccattctaggcgggctcatgtcatcaaaagtttatattttaaaaataagttttgaaaatgtttatttctaaaattaaaaattaaaaaagttgaaaaaaaaatccgctacagagaggcgcagcgcccgccacacacgcgcccgcgcgcgcagattgcgtcgtcggagacggagaggatgaacggcggcggcttggcccgcgcggcggcgccggcggtggtggcgctggcgctggcggcgatcctctcgacgccgccgccgcagccggagaccttctccaacatcccgcagacgctctccggtaagcgagaccgatctctcgcggtttttctcacgccttttgctgggggatggatcgatgacgacgacgaggtgggtgtggggatgattttgcaggcggcgacgggaagcagcaggtgaggataaagcggcccaagtcggcgaaggcgctgcagtgcacctccaagtgcgtcgccacctgcatccgcggcggcgagggccccctcaacgtcagaaagtagcagtaccctctctcaatctcatgtagcctgatcaaatatgttcactgaattcctgcagaaaatatgttcattcgccaataattcgagctcaattactgttaaacctgcaggcctctggtagttttcaagggacaattccgcagccggcagtactggtacctgttctatcgccattgcacctctcagaatagctcaattcaattgtgcagtcctagtactatgtgagctccactctgattatatatttatgtgtttcatatgcaattagcttggcagagtgctcggatgtctgcaatctcatcaaggatggagaagatgggcaatgaggaaagctttgacaaggagaagcagcaggtacagttgaagatggtatatccaggcaacaactaaacattgctgctgctctaacattgtgatagtctgctattgcagcaattcaaaccaaggcaaggcatggattcaaggatggttactgactgaattttacacaagaaactgaacaatccggtaagattgttccgtgaagttacagtgagaagaattagtgcaaaaaatacggcaccgaatcctgtgaacttagtgcacaataggaaatagattgttttgttaaatcattccacagagaaacaccatggaatgaagcatcataatatgttatggatttgttcttttacttttacttgattatacatgggaccaaatgccatagcaggcagatccaacatatgcaatagtcgaagaccatgagcagtaggctgtacgcacacaacatcatcagtgaattcctttactaacttcattgtttatttgctactacacatacaatgtacaacatgttttgctgagttcgacaagaagtcgaggcaagggaacctattaagacatgctgaagattttttttacatctgacatccaaagatgtcaatcttaatccagtgcttataccgattcaaaattttaccaaacctgcatttccaagatcactggatgtgcatttgcttgtttaagaaatactgtaatccagatacttgcttgctgcaaaagcttgtttcaactgtaaccaataggtttgctcaggagacttggtcactgtgtttctcatgttaggctgttagacacgcaaatatgttagtgcaggacatgtaaaattgtaatacattttattacaatcaaccatttagagtgaaaacttaaaatagggtaacaatgttgtactttaccttctatgttatctggatggggaaacatgtcagggcagttaatttgaaaatcccatatctggcaagaagaggtaccgaaatctagaatcaaacggaatgatgccaaatgtgcgggtgcccaggagactttgccgcctttgagacacacagtgctcaacaaaagtagcttgctgctgaggtagaaaatgtgatatccagatagggaagctgttgtcgtcaacaaaaccgcgggcaaaacagtgcagcattttagggaccagaagtttcccctttcgactgactcctaccgatgctctaataaaatcacgttgtgcatcttggagttcttcccttacattgcctgctgtatatatcttcacctgtagtgataattcgtcctttgttatcattaagctcagcagaggaaataatcaggatgcatgctatactggtcaatgccaatgaaggaatcaacaaatgagtgagctagtttaccgcaggagaagagtacaatccacagctgagagcaaatgtcaagagtggctcaggtgacccaatgcaaaactttttctgctcctcaggcacttttatcttctgaagggcaagaagcagagccttactcaaaaagaaagaagtagctgccatcagtttacgttgacagggcaaaatgtaaaaaaaaacaagcagctttgtcagttggatgccagttcacataccatttgtggcctatgatttggaggtttcatcttcagaatcacatactcgatgaatgcagcgctgaatgagtgacctccaattgtatatgcggcctaaaataaatcaaaggcgatattattattcagacagacgagcaacatcattcatcgaacagatgtatcgataagtaaaattagttgtgtgttcattacttcaaacaccaaatgaggggagaaacaaccagtaaataagaataaagttttccaaacaaaccttttgcattagggaaaataattttatgtcactccgtggaacgccataagcaagataagcctgtaaaagagataaagcaagcattatcactcactgtaacataatgttatatacaagtgaagtgaatttgcaaaatacgcacatgcatcatcagtgcattgtataaattgatccaaaatgccaactttgcgtcatcaccgaggtgaattgggtttacttctgccaattgttcaatcagcaatctgcgctcagataagtgccaatagtatggatgagtggatccaaatgttaagaaggaaaaagaaaatcaagaaaacaagaatgttcccatgttgtaatacaaatggaacagaaataaaagtacaaaggtggtgtttccttgagctaaaacaagtgcattgaatcatttttggtacacagattgtcagatatgttacctgaatttccttagtgattctgcagcatactcaagttgtttcttcccaactgacatccacgaaacttcagccgctgcaccgtagctcccaatgtcagcccaactaagcttctcgcgagctttgtacggatcaaagacggtctctgaagctaatagattattgttgtagttcaaatcgacctgaggactctgcacccaggaggatatggaagttggttcggacagcgaccagaatgcagaaattgaatagtttccgctaggagatggtccagactgctgcttctccgtcgagggagtcctcgaggactccctgcaggaatctgacaaggaaatgaagatgttcttcatgcagcgaacgatgtcctccgaaagctgattaggattgccaaagcatttggatgaaagctgcctctgtagtttcatagctgagtcgtgcaggacagcaaaaggataaaccttgtccactctacatgacttctcgtttgcggtgtcctagtagcaacatgaattcacaaagttaagcatcaatagcatataggtagtgtactcaactcttcatctgaattaggtccatatatgaatatgaaaccataggagccaattcttggaaattggagttatggaccatgttgaaagaggatggctatgctgaattcagtcattgttaatgatgattcagagtcattgttattcagcaatgcatatactgaagaggacagattattcagaaattcagtacctatgcaaatactattcagaaatacagtactgaagaggaaaggagaagagggtccatacatctgattcggatttggtggagtggcaggagcagacggagcgtggctgctgcagctgcagctgcggtggcggcggcgcctgcttgaggcggtactcgacgagcctcctctcgttccgctcctggatgagctgaaaatgcagggacaccatgtcgtcctccagcttggagatggtgccttccaggatggagatgttggagagcagctcctgtgcctgcaaactcatggagcttcagaaaccaagaacacaccaatccaatcaatcgaaatgcagatcgacatgggtgcgcgcgtcgtacgttggtggggaggtaggacatgtcggcgagagtgagcgcggcgcggtggagcgcgttctcgaggatggcgtgcagcgtcgtctcctcctgcagcgccttctgcagcttcttcacctgcaaaccattgctctctccatcctctcaatcacagtcacatcgcatccgattgaaaacgagggtaggaagggaagtggatcactcacgtcctgctccagctgcgacctgcaggaggacgcggcggcggaggcggaggacgacgacgaggagaagcccctcctcgccttggccgacagcgacagcggcggcatggtggcgcgcgaacctgcactccctgtcaccgtactcggagaagagaagagaagacgaagcagtggaggtggaatggaatggaatgaagtgcaaacactgcgacaatggcagcgtgagcagtgtgggtgggagtgggagcgaggagagagtaaaaacttgctgaccagtacttcaaaatttgaaatgtacgagtagtgtagtgtggcgtgtcgggggaggcggacgcggacgcggagtgggtggccaaacccaacccgcagctcgagaaaggcgggggcagacgagcgagcgcgacaccacgacccacctgggaacacacgtagtaggacctgtctgggagcttaataccgtgagaaacaattgataaagttggtagccggtttttaaggatttgaaaaagctgagttttcagctccttatttctatttctagtttattttttaaattttatgaccacaccttctcgtaatctaaacttaaaaaattagattgttttgaaaagtttctaatttagaagctccccaaagaggttcagaatctcccatgaaaaaacgaagcagattaacgtatgattaattaagtattaattagaaaaacttttaaaactagattaatatgattttctaaagcaaattttctatagaatatgtttttttataaaagatgtaaattttaatagtttgggaagcacgcgcgtgaaaaacgatacagacatacagtgaaggctgggaagcaccacaagccaactcagcctgtatattatactccctctatttcaaaatgtttgacaccgttgactttttagtacgtgtttgatcattcgtcttattcaaaaaatttaagtaattatttattcttttcatatcatttgattcattgttaaatatactttcatgtatacatatagttttacatatttcacaatttttttggaataagacaaacggttaaacatatgctaaaaagtcaatggtgtcatttgaaacggagggagtagttgatagttcgtagcgatacgtgacgagaggaaggaagaaggggacaggttgggcgggggaggcatggcgccgcgaaccgcgcgccgatgcccacgaccgcttcgccatccaaccccaaatacccaacccaagagaacgagagctaagctagccgctagctaagccaggagtccgaggcgagtccgttgttcggctcgctcgttgagttgctagaacgcttacgctttccactttgtattgaccggttttgtttacggttaccgtggcaaagtggcagccagccaaagcttggcccttccttccagcacgcggcccggagcccaaggatcggatcagaggcagcgaccaccccactgtcacggatccagaacaaattccacccattttagcatggtacatactctaggattaacctgcttttaaacctgaaaaccccacaaacaacaactagtactagtaattaaacacatcctaagataacttactacagtacaggctctgacatatgtcgagggtccaacctcaactaccattcactcctgtgaattcaatggcaagttggcaacactggggcggtgacctcgcgacagggagagtggagagtggtgccggcagagccgcaccgaccgagaggggcagcagacactgagaagagtcagatatgcagtgaacagtgaacactctttccttctttctggtggtcaatcgaaatggaatgcagataagctctactactgccaagtgccgaaactcgaacatggaaattactggaaaaaagaaaagaaaaaaaaaaagctcctccagctgaaactctgaaacatgccaaagcctgtcggcccattaaatatactaataatatcactaacagttttcgtaagtatataagaagcatatgatgagaaaagacaataaagatcatgcatactccctatgttaaaagaaattaattttgggttggaatctagacatatgtacatatatttgtattaacagagaaagcatgtattagatataatgccatatgtcgatatcataaatgagagtaaacaaggagggtaattcaacacaggtaatgccaccaaaacactatgttcacctgtcgttttccattttgtaacatggttaaactacagaggtgatttgactgaaactaaaccaggtaatccaacaaagaaacagcatagtacgagcactaagaaatgctttgtcagagtctggaggataagcataatgccagaaagacccaaaaaagagctgaaagcactgcgtccagnnacctattagcacngntttcttcacttttggtgatataanggaagggtggntnnctgccttnctggatgagnnatccatggtcgaccgctaggttggagcttagtnggagcctnnactatgctgttgagccccagaagcaccgcgtacgcatggctcacaatgggcgaggcgaagattgtagtgtagatactccatcgttctgaacctctcttgctcaggatatgtcctcttcacaacatgcagctgctcggatatgctccggtcaatgttgtatatggaagcaccgaagcatgtttggctcaagatcctgatcgcaaacgtttgcagctcaggggtgtcagtcccatgtgccgaccaccaacgaactgcaattaaaagtaagagatggtaagagaagtgtttctttaatatgaacaaaagcaacaactgcattcgttagttaccagttctaaacatcgaagagaagattttctactactacaacttaagcaagtcaaacagttcaggctgtggcaggttgcctattacatgggaagtgtttgcatcagtgtaacacgggagggaaccagttttgggggggggggggggggtaggagtgaagacaaactagaaagataacctcacattaatgcccaagtgaaatgaaagataaaaccacttgttctaaaggtaaccttagtgtccttacgtcaattagaaaaggagagccagtataaaaggtgcaaaagagacctcatatttgcatcgaaggggatatcaaagcactttgtttaaattcactcttatatatatgttttgtgtatcgttcaggcggagaacagaacctgatttaccatgttgacaagtagactaacagtctaactctaattgacttagtacaacattctgactttttcttagaactacaacaacattctggctttaacaaaaaatatgataatctttatgccactttgcacataacaaatatgcttttgtagtgcatcttagttagtaatgcacatgccagatccatggaaaaccttgtaacattattatatcttgctgtgtctaaacactgtacatgagctcgcaataacatgtgattgagggacattttacatgagaatatgctatactttaccttgtggtatttccattgtttgctgaattgctgagtctgaatcaaaaggagctgatttgcgtcgatacctatccatttgtatggccactttcttaggatcataatggtttttggccagacgggttacacaggcattggtcccacttttgatttcagtatcataactgaatctttctgtgtaaaagatccttggattcagaatataaccggcagcatggactggggtatgcaagtaatgatcccatatctcatcaaccataggccaataatcaccatgtttgtctcgaagattgcactttatgtcttcttttgcgcaatccatagcatcatacaagatacctattgggcaattatcagcttccagtttgtacaacacagtgataagtggatccgtaagcttcaaaatatcagcagcagcactccaaaatgcattatcagtttttactacttcatagacatgcctgaatgaacttctagaagccaa

SEQ ID NO: 13836 - DNA, 1275 bp, Oryza sativa
ttaccatcttgttcagcaccagcttcaaaaacaacatcatccaacttatctacttttcctgtctttaacttctccttcagttctttaaaacgcttgtgtatctgtgcagcctcttcatcatcatctgatgggcaatcatctccaagaatgcaatcactgtcactgtcactccctgaagatacctcactagctgattcatcgtcagctaatgtggacttgcataccactaatatattgtccattatgtccaattggattttgtcttgccacctgtcttgaatttccgttatgaagacgctgcaaaagagatagtagaacaataaataataaataaacaaacacaagaagacaatcactttatcccagaaccacgtaacagtggatagtaacgcatagctttttattctgaaattagatggcaggagctctacctattcaattgaggacagaaaagtaaatttgttgagacacagctgatgtatgtatgtctttggataaaagataaaaagtatcaactagccgggaccatataatgctactgatttccaacatgcaacaactttactactcctagaaatttaatttacccatccctcatccacaggttcccatagaaagtgtgaacaattgcaactatagacataaatttgcacctggtaaacagtaaatacaattgaaatcaaaatttgaattctataccagggcaaatatgagaaagtatatataatcaatagtagtagctgggatggaactacaaaccaaggttctgagttgtggaattgcattagggaagaaatgtatatgaggttgattggtccaagttaagcaattgatcatgccaagagttctaaaaagccaccagccacttatcccaattatttccggaaatacatgcaatgtagaagggttctcaactagtgcatttccagtaactcaaaatcacctatggtcctagtccaacaccatgcaaatatattcgttgaatgaaaaatatttgaatctcagaaccagcttgcaaagaaagtactgagaccctgaccattgcaacactaaatttatatttggattcttaccatctgtctattttggaaaaaagatattcatgttcacagtttgaaaataaattcatgggactctttattgtcttgctttgcacttatcgtcagcagagataaaatatgcagcttaggagaaggcaagaagcaatgttatcaccagcaaagatcagctgggaataatagaaagctgcaacctggagttgctctcagagataaa

SEQ ID NO: 13837 - DNA, 698 bp, Oryza sativa
aagtcgaacaacgttatgcacggagccttggcacacttccaaaacttctggtgttcattgtcatagaagtgtctcttcaagttagcatatatgtgcctagcacagatcctgtgttcagcttgtggagcccatttatccatagcattaataatttcctacaggaaagcatacatgttagtaggcacatttgcatttgtaataattcaatactggacagagtatagatggaatgataccttctgttggtttgatatgaacacccagccagatccatcaccaacttgcaagtcactgcacaacaatccacagaaccagtgccattcttccttgttcgccttgtgcaccactgcccatgcaattggatacatctgattgttggcatcctttcctatggcacaaaggagctctccattttttgctcccttgaagaagcagccatcaagtcctatcacttttctgcacccagctaggaagcctttcttacatgcatctaagcatatgtagatccttttgaaaacaggtggatccatatctacctctctatccaccacaacagtgcttccagggttacttctaagtagctccagctgataattatacaacttttgatactgccacttagctgcatttatagctttcttcatcgtaatggatttggctctcttcagcttggagatgttaacatcagcaaacatctc

SEQ ID NO: 13838 - DNA, 1379 bp, Oryza sativa
atagtaggatgataccgtaagcattttaacatgtaacatatccagttttctgcatacgcacgactggtgggtgttacctggtggcacacttctttttagaagggagcttaacccatcctcttgagtcttgacagttactattatattgttatataataatgcatagtaatcatatatggtagcttgtgtattttcatgatgtagttttccacttgacgcgtttttaccaagtcctacacaaatctttcatggtgacagtgtttgcgattttgcattgcagatgcaaggcagcagacagatatttactttggccaatctccttttggccaagtgagaagcaatgcaatttcttcatgtgacaacctgggaggcttcaaatttacagaagcaaaactcccctggatgaagccaatgaaaactataggccttgaggatctgaatttctctaccctgcagatgccaggcaatgttgtgtcgcatacggtgcatcatcatgattttgatgggctcataccattcaagggaaacaccccgaaggtcctcaaccaaggtacattaacatctctcaattcatcactgaactttaaagaaaagacatgcagctgttgcagcatcttcaattttaagtttttaaccatgtgtttttatttaatgatctaaatgggactacctattttagcaattcaatttcttatcagtaaataggtccgactgatttgaccttttgtttgattgttatctgtactgttcacctctctgctattcgacaacgccgagacagcattttattctccataattccttttcatacggctacaatcttctgaaaagtctttgttgctaaacagtcagcattcctgacttggagtttggattaaacaagctacttagtcataagaacacatcattttgctccctttttttcagtaactactgattactcattttatccatttgcatcagcttgctttatggacaagctagaaccacaaattgtttctcaaaaaaacaaaaacaaaaacagagaggctagatccaccaattatctgttacaagctttttggacttcctgccttggtatgttgatctttcaatctgaactgctccattttttctctgggtggagcctgggagcctttcaccatcccaaaaagcaagaaatgtgtttcacgcgagagatcgacaagaaacgactaggtcccatttactaggtttatggccccatcactgcccctgataatgacattcaccagaacttttagctggtagtccagtacccacatctgtgcctggtactaacctgggaccaacaaatacttattggatatgccagcttagtgttgcaacttgcaaggagtgtgagtcatctcaatagatac

SEQ ID NO: 13839 - DNA, 826 bp, Oryza sativa
aagtttcatttactagatatttgtactgttacatggaagaaagatggcatataagctttcacctagtgaaattataaatattattctattgaggggtagttggaaagaatatgcttgcgcctaattcaaaaaagaagttttcaaaagttctgcttgatagtaggtattgtggactaagattttcaaaatatctattctaatacatctgactattttctctttcatctatgttcacaggcttttgttccatgattccatcccttctgggaattaataactattgtgttgggttgctatttaacttttagaattttgcaggcgtatttggaaaccagggttcaggtcaaccatttgggagctttcaagccccacgttttcccagttcgaagtctcctgcttcctctgtccagcacagagacattgataggcaatcacaagagttgcttaatgggatggtaactcctcctagtgtgatgtttgaggaatctgttgggtaagttctgtgataattataactgtatacttgataagaatgtatttctgctgatgggaatacatgttgctgtgttaaattagcttcgcatcatgtttaatcttctttgtttatattccacaggaacaacaaaaatgaaaatcaggatgatagcatctggttgaaggaaaaatgggcaattggggaggtgtgggatactttcctcttggtcattttcgaagttctgtttgctagaaatgtttgctcatttacaacttttgttcctgctatggtacatttgtagttagttctctatctccttagtccttaatattgtacgcatgttcatttagt

SEQ ID NO: 13840 - DNA, 3370 bp, Oryza sativa
tggaagagcagagtcccatgagagaggcggtggcaatgcgtgtcgcgatggctcccgcttccgcggcgtgacatgaggagttttctcatgtaatcgtccaaacgtgttgctcgcagccgcaatatctgctcgtcaaaaccatgtggtcgggaagacttttaaggctgactacgtttgttcacttttctaacttatctacttattatctattttgtttcttacgtatatatttttcaacctaacggtgtgtattttaaaaaaatttatatgattgttgctttaaaaatttatattaatatatttttttaaaaaaatacttaattagtcatctgctaataagttagtattctgttttgcatgtgtaagatgttagtttctaattaaccttaacaaagaaaacttagcctaacacctctcgagtgtattaagggctgtctttttttctttcttttaacgtgtacgttttctgaactattaaaattttttatataagttgttttaaaaaattatatacatttatttttagggtttttaataatatttaatttatcatacgttaattttatgtcatgttttacgtgcagagggataggtttcataacccataaaaagaacacgccgaggggaaggcaaacccatcaaaaagaacacggcattacttgttgaatgaataaacctacctgtgttgcgttgatgtattatttcggtactccgcgagacgagaacacgtgcattccgtatctgcagaattcgatctccagtatttacagaatggatcagtcagagctgggcaaccagaaataatccaacaaggatcaatagcagcattaaagctaatcactacaatccaatgctgattaagaaaactagtactccgtagtagactctagggggaccatccaaaccgtttcgaacttacatctggtgccttttcctcctcaatgcccacactattacgaaaagccattgcctaagtgtgatcaatggatgtcattagggccagatccaacctaacctcttcgatcaatggacgcgtgactataatactgtttgaactaattaatgggctttgtagtatgaacattgctcgtgaatttcaaggcacagcacacacccacctggaccccaagctaagacttcttcaaatcaaacacttgaactgaagcttcccttggttaaaaatgaaaaataaaaaccggcgcaagcagttcaagagcgccaatgcatatgatgtcacttgtaaatatcgaatggcagaaaaaaaaaagtcagaagtatttttcgcattcattgatccaattccatcattaattttaacctagtagtagtagtaggattaactgtacagagggacatgatgcatgatgtgttggagcttatcttgtcatgctgcattttcggtccatttaatacatgagacagtattacaggtagatcaatgggccaagttctttgcatggatgtatcattggatatttggatcatggcaatggcaatgtgtttttgcatttgaagtagccaagggaccacggaatgatccgaccagatcagcacacaaatcccagacagcatatatatatactgccctacgtacgctattacgcttgatcattcaggacaggacagggcttggcccatttgctagtacgtccccttttttcaacaccttttggccttgatcatttgctatgtcactgtcagtctaaaccctaaccatggccttgatgagctaaaactaaaaaagtgatttttgcattcgtcgtcgtcagcacaacatactattggtcgggattgagatccagtgcagttattactatcactacaactttagcagttgcaaggtagctaatggatcaaaaaccagcggctcagattatcagaaaatattgttcacgaatcactgtagcaatcttctactgtagcgattactgtagcgtatactgtgcagggggtggcagagcaaatccaagctgttggctgcatcgatccaacggttatagtatgttatcactactaaagttgcagtcgttattataactgcattggatctcaattctattgctcggctgctcgcttgctgggtcacagctaaaattttaactttgaaacttaatttaaaattaattttaagggtttctcaaatttaaaataactaaaacttaattaattatatgctaatgattttctcgttttacatgccatacttaatcttcactagattcaaaccggcactaatcaaatctacatgaatgttggagttcgcgagttttgcttccatcccttacggtagcccagtgatctttagccgcagcatagtttgttggttgcagaaaaaacaaagcagcaggaggagcaaagcaaacagagcaaaacataggcggcaaatagcgagagatcctccagaaaccggagagcaaaaatgctactacggctgtgtttagatgtgtttagatggtggaaaagttagaaagttagaagaaaattagtagtttggagaaaaagttatagtttatgtatgtagaaaagttttcgatatggcataaaatgatgttaagttgagaatttggggtaactaaacacggcctacaacacattccaacctatttagcgcccggccgatgattaaattcgccgtacatagacatagtaatgtcgtcgtcggccggcgtgtcggtctaacactccgaccatgcacgagtgcttcccttcacttgggttttcctttcctttctcaccacaaaaaattgccgtccttgcatcgcagctgtagtagatgggggagacacagggcccgtgtggtaggtgacgagaaattaacgaggtgtttggaattggacatcgtcacgttgcgaatctgcgttgctgtagcctgtagctagcgtaatggtgttggttttgtgaacccatttggatgtacatgccgagtttatcttattttctattaaaaaaaaggctagtgtacgtacctgtacatggttttttttttagaagaaaccaatttaatttgcctttgataaagcatgagaaaatagagcgtaaaagaaaagttacttacaggaggatttgagtctcctcacagcaacagcatcagcagtagagaattgcttcttctttgatctttgataggatggcagttgggggtatttgctaggtgtttgaatgaagatctttcattccgtagggttttctttcgtaaactccacttgaagcgcgaggtgcagggcacatcacgatcgtccgaccttaatcggaggcagccgatcacttgcaaagaagacatgttgaatccaaagaaaatattgcccatgattccgatattgtaataactattgttttctttcttttcaatatcttcaaaaatggaattgca

SEQ ID NO: 13841 - DNA, 1099 bp, Oryza sativa
cattcggctgccatggagaattcatgcgaccatgatgagcttctggaaatgcttgaattagctgggatggtacttgttcaggcgcttaaagaacttaagaggtaaatccattacctttcctcattttattgcttttatgctctgaccaaatctaaggttcttatacattctgtaattagagagaatgctgcctggtaaagcaaatttaagttttccattgcttctctatgataatacaagtataagttattttttatgggcttctgattttgcccaagaaaaaatatcttcacgagtaactgtatataatcataatatctgtcttgtttcctggtgaaacttccttaataccctgataaaaggttaaatgaaatgtactgcgtactaattgttagctgatgtcccattaatacgtaattcatccaggtgccttaaacccttacctaacttagcttgcctttgaaatgataaaattgaaaaacaatagatgtacacatgcaaaaagaatgatcccatactttctaatgtctggttcaggtttgctctggatttatatggatggatattgaaaaaatgtgtttttgtactaaacatgcaaacaatccttaatacttgttgttattatcttctttatccactgtgtagaatgtttccatagtttctgaagtctggtttatattctggtgtgtgtaacacattatgctaactgttccaggacatctgagatgtttatccagctcaagacaatctacggttcagtggcatcaataccattgaaaattttcattacagggtacttgttacagttacacagaggccccatgtgttgttggtttttcatggagtgttttcatgcttccccttctttgtatcaattactggtatttttcttctcgtagggctacgatgcacatggcaggaggatctggatctgatcttagaccaatcttcgatgaataccttgctaaatggagatatactgatgatcaagtttatgttttagatgaaggaaagaacagctcctcaaatgggttggttgttacatcggttatgtcacctgaacaatattttgaggtggcagagttgtacacggtaacat

SEQ ID NO: 13842 - DNA, 1142 bp, Oryza sativa
ccaaacattctgaaaaaaaatgaatgtatatatcaccgagtcagctttttgtcatgcaacatgtaatggaggtgatagctttgaagtaaaacaccatgacaataggttcacagtacacctagacaagaaggagtgttcttgtagatattggcagctgtcaggattaccatgccctcatgcaatatcatgcattttcttcaagactaagactaattcactggatgagtacattgctgagtgttattcagtgaaagagtttaagaaaatctatagtcaatgcctggaaccagtagagggcatgagcagctggccagaagatgacaaagagccacttaatgctcctgggtatatcaagatgccaggagagaccagaagagaatccaatgaaccattaaaagccaccaaactgtcaaggattggctcaatcatcagatgcagcaagtgcaagcaaattggccacaacaaatccacttgtaataagcatcatggaggaggctctagcacaccagattctctccaagttgtaaatccagctgataatttaatgctctcaaacacacaacaaagctctaaacaaagcaggaaaagaaagtcacgtacagctgctaacaccaattctgcaagtcagtcaaggaaaacagtgtcttcaaagcaaaaggttagctagatctagtgcaatttgaattcaatttatatttgatttcactcagagctaacaattctatgatttgcaggcactagtggaattgcatgcccattctcagggttctacaagtgcaacaattaaggtcacttctgggcaagcttttgtcaatgtttcaactcaagaatcagcaaagttcaagccaaagaagcttacacctggtctactgctgcttatgcctccatgggaatctgacaaactgtgatgtaatgttagatcaagttatctgttattaaacttgtgtgtgatgtaacgccagacaattaggccatctattagacttatctgtgatgtaatgcaagactttatggcctgtcattgtagttgccagacttaatggcatattgatgcagtcaagaaaaccatctgggagttttggctccagctgttccagcatcaacaattttctgaagtcctctgcaggttattagcagttttt

SEQ ID NO: 13843 - DNA, 9987 bp, Oryza sativa
  unsure (1)..(9987): unsure at all n locations
cgagttgcgtcgcgggtcgatctgcgcctagcttttgggagaaagcgagagcagggagggaccagctgcgtgctgatcgagtgagagtgtgagagtgagctgagctcgatcgcttgtctgctctgctcctcggactctaccgggaggagatcgatcggacccagctgaaatgaaacggtggctatagcttcagctacactgctagccacaccctctgcctttcatggcttgatgcatcttcattagatgctctaggatatgctcctcttgtaccactccatcggtcaagaatcaacgttacgatccattagtactacctaaatctctcggatgaatcatgcacctctgcgtgagactcgttataatcatgcacctctccgtgagactcgttattaacgcttgtgagaaactattctaaactctttgggtatatgtactcgttatatatttgcatatcactcaaatgtaaatgttaaattttaacttttataagttgcagcagagaaaacaaatttaactgtaaatatacattaattagctatagtttaaattttttcgttgtaatttgtaaaagttaatttttaacttgtattttagagtggatatcatatactaatctatcttctcatttttcttaaagaaaaattataactatgtagatgttatgtaactaacgagggaatatcctttaagagtttaaaattcacttccttacatttattgtatataaaaaaggagcaagcagatctctccctctctcaggtttcctgaattccagatctttaccctgatgcaatcttgttctgaatcacaactagcgccttttttataaccatgtcagcagcagaacatacagaaaataaaatcaccactaagaactcgtataaaaagtacttaggagtacatgactccttttgttgtacttacaaatataatccctccttcccataaaaaaataatctagtatcggatgtatcatatccggtttctacattcactttttataggacggagggagcactcaataattccattataaatgaaccttgtttagatcattcgcagctaggcaagcttgtctatatggatcatggaacgattgcaactgcggaggggaaaaagaaacaaaaattcagctttgattgttttcgctaagctacatgagacagacaggaggtatggtgacatctctttcttcgatcgctacaccagcattgcaacttggttgacgacgaactcgatatgccgcagcatattccagttttttctaccacctgcccaggcgccgcctacatgcattgcatatatattgcattgcagctgcaggtagaaacagccactgaaaagagatgacgtcgagagctagagctagggaaaattgacggctgagatagatagatatggatgcattcacctcaccaaatgtggcacatatatatctaggctagctatacaatgattgtcatttttgcacaagtggaaaaggtctgattgatcaaggcatgtacctgtttgtttcaaagaggcataaggaaaaatagtaagggggtgtatagatgtaaggatataaagttttggcatgtcacatcagatattatatagggtgttacatagggtgttcgggcactaataaaaaaaactaattacagaatctgtcagtaaaccgtgagatgaatttattaagcctaattaatccgtcattagcaaacgtttactgtagcaccacattgtcaaatcatggagcaattaggcttaaaagattcgtctcgcaaattagtcgcaatatgtgcaattagttattttttggcctatatttaatacttcatgcatgtgttcaaactttcgatatgacagggtgaaaaattttagagtgggatctaaacaaggccttactctctcaggttgttttcaatgtaacactgttgattttgatatagtttgagcatttgtcttattaaaaaataattattatttgtcttatcatgatttgttttataaatactccaagcattacttatatttttttatatttgtaattttttaataatttgagtgatcaaatgtataactcaaagttaacggcgtcaaacattaaaaatcgaatggagtactataaaattgttgtgtcaatacatatacacgtggtatattaatatgtacatgttttgaatttccgtgtgcaaatgagcataaatattccgttcgatatatgttctctacatgacaacacaaataaaaactatttagctaagttggcaatctagtctatgaattggtggaccttaaatcttctttttctagtgtaatggtgtgtgttttggttgtgtgcatcagagttcgggagtattctcagtatgattgtatcaccttaaaccttccattatcttaaaaattattttttttcatcgctaaagagaatcaaagaatcatttgttgagcagtaccattgacatgtaagtaccgacctcagttttcagcaatattctggtagccctggaattgggaagaaatatgatgtcagtctagccctatcaaagcgcattgtttaaataaaaatgtatttcctccatccaataaaaaacaaatctagaataggatgtaacatattctagtgctattaatctgggcagatgtatgtctagactcgtactactagaatgtgttacattcgatactagattggtttttttatgggacaggaagtactgctataattgagaatagaacggcagtaacgtaaatttgtagcctgctgaactaatcttgtcctttattggatctgcatcgaccaatcctaggtcgaggttgaaagatgccctgccaccagatcaattagacagtgtacaaaagctttcacatttttttctctaggcaagtggattaatggtggggacaacatccaataaaaatggagtaatggaacaaaggtggatcaattaggagtgcatgaaggaagatatctgcctgactgaatgagaaaattgctgtgtatacatccatttgacaaaaaaactacaattagctaacgagccagggcacaattgagatatgaatagtttacataccttataaaatttcccaaataatgcaatataatatggtagggtggaattaatggtttaattagaaaattatgttcttaataaaatatatggtaataagcctatgaccagatgtccagatctaagctataacatagtattataatcctattcttcatggttatggatgtaattacctgatgttagcctttttcctccattttaaaacatactgtagctatttacttgttcacatatatagtcagaagttatattttgatatgaagagagtacgagtgtataatatgaatacatagatgcataagactaacgaagacctccgtctcacatagccacatgccacaatttgtaaaataccccctttgtctaaaaaaatttaatctctaaattcgtagctagagtttccctttttaagatatagtagcttttttcttacacgcaatacttgatgtcccatgactcttttttgctatgaaatcacctcacataggggtcatcctagacctacacaaactagcagctagtggtgttgaatattgatcatgaagcaattggcccatcttatccaatgctattctccaagtggttgtcttaacactaattgaacccaaaattctggctgacatcatctaaactaaacgaacctccaccatctccttgtcacaattttcatgatcaattgcatgacagaccagccccaccactaatttgtggatgcatctatcactataagcttttagtatagctaagagtgattcttccaaggtaattattgatcatatatattaataaaacccgattcctcagtggtcatgtctttgcaagcttgtcggcctctcgattacatcagaggttgctgggattccatctctcattagcttattgcagctagctaaccatgcttttgttaagagtcaaggtacattaattaactgaaggactagttccctaatggtcacttgaaaaatgcaaccactataagaaaattcctttcgatcgatctatgctggttactcagatcgaacggtttccattcatattttactatattatttcatttgaatcttttgctgaatttatgcagttcaaactagacaaatgttcttcggtgaattttcacggagctatttgaagtagaattgcatttcattataactcttgcctctgtttgtataaatataaatatttttgcctttttttgtctctttgacacagtggccggtttaaatcctaaaaatgacacagtgtttttttatataatcatattgatcaatttagaccatatccactttattctttatcaatatggcaatttctagacactcaaagctaacagagtgactctttttagccttctcttgataatcagactctaacaatcatgcgttgcatcaggcaaattaattcccatcctttccttgtctttatagtgacaggtgataagtacctgtagcaaaggccaaaagtttgcctctcaatatgttcaccaaggtatttcactactacatagtagctgttttctttattaaaaaaatcactttctactgcttattggtttctgcacgtttctttctgaaatataacaaagcaaacgtatttgaaatattaacaaagaaatcatagtagttccatgtaccaatcgtctcatcatgatctaagccaaatctaaacaacttcgtgtctaccgctcctgttttctcgtacatggtttgcaatagaacaatattaatattaacaagtagccaaacatctttcctagacagcaaccgggtgaatttgctttatatataaaaaaagggtataatagtagcattcaaatcattgatgcacactagcactaaccacagccagaaatggcctggttagagcccccaaaatattaccagaaatgcttggtgggcttttttgagggaccttaactctctccttgcttcccaaacatggttaaattaaataaaaaaaatgtgctgacagggagagcaaacatggacaaaattaagatacaatcagaaaatgaaaaagaaatgcttcaagaaagggtagacaatattaactcctccaatgaccaaagcaaaacagccagccaaccaacctctgagtagtagtcacaccatgacaccaaaggaaggagtagtcactggccaccaatgatttgcagtagtaacagatataggtcttaggcctccctgagaggctgagagagagagagagagagagagagagagagagagatttggtgttggataggagaagagagtggagacagtgggggtgagaggattggaagcatccagattctgaatctcctgcaagcctacttcctgttatcttctttgggctttcaggtgaggctgagatttcaaagatccatccttttatctgcactgctgctgttctctctgttctttggatttcttggcatcgttcttgcgagattcaactgctttcattcataatttctgctggtcttactaatttgtcagggattcagacctcatttcttgctttaatcctctcccatttctgattctgttcactctatctcatttcatatgctttcatgggaatttcttcggttgttgtactagatatgagagatatccatgtgtgattcacttgaactgttccaagaatttcatgctgatttttagttgttttttttcttctgcctctgaatatctgatgctgtgaatctgggcttcagagtttgtatatgctgtccatgcttctctcggacagacaggacggcatatactcaagctgtacacgggaaatttctccaaaaaagagtgccgaatgtgagaatctcgtgtgtcctttttttttcttcttttcttttttgctttttgcgaaactccaaaaacgttcctttgtgattttttatgtattgaaaagaaatttctgtaactcagatagacagttggaaaattactgtactgtagtcaacagacaagtaatgttatctgcaacttttacatttttttttgagaggaaagctttttttttttgtgatttttcgtgttccttttactagtgagcaaatatgtggaatcttatccgtgatttttctagggaactgatttttctgagtatttatgttaatgtaattactgcactaccagaacttaatagaaatgattaataactcagatctaaatatttcggcgtaatacataacatactcagggtctcagacactagaacctcctcttgtgtaaattgctagttatctacacaattttttttattataagcaagcttcttatgaacgcatatatctgagaaatatttagattacgaatatgtttcgctgactattaaaatttatctcactgtactcttgcagcaagcatccattgtgatgcactggccagtggatgataaagccatcaatcaactgaaccagcatgagctcccagagtgttgttgcagtgaagcagattactgctccggacaaaatagtggaaacctgtccatccacaaaacattctgcacataagctgttcgatgttaaaccggattttcaagggttgatagatgacaatttgtcatcctccagtcagtcctcaagcatcaagattgagctgatcagatcatcaagcttgccaaatatactgccgtttcagaaaagaagctctgaacctgaacctgaaagtccactgtctcatgtttcacatcccaatgtttcagagccagtttactcaaattcttcaaccttctgcacaagtttgttttcgtcgtcgtcgatggagacggagccgtgccggcaattgggcactctaccattcctgcctcaccctcctaagtgtgagcagcaggtttcagcagggcactcatcaagctcctccctgctagtacctggtggtgatggtgatattggcaatgctcatgatgaacctgaacagtcagatgatctgaaggatttcctcaatctctctggaggagatgcttctgatggcagcttccatggagaaaacaatgccatggcttttgctgagcagatggagttccagttcttgtctgagcagctagggattgccatcactgacaatgaggagagccctcggttagatgtgagtttattcattgcctttactgaaacattttcttcactgtaaattgagtagtccattgatcttcttacacaacaattcttttattttcaggacatatacggcacgccgccgcaactttcatcacttccagtatcatcttgctccaaccagagtgtacagaaagcaggatctcctgtgaaagttcagcttagctcgcctcggtcatcttcgggatccgcgacaactaacaaggcgaggttgaggtggacactggagctccatgagcgttttgtagaggctgtgaacaagctagatggacctgaaagtagggtggccataaatgctttgcaattttcagtaccttaaaaggaataattttgaagttgtctaaatggtttatttcattatctcatacagaggcaactcctaaaggtgtgctgaaacttatgaaagtagaaggcctgactatctaccatgtaaagagtcatttgcaggtatcagtgtatcactttatattcatttactaccatttttactggaaaatcaagcacccttctatgttttcatattttgcttacagtttctctgtccttattgtgcagaagtatcgcctcgcaaaatatctcccagagactaaggaaggtaaattgagaaaatagttgatatcttttttagattgttttgtcattctgaatactgaattactgatgcatgctatatgcagacaagaaggcatcctcagaggataagaaatctcagtcaggtagcagtggaaatgattcagtcaaaaagaagtaaacccttgcntaattgctagcnagcanccagaaagctgcagagaacaaataagagcacatgtagatcttaagaagcttacaactgactaaatttccnattgtacccatttncttaggaacttacaagctggcagaagctctacgaatgcaaatggaggttcagaaacagcttcatgaacagttagaggtgcgtatcagaaactctagaatgcagggtttgcaatccgtctgatgttgtagtatcattcttcatctgcacttgtgatcattgttcatctgccatcactatagtgaatttggtcaaaatcaaataatatgctgcaagtgttcagtgaccaaattttcagttaaatcagtacacatattcaggaaaagcatgcggctcacaaataatccgaactagatatccccaatccatacaatttatacctttttcaatcaccaggtgcaaaggcaactgcagctgcgaatcgaagaacacgcaagatacctgcagagaatactggaagagcagcacaaggtcagcatcagcagcaactccctctcactgaaacccccagccgaatcgcaaccggaatcgccaaaaccaacatcagaaaagaaggaggccgaatccgaagcaggcgccgccacttcagctcagccatcatccgaggataaatcaccagacgcagaatgcaagtcgtcgccgccggtgggtagcaagagagctagggttcatgtcggcgatgagcaccagtgttcatagcttgtgtagagaggaagaaggcaaggatttctcagctgcatgcaaatgcatctctcttcttgagaattttagccactgtatataaatttggacttttggggaatgagaatctgaatttggaagcagataaattataatcaaaaatcaaaatatggacttacaaaattttataggatttgttttgcagcaagtaataaattgaagctaagactgagtgtgaacgcgtgctagggatttcttggtcaagccatggtcaatggggagtcaatttctttctgccccctttctttccatgtttttaccaaaatgcccctcgacctcacctgaaacggcaaaatgccaaaaacccgcttcgatcatcttgctccaaagcttacccctttcgggctttctcctcatcgcttctcttctcatctccacccgtgaagagcgaattgctcaagccctaggaggcgacgagggggagtacggcgagggggggaggtcgcggggatcgtcgtcggcgggaggaggcgcggcggggctgccggttgctgctgcgcgcccccctttgcttcgttcgcgcatgggagaagaggaggcaatggtaaaaattcttttgtagatgttggggttttggagtggattctggtggtgatccggggatgtatgtaggagtaggagcccatctatgctgtgggagaaatcggggttggagcgtgtagaagccgtacccccctcctcccctttttttttactcgttttaggttttaggttttgattgtttaagagttacttagtttgtataatgttggatttcagtaggcttttgagtcgattagattgagagatcatacggctaggttatccgaaatggagaattttagcaaacgaggatttccaggaagggggtaaataataatagttcttaacaactttggatcagtgcacagtctcacatcttttacacgctttgcgagcgaaacggaatggagaattttagcaaacgaggatttccaggaagggggtaaataataatagttcttaacaactttggatcagcgcacagtcgcacatcttttacacgctttgcgagcgaacttgtttcgctgcataaggtaattttggcatgcccatgtgttgcctctgatgtattatcactatagagttagatatattttataaattttgtgctgaaggtggtttccacgtttgccgatagctttcgttactgtagagtatagactaagagaggaacattggccatgtaatgatctatttacatgcttacagaaggaagtatggtgagagtggaaattcttgaaccgacctgtcatggttgctgt

SEQ ID NO: 13844 - DNA, 4494 bp, Oryza sativa
tggctattagattgattatagatgaattggagatagtagcgggctatacatttaaacttgctcaaaaaggtgttactagttaattaacacgaaacctaatgctaatctacagtactatctaatcaccacgtggttagcttcgattaatgtgcacgtgcgtgggggaagtttcccgaagagtctggagacgagtgccaaaaaaagaaaaggaattgaacgagtcaaaagaggttttttttttaattatttttgccgggtctcgccgcgaagacgccatcggaggcaggcagcccggtccagcccaccaagcaggtgaggggcggagatggaggagacggcggcggcggcggcggagaaggcgacgtcgtacagttactgggtgcgggaggccacgggcgacgccgcgccgcttcctgcgccacgcaagatcgacgccgccgacctcgccgccaagcccgcgcccaccaccctcggctccgtctggaacaaggtcccgcctcgtcttgctcttgcactgcatcctggaaataggggggagaaaaagaagtcgttgggttgattgattactgtagtatcggggaatctggaatttgattgattactgtgtccctgaaagtggaatggttcggttttgttgttagttttgcatctgaaatctgaaatggaagttgtacttgcggttttgttgtagttttgcatctgaaatttgaaaagaaacttgtagttgcaaggagggtgatatcatcgttcatgctggggagctagttcctatgcccatatcgagctatctatgtcatgggcaacttaagggattttcaacctggaagcatgctttgccttgctatgcagtaatccctgataggcaaaacctcaaaagcagccaagaagctgaatcactagaacgtgccatcagaatagttcaaacttcaaatgcaacaacacctcacaaacatgtttgagtcatgttgcctttagccctttgatgcaacattgcttcgacgaagcggtttcttgactgttggcaccatctttcctagccaattcttatgcctgtggctgtatcttaaatgatgtttgacaccaaacagggcgtagtgtattatcagctagtatttctttctttggtattgctatggaatgtttattatcaccatttgtttagactatgctactaatacatactgtgcaacaatcaacaagataagttcacaatggtaaaatgagagcacagtatagagattagctttttttaaaaaaaaaaattcataaaacctaatagctctgtgactatatatctaaccaatttcccatgttttctgtgcttcttgtaggctggaacctgggaggaaaagaacctcaattcatgggccaacggtaggataaaggtgctgtagttcagcaatcaaatgcttgaaatccaaatgtcctaactgtaatgcttatattgttacacatttcatctgagtgatcttagataattttaaactacaggatttgctgggctcattagaccctttggaattttctactgggaaggcatctgtttacgaagtatccaagtgttcaggcgatgtgagtagtgtatttcacagagccatttgatagttttcatcacaagtgctttgtcgtggaataaagtgctcttattgttttaccaacctaatgccgtgtggtactgaacctgaaaacactacttctaatgaataaaaaaccattacttctgatagtaccgtctgttgttaacatataccgtaattcttttttgggcttttagggaactcttacatctttagatatccttgaagataacctacaaaactatcaaatgctaacataaagaggaattttttattcatggctgttggggcaattcttgcataccttgacatccttgaacataacaaggacactgttgaaagatatcaaagttaataatccttaaggatatgaaagacaggaatatcaaatttaataatcctatattgatcttacagagacagaagaattttatattatcagcattcatcctcagtgtgtacttctcagcaagcatgagttgtggtcctgatatttttgctgtgttagttgttggtttgaacattgaaaaatggcgtggacaaacccattaaactaggaactgatgagtagcaaaaatgtggcaactctccgtgggagctctgcaaaatgctggtaataatactatgtggattcagcatgagttcagctttgttatccctgggggagatctacaaagcttttctctctgttcagtaaaacattgattagggcctttctcaatccaactggggaattcagtaacatgtagcagatttgttttctcgatttggtagtgatgcttgttcctatattcgagaacaaaaatgtatagctgatggagtgccatgttcttgaatgtctcactgataatccagctagggaacagtgctttcattttcatgcaccccttgtggttccaaatccattggtagtagaatttattttcatgaacgtactgttttacggacccttcgtttcgcttattccccgaataagcgaaacggcatatttgcaaacgaaaaataattatgaataaaacttttatatacatgttcttagcgatctaaaagcaaaggctgaaaaataaacttcgatgaaaaaacccccaaaatcaactccaaatttaaggtcgaaaattcaaatttttgctgataagcataagcataagcgaaaagatgaggcctttacttttatgacgatttaacattgtatactactatcagtggaatgttgtgttttgaactttttatatattctagttttcagtataacacatgttcgatgttgtgtctgaaatcaatgtgttggttactttggcaggcatttctggtcactgtccgtaataagaagagagtaggctatacttatgagctgggcttaaaatttaaaggtaaacaacctttagttctggagttcacatcttcacatgagctatctcctgctgaaaattggcactcatgggagtattcttcaggtgaatggttaattaaggaagaaaacaagaaggtgaaaggctatctggacattccagaattttcatttggtgaacttgaagacttagaggtacattattgctttccataataatattagtagtattcttttcctgagcaacttcgaatgtgcccttttaaaacgatgaatctgaagatgatatcatctatggaaatgaacattttgcctatgttctgtcagagttcaaatggtaccttttgcttattcctttcaggtgcaaataagttttaccgacatcaaggacctctcgtccgacaacaaggcacaaatcagcaaggatttgaagtcgtttcttgcaccgatccgggagaaactgcgcaagtttgaagaagagctcaaggatagatagcaaagctgcaaacttggttggaagcatcacgtatcaaaagatgatggcttaatctatagccatttcacgtatcaaaagactgcttcagacgtttactgctaaaagtttgttccaatacttgctgcaatatgcaccgtgtttgtttcattgccgatacattcatacttgtgccactgttgaacttacaagaccaattgagcagaaattttctgaagctatattcctgtcagttctgtagtttgtattcaggtagccaggcccatgggccacaactcgaaacaggtttcggcccaatcggcttgtatatctgattcagtagcactgtggcaattcaccaatcagaactcagaaattcagaactgaacagtttgttttccatatgaaggagagttgcaaaggtccaaatacagcaatgaaaaaaagaagtataacaacgtagtatcggattggaaacaatctgatactacaaatttatgtataggcataaaggtctaatccagatctatactacaacttgtatactacaaatttagagacagagatgagctgaagtgaggtgagctcagcagcaatggcgagaggaagaaatggttggctcagagtggccaactcgtcgctttctccctctcggttgaagcagatgcaagttgaatgcggtagtatttgattctgttgcactgtgtgcgactgtgtcgcgctctgtccatgacgtcctgcagctccacttgcacgtgaaggaggacccatctccaaaagagaagggacccaggtagttttactgaatcactgccgatgtacttctaacattccagtaaaactttgaatcgttgccgatgtacttctaacatttaggcccgttcttttctttaactctgaatttaaacttcctcttttttattagcacgttttttttaactgttaagagatgtattttttttcaaaaaaagttttatataaaagttgtttaaaaaataaaataaatctattttttaaatttataatcattactacttaattaattatatgctgatgagttttctcattttgcgtacaactaaggccttgtttagtta

SEQ ID NO: 13845 - DNA, 2216 bp, Oryza sativa
atcgtagttttagaaaacatgaagcaaataacccatgagaaaaaatctggacaaaaactgaaaagaacatgtcctgatgataaactaccactaatcaagagacagttcatgcttagggttagggagtataaaatgtaggccaagacaagcaagaacacaacaaaagaagaggactgattgtgccaagagcagagagagagagagaggtaggaggaggagcacgaggaacgaggagaggataggaccccgacctaatccaaacaaaacaggacgacgcgagatctgatgaaaagtctcccgaccacaagccaatcaacgcaaccaagaacagaagcatgattgcccccaagctactagagtccagcaagaaccctacttggatcgaagccaatcactactagtagatctgcccgcaagcagccagcggttggccatggcgatacgctatccgagacgaagaagacgagacgagacgacgacacgaggtagtacaaaatgtatacagtggcgaagcagagcaaattgcatcgtcgccgtgaggcgcgatgagtccatgactcgatgaggaaattgcgggagatttgttggattcgccatggtaagcgagcacgtgaaggtgaagccccctccgcttcccgccgatccgccggggggaaggggaacggggagaccatcagactcgtctttgcttatgcttattcgataaaatttgaatttttaaaattatatgtagagttaattttgtggttttttaattataatttattttttagcctatacttttatatcattagcaatatgtatataaaagttttattcacaggttatttttcatttgtaaatattcggttcgcttttttcttcagtatgcgaaacgatggggctgcaagaaaccaggttaggttgttgcaggtttcatatttttctgttccaggattgcgtgaacgattttatatcatttataaatgcttttagaggattttaaattttaaccaacaatttcactaggcaggctccaatctcggcccgtagatatggatgggctgcgattttgttcgggccaaacaaggccaccatgacaattaagaaagttgagtagaagataagttgtagtttatatttctcttcaatttcttatatcttttaagattattaaggaaaataaggagtataccaatgtagccttttgttccaattatgaagtttggtcaagccagccagccggaagcattgcaccattgccttttttttaaccttggattgaaaacaatttggggcattttcgcaaaaactgaactagttttatgtaaaatttatgtgttctaaaataacccaatctcattccaattgacacactgatttgtttgtgttaatttttacgattttatttactgatgtataacatcataagtgagtatttcaacaaaattaagttatttctgatattactacctaactataatttcatagtcaggtttaagttttaaacttcatataaatagagaggtatatgtatataagcgtctgcttttatattgtactatacttcacaagaaaaataatttcatctatcgaaaaaaaaatcccttgaacatatatatttgcttaagagattaaagctcaagagccgattgggcaaggtcaaaattgaaaagaaatttaccagcggtcaaaattgaaaaaaaaagacgaaaaaataaaactagtaatcctagaaggtgacggtgtcgagcatcatgccgagcgtctgcacgatgttggcggacatggcgtccatggccttctcctccagcttccccttggcgtccaccttgcccgccctcaccacggcgagcctctccggcggcgtctcgtcctcctccctcacctgcgccccgtagcccacggcgaggtcccgcatcccgcgcaccgccgcctcgttgccggcgtcgtgcgcgccgaaccgccgcagcgcgaaaccgtcggaccacccgctccggctgaggcacgccagcatccgctcctccccctccttcatccggtagctgatggcgagcgagtagtagtgccgcccgaggccgtggacgagcgccaccgccgacggccgcgcgacggcgccgacgttcgacgtggtctgccgcgcctcgccgcccgcggcgccgccgagcaccatcgccatgtggtcgacgaggcggaacgcgtccatgaccaccttccccttgacgctctgcaccggg

SEQ ID NO: 13846 - DNA, 1701 bp, Oryza sativa
tgcgatggtattctcttgcggaggacagatcgactttgcagccttcaacttggcagtatgagctttgtgtgctctgctgagacaccttcatcttcttgaccacagtagatggacaagtcacacctgaagctgcagaggagctcttgacattctgccctccacaaacattttcaaagtaagttctcttccctaacttgagtcctattaccggctcaccatggctaactgccacagctggagaagtgcccgagtcttcaactctaccggcctcgccatccttgcacatgttcttgccatgccctttgacagaagcaaacctgaactctaagctgttccccagcttggatgaggaatcgaacgacgctgacaaggagctcttcgatgaaccattggctagctccgagctagaagtgaacgtgccaccggatgaattggtggatccatgatttgcggccgcgacaactacacctcttggttcagggtgaggtatgctcttgggattttccattgtattcggaccgaaaggcgctggattttcccagtcccaaaacacagggctcttctgattccagttcatcccaaaagaagccatggctgaattaaggatctcaactgctgctgctcacacttgtatatattgcaaatctgataggatttcaagaaacaagaaggaacagaaagaacacacgtcacaacaaattgcagaacttggatgagaaaggcaataaacatatctcgggtaccaaaatcattttgtctttcagataaaaagacaagtacaacataccatccaaaatgaattatacgcgctttattgtggggatcatagcaagagaagaaaggcgaaaacgatcaattacctcaactttcctttctcccagaaaagaaacacagtggatccttcctctccctgcaaatcttgccctcaatcagcatgaccatgcatagcacaaccttgagcataaatcaaaccgatccgaggaggtgatgaataacaagtagcagcgttgaaagttgaaaccaattggctggcagaactaaagcaacagagactccattgttgttcttggctgagttctcactcacctcgacttgagagagatcctatcccacttgtttccccgacctaaaagacgacagcatcaaccccatcaaggctggcccccattcatcaccacaaccacccgctatttaaaccctttccaatctatcaccacaacaactaccccaagtcaatcagagctgcattatttgctccttgttaccgcacatgaaccagttgcttgttggggagcataaataaaccaaaccatatatgaaataaaaagcaaagaaactattttgaaggaagtaaaagaaagaacaataatacttgatgtgaaaccaagaatctcacctcctttagctgagagagaatcgttatccccgttgtattctacctggatgaaaacaatagccataagttttgtggcaaaagaagataggagaaagaaaagaaaaaacacaagaaaaagcaaaagcaccaagataaagaggacatgactcacaaagtatccaacacacacaagatggcaacctttccctcctaactagtatctcccaaaacctttcctgtgagcctgagagcctgagactgaacagtaacaagaggaggaggcagcaacaagaggagagtgaggcccagtggatggctgcctcctc

SEQ ID NO: 13847 - DNA, 957 bp, Oryza sativa
aaaaaatcaacaagatagattaatatgtgataaatcatttcataaacatgtaagattaaatttaacttctacaagttaaaaaaaaccaaattggatttataatatacattaactagctatagtttaatttgtcttttttatttgtaaaaattgaattttaatttgcatgtttgtagagtgatctatcacatattaatatatgtagttgattattttttcaatttcttacataactactaggataacatgcagatgagaatttaggatccactcctgttcatttgctctgcctacgactattcgttatttctttctgaacgttttgttcctgagctaacaatcacataggccatgtttggataatgggtttggaatatgatttcttacccctcaaaggataagtttcaatcatagccatccattcttctcactccatttcatcttatccctccatcatttctatttcccaatcccacctctcctaacccattatccaaacacacccatatattatcaaactctgttcaccaatcgaggtagtacaagcaacaggttagctggagtgtagtactaatacagatgcgctaggccgcggcgctgtagggcgagaggtgggcgtaggcatccccaacctcggtccggtagtgcttccccatgccgaggtgggtcatgaggaggcagacgaaggtgatgagctcgccgccgtccttgagccgctccgcgtgctggtaccctccgcagtgcaccgccgcgtagcccagcatctccacccacacctcgcacaccaccctccacctcctccccgggtcggccatgctctgcctcagctccctcgccaggaagcacccatcccacagcaccgacttgcacttgtcccccttcaccaccgccgcgtgcagcggcgtgtccacgtccaggagcaccctgtgcgcgttgtcctcgcccaccgcccgccgc

SEQ ID NO: 13848 - DNA, 2422 bp, Oryza sativa
gaataggcagaaaatgtaaaaattctcataatagcaaggtaaaagaatttaaaaggcagattgactaggaagattttggcctacaagaaagtctaacttcacttcacacgcaaaagcttgccttaaagagtgcacataagaagtttaaatgccaacctcatgcaaatctccttgcacacatatagtagagcattgaattgatttcagaatattatttcagtattcctaagcaaaagcaccatatagaagcagtaccagaagcttctatcaggcatattgaagctgactactattttgctcacacttcacaatcattatactacataatacatcttgtcaggtagtttctaatcaatatcaaacaatttagtgtcattatgacctctcataatttctgatttcaaagctatggtccaggttagcattggtttcctgaggatatctagtccctagttcccagattctgactagtggagttctatcctaaaaccgtaagtgcatcgcatcaattgctgttccttgtcttcctttttttctaatggcacagtagaacaatagcttcaaatgctgcattatccgattcaggcctaagttcaggggtgaattatttcagaaacaaatgtagataaatgctgactcgtcccaaatgctgtgaatttccccagatatgaaaactagtagctagttaatgaatccattggaaagcattagattatggccaaaacactataacaagcactaaatattatcatgaatattcgacctaaaagccagagtgtaccaacagctgtactaaaaaaaagggatatggctcacttgtatctttatctgataatagaagaaatgaaactaggcagcaacagcaacatgccagcagctgcaataggtaatgacaacctactggactaatagatggatttgaaccatcaaaacaggctcattttcacttctcaggagcaagaagtacatcacattcatcaatatcatacgtcatggtggaaccgctgcttataacatttcttttggaacaattaataaatgaaatattatgtgaacaggaagtaaacaagaataaaaatggaaacaatggtatgagccttacctgaaaaaggaaatattgacagtggtcattagaaagaggttgagatgatttaattatctggtgtagatctgtgtccatgagttcataaaccaagtatacatctttgaaactccttctgtgtactggcatcattatatctttcaaggcaataacattttcatggcgcaagtgtcgcagtagtttcagctcccttagggtcctcagtgcatccacacggttgtcaaagacattgttgatcttctttattgcaactttttcgttggttgcacggtttatagaggagcaaactattccataagcccctcttccgatgggcttgattggcacatacttggtgtcaatctcaaatagcgtttgccacattgtgtagtaatgcttcccttggtttcccatgccattaggagggtccaccatcatcgccatcttgtactaaggaaaataaacatttagataactcagtagaagataatttgtcaaaatcaggaaggggagaaaatgcagattatatatattcttatcgaaaccgcataaaagagatggttctatgcttgctgtttacagccacatacttctatccttgcttcctagagcaagacaagatctcatggcatctgaaacacctaagggcacccacaatggttatctataagctctctacaagagatccatgtcagcatattttcctacttggaagagattaaatgaagagagagagcaaagctatctactaacatggagatagtctatagagaaaaacgaggcaatggattagagagctatagatacccatgtagacataccattgaagtggtttactattaatctagtctattgttgaggtgtacatgttttatagatagcaccttactttaccattgcgggtgctctaagagcagagtttgtaaataggaacaattcatcatttacattggatatgatcaaatctactttggatattgcagacaataactgtaatattcaatgctttcagacagtgacacctatgattcgtttccatatcaaatcccatcccaactatacttatgttctcctgttctattcccaagaacagaggaagtaataaaacaaagttaatcctctagccacatcagctgatttagaagtattaaattgttagcggtatgctcgtaatcctgcataatccttcccaattaacacgacaattatgaagtgtgtacataaccaagcctcactaattggagtatttcaagcaagttgcatgctgctaccttgaattccaatccaaccgaggaaagaaattccagagcagcaggtgaggggggtggtgtcattggtggc

SEQ ID NO: 13849 - DNA, 2425 bp, Oryza sativa
gcgtggtggtagcacacttcctcaatgaactaagggcgtaaggtaaaaccgtcgacagtaatatagcaaaattccgtttgtgaaatttagttttcccaatcccttctttctataaagtggccaaaagctcaaacctcgtgcttccacatcatcatcaaattgtgaatcgtttgatgaatacattagatcacttcttagacgttggatggaatgcagcatagagcccaacccattagtcaccgggtgagtctcttcgcctcatcagtgccaaatatagctcacatgaacacattggctcatttctatacacatctacatgtatccagcctgtcaatccgtataaaagagctttatggctgaacgccccttcagttgacatgtgctacttaaatatctacaaattttggatagggctgctaaaaagaatttctccaaaaaaaactatttgttttttcatgagatggtaactcctatctaataaattgatgttaactaagtccgcagcaatgcgcggagcatcctctagtatataagaatatactaagcgggccaggagtgtacaagaatactcctgggccaattcttgggccgacattctcaccaaagtggaccgtttggattatttggcccggccgctctccgacaattctttccccaattattccattctctctcctccatcttccggttgcctcgctatcctctccacctctcccaccaccacccaagcagccaaggcggaggaggggagccggccggcgacgcgcgcgccaccatcccagcgacgatgccgcagctgagcctgaccaccaacgtgcccgtcgacgccgtcgtcgccgccgacatcatcaaggactgctccaaggcgctcgccaggatcatcggcaagcccgaatccgtacgcgccccccacctgctcggcggaatgccgcggccgttctctgctctgctcctcctgccttccttctgctgatgccgcggcctccgtggctttttccttgtatggccccgcagtacgtcatggtgtcgatcagcgggtcggtgcccatgtcgttcgccgccagcgaggagccggcggcctacggcgagctcatgtccattggcggcatcggccccggcgtcaacggaaagctgagcgccgctctcgccgagatcctcgagaccaagctctccgtcagcaggtctaggttctacgtcaaatttgacgatgtcaaggttgcaatctttcttcagctcacttcttgtttccccatttttcctcttctaacttctccttccactcgagcttaagttctaatactgacacagtgatgactgatgacactgcttctagtcaatttttccttaatcccgttgcgactgcttgctgctgtggtctgaacaacattttgctccactgcattttaacttcatttttgttcttacagggattcaatttggggttcaatgggtcgacattctgaggccaagtccgtcaaaagttggattgctgcgtcgaatcaataaaattctaaggctaaatgttacatgtcatgtgtatcattccgttgcactttcgacatcatccatgaatgtgtttcgtttatgtgagagaccgaactttgcctgctttatttcaatcaaaaatagcatcgaagtctgtttgctgaaaactcagtccttaattgccgtactaaacaaaatgcagagttccaggtagttgagatagtctttaaaacaaacaaaggtagctgaggtgtcttagcagtttccagaatacatcagttgcaaactgcagggagctttataccagagtatcagtatagagtatactagacagtttggacaggaataccatgcaaactgcagatctactgctctttgaaaggaacacatgttaagctgcaaaccgccctaaaaccaagcatgtctcagcaagtcagcatagcaaatatatgtgtaaacgtggccacttgaaagttgacacttcatagtgtaatataagagcatctaacattacaagccttgataataccgaattctgcttcacgtactcatacaacacattagtccatatactacaagtagaggtccacaggaagaacaactccagaatgctgtcttattcgcacatatttacataagaggtcacctgggcgacatcgccatagcttaagcttgataggcgcgacaatcgcgaataagatttatacaaaaaaccaacatgtgaagatcttagtgtagcacgttgccttcacatgttcgttcttgcctgtcacatattcactcctgcaacaacctctgggtgatagtggagcatctcctgccacatcatctcccggatcatatccacgccaagattttcatcgatgtcgagatcgatgggcacttgagcaggagggtttgcgcttggatcatacagtggagacatgtaagggtgctccag

SEQ ID NO: 13850 - DNA, 2212 bp, Oryza sativa
caaggattatgagaagctgtaattgtataataattcagaaaatgacatagaagttaaaagttaggttaccagcttctctagattctcaccagttaatttctcaccggctacttctcaaaatcttaaagtggtgtttgaatgagaggggactaattttagtccctgtcatatgcgctcattaggagtattaacatagactaataataaaactaattacataataagagctaattcacgagatacattttttaagcctaattaatctataattagcacatattttctatagcatcacataggctaatcatagattaattaggttcaatagatccgtctcatgaaatagtctaggattataaatatattttatcattaatctacgtttaatacttccaattaatgtcctaaccttaaatataatagggactaattagtcacatgcatccgaatactacaacattaacgccgtgtttatttccaaagtttttctttaaacttctaacttttcaatcgcatcaaaactttcctacacacataaattttcaacttttccgtcacatcatttcaatttcaaccaaacttttaattttggtgtgaaactaaacacagcctaagatctctccctatcaatcgttatttttttctgaaagcctttccgtttttttttccccaaaagttactactcctcggccaacgatttctcagctccatcctacacgcgcgcagttaaaatatggagtagtaaaaaaaaccgaaaggagagaaaagaagagaagcgaggcccaggtgtcgatgcaagtgtcccctgacgccccaaccggagagcgtgaaaaagcctgcactgcactctcgcttctcgtccaatcaaatcaaatcacatcattttccgaccatatcctgtgagttgtcctccctccgtataaaaaaacaaacactggattttcgtatttaattttgattttccgtcttatatgaaatttttttataatttatatttttattattgtttgatgataaaacgtgattaatattttatgcgtgacttgtctttttaatttttttcatatttttttcaaataagacggacggtcaaacgttggacacggaaaccaggctttgtcttttttttttatgacggtgggagtacattcactcttcactgaatcatcagacggtcgatgcacctttgcccgcggcgagatcaacggatcttggccgtccgatatgtcctttgtgtttcgtgtacatgcatgtaccggcgaggctcacagtcacatgtcactggtagggacggaaacggtcaaaggttctatttggagagctttagattctgagaagcagatattcggtagccagtttctgagaacctggaaaagctttaaaacctaacttctccagtttctaacttcttacttcatttttcagcatctatagactattttggagcagtttctagcagaagcagtttttgggaaaagctgcagctaggagaagctcttccaaacagagccaaaatggtgggaaaattgttttggctcaaaccaaaccagatcttcatcttctgaaaatggaatggtaaacagtgaggatccatttggttcgtaggattagcaaaagattgtcataggatttaaatttatataggagtagaatttttcatatatgccccttttattcatttgaaaagaaagagaactttcaataggtaaacttttattggaaaaatatcaagaggcatgggctctttcctatgacactatttaaagggctcatgtcttatttccttttatttattcatacgggattgagaagtataccactctaattcctatgtttttcccattaagatttattttaattcatgcgaatcaaagagagccgagctaaagccaaaaatagaatcatacggaaaggaacgtatcaatatcaatcgaaaactggtaataaaaattgaactgtaaaatcacatactcaagttagtatttaacttagcataactatataatatcaccagataaatttaatcttgcactatgtaaattagaatgtgttcctcctttagctatcacttaggtcacagatttgattagggagttgacggcttctaactatggttcaaacagaaatatggagcatagatactatggtatttagaaatacggtaactattatatcataaaaatggcaatttcttcaataatatggtaaaata

SEQ ID NO: 13851 - DNA, 644 bp, Oryza sativa
tacatccgataaattttgtcaaaaaaaatatataacaaaactgttaacgaacaccttttgtggatcgatccgaacaactctgaactctgaagtgaaatccttttcgttttcgaatcggactcacactaaatctcctcatctttttatatcacgagctatcgtgcaatttatcgttgatcgatcgaatcgtggtgaagaaatctgcaacgaaaaccgatggacgccaacatgctgagcgcgatgatggccgccgtcggcggcgacaagccgcagccggacacgtcggagcagatcaacgtgtcccccctcgccctcctcaagatgctcaagcacgggcgagccggcgtgccgatggaggtgatggggctgatgctgggcgagttcgtcgacgagtacacggtgacggtcgccgacgtgttcgccatgccgcagagcggcaccggcgtgagcgtggaggcggtggaccacgcgttccagagcgagatgctggagatgctccggcagacggggcggccggagatggtggtggggtggtaccactcccaccccggcttcggctgctggctctccggcccgacatggccacgcagcagagcttacgagcagctgcacccgcgcgccgtcgccgtggtgatcggcccggt

SEQ ID NO: 13852 - DNA, 5270 bp, Oryza sativa
cacgacccggccccgccactaccgcgcgcatgcttccaagagatggaggcagagctcctcctccttctgccgtgccgctctctctccctctttcttttcccaaggtggcaagaggcaagcctcctttctctccttctttcctcctttttctccctcgccggcgtcatgccctctgccgccattttggccgcgagcgccggagcgccagctcactctttgacaacccaaggtcggtttccgaaccgacattgccaccctataaacccaagcccctccccaaaccaatctccctcgttttcgtctctcgccattgccgcctcgctcatgtctgttcgccgccgcctctcgttgccacgcgtgccggaggagccggcgcgttcgtggacgcggaaggggactccgggcgctcgtcttcatcctcttccccggtccgaggccggagagatcactcccgtgccgtcggcctctcgtcactgcgcccttcaccgcacggtagtgcatcctcctcgttctccctcctcgctccctctcctccccttagctttaggtagtagcacgagtagacctcccgtaactagctggcgccgccccgaccgctgccaatgctcgctgtgtgctcgccgctgtcgccgcccgagctcgatagcgcctgcacgtcgccggcctctctcgtagtgtctccgtctaatccgacgctagaaacggactccggtggtcgcgtagatgctcaagtgcgaaggaatcgatctcccatcgcgccgtcgccgttttcccttctctcgccgccggttgccgccgccgcaatccgccgccgtcgagcctcctccggcgaatccgagccgttggctctctccctctcgtcctcccttgtcattccggtgtacaccctgtcgcccctcgtcgtcgcacggcgtcccggagaaaccgccgccgcccaccgtccattcgcggctggcgccttcgtctttccccagccggcacgcgtggcagccacgtcggtgccacctcggcacgaccgagtcggctgacccggtcagccgctccctccgttccaccctccccgtgcgcgtggtccatggtgagccgtgaggctgcgcgtgggcccgccgcgcaccgcgtccctcccccgaaccctagcgtgcgccgcgtgctccctccgcacggtgaaccgagccgccgacaagcgggtcccactcgggaccacgcgaggtggacccggtccactggcacaccggctccctctctccccgcgcgtacctttgggccgccttctcgggccggccggcccatcaaactcggccgagccgcccctttctctcggaccgcgccctagccgctcgagggaagtctatttcccctccctatttcgattctaattcaaaaaaggattttaataaatccttttcctttagaccaacaatccaataatcttagaaattcaatatcttctcaaccatatgtccgtttgactccgttcaactttcaaaattcctcaaatctcgagatctatttaatggcacgtttagaggtcaataatagggctttatttttcgccgtttgttgagttgtcccgtttcgcgtgtagtttcggagcccgaagacccggagtgcacggatttcgaggatcaagctcaagatctcgagcaaggcaagtcacctttgatcatcttgcacctataatttaaatctaagtatttcttctccgtaaataatacatggataggattaacacaagaaatttggccgcggcttgcgagatagcctactggccctaatccaagttgctgcaattaccctccttgaattattgaacacttaaaacctcctttgtcgactgttgtgcttcgatgcacgagccttcaggcacgcgcatcggaacacctcccctcaaatttaaaaatatccaactgtcggtgacatgggacagggagtatcatgactagaggcttgggcaggagcaatcacccacgaggcctgaccccctcgggggggtcgggcccgagggtgatgtggccgcccccctctttgtctccccgaggggtcggaccgctcccgtttcggcctcgagggttgaggcgccccgaccccttgtaggttttgcgccgcgtatataggttaggtgagcgcagcagggctcacctaaccgcatttattgcggtttggacgagcgcgtcacgccacatgtaacgcagtgcagcgcgctcgtttatccggtctgtgaccagtcacagaccgatcagatcgtgggttaggtggcgacaggcggtctgacacacgcctcgccccatcccgtcaggatgagagcctccaagcactcgtccctagccgaagccggcgtgttacctccgtccccgccgccccgaggcagcggatgatcacatgcgacgaggtcccggtcaaggagattgccctgggcgacggcccgtccaagaccacacggatcggtggtcttctggacggcaaataggaagacgcgctcgtctccttcctgcgggcaaacgctgacgtcttcgcatggagaccggcggatatgcccggggtccccagggaggtgattgagcaccgtctcgccgtgcggccgggcgcaaggccggtccggcagaaagtgcggcggcaggccccggaacgtcaagccttcatccgcgaggaggtagcgcgacttctggaggccggattcatccgcgaggtcatccatccggagtggctggcgaacccggtggtcgttcccaaggcgaatggcaagcttaggatgtgcatcgactacaccgaccttaacaaggcatgtcctaaggacccttaccccctgcctcgcatagatcagattgtcgactccaccgcggggtgcgaccttttgtgttttctagatgcatactctggttaccatcagattcgcatggctagggaggatgaggaaaaaactgcattcattacccccataggaacctattgttatacgacaatgcccttcgggttaaagaatgcaggtcctacttttcaacgtactactcgaatttctttgggtagccaaataggacgtaatgttgaggcttatgtcgatgacttggttgtgaaaacgcgcaaccaagagaccttactctcggatctagcggaaacttttgaaagtctccgctccgcccgcataaagctgaaccccgataagtgcgtgttcggtgtacctgcgggcaaacttctcgggttcttggtctctgcccgaggcatcgaggccaaccccgagaagatacgagctatagagcggatgcgcccacccagcaaacttagggatgtgcaatacgtcaccggttgcatggccgccctaagtcggttcatatcgaggctgggagggaaggcgctacccttatttaagctccttaaacgctccgggccgtttacttggacggaggaagctgaacgtgccctcactcagttgaaggcgtatctcagctctcccccggttctggtcgccccggagccagatgagcccttgctactctacttagcggcgaccccgcaagtagttagtgcagcgttggttgtggagcgcgatgaggacaatcctcattccgcacatccccaccctgtgctagcttggcccgggagagagcagggaggagaggccctcgagccgaacggtggcccaaggcccccgacgaccggaactggccctctgcccgcttgtcagacggtgccaggtgcccccgacccccaggatggcccggcggccactgcgggaaggccgcacctgtcgccctctgaccccgaggctaaccctgtgccgactcgacccgggagagagtagggagaagaggcccccaagccgaacggtggcctaaggcccctgacgaccggagttggccctttgcccgcttgtccgacgacgccaggagcccccgacccccaggacggccccgaggccactgtgggaaggccgcccctgtcgtcctccgaccccgaggtcgtcggcacagaagacgagtgcgccccgcgaggccgcttggaagaagagcgacccagagatgcggcccctagcgaagaggatcggccccaccgaaaggtgcagcggcccgtctactttgttagtgaggccctccgggacgccaagacccgataccctcaggcccagaagatgctttacgctattctgatggcttcgaggaaactgcgccattatttccaggcgcatcgggtcacggtggttacgtcttaccccctcggccaaatcttgcataatcgagagggtactggacgggtggtgaaatgggcaatcgaactttcagagttcgatttgcactttgaaccacgccacgctatcaagagccaggccctcgccgactttgtggcagagtggaccccagctcccgagcccgtctccattcccgaggccaactcgagcccctcgcagctgcctcacaccgcttactgggtgatgcagtttgacggctccctgtctcttcagggcgccggtgcgggggtcacgttgacctcgccgagcggagacgtcctcagatacctggttcgccttgactttcgggcgaccaataatatggcagagtacgagggactccttgcgagactcagggtggcagctggactggggatccgccgcctcctggtattaggcgactcccagctggtcgttaaccaggtctgtaaggagtaccggtgctctgacccgcagatggacgcttacgtgcgccaagtacggcgtatggagcgccatttcgacgggatagagcttcggcacgtgcccagacgggataacacgattgccgacgaactctcacggctcgcttcctcgcgagcccagaccctaccgggcgcctttgaagaaaggcttgcccagccgtcggcgcgacccgaccccttaggggagacggacgcgcctgaccggcccccgaggcccgtcggagtccaggcctcgggacccgaggggagcgctcccagctcccttagattgattgcttggatcgctgagatccaagcatacctcacagataagactctacccgaggatcgcgaagggagtgaacgcgtccagcgcatctccaaacgctacgtgctggtagaagggaccctctatcggcgcgcggctaacggaatcctcctgaagtgcattcctcgggaacaaggcgtcgagcttcttgccgatatccatgaaggcgaatgcggagcccactccgcctcgcgcaccttggttggcaaagcctttcgtcaaggtttctattggccgacagctctcaatgatgcggtcgacctggtccggcgatgcagag

SEQ ID NO: 13853 - DNA, 1041 bp, Oryza sativa
cacgcaccggctccttcggcacacgtgacggcggcggtcggcgatcagcgagacagaggggacggcaatggcgtggtggagcgagggcgaatgggagaggaaaggaaagggggggaaacttgggtttatatgggcgacaatgtcggtttgggagaggggaaccgactttggacggtcaagccagcgagctggcgctccggctagcagccaatcggcgacagggaggaggggaatgacgccggcggaggaagggaaaaaggaaaaagggaggaagaaagggggcttgcctccttgccgctttggggaaaaggaggaggaagagagggcgacgcggcagagggggggagctctgcctccgtcccttggaggcacgcgcggggagaggcggggccgagtcgatgacgacggcgatgacggcggggcggtttggagtggagcggcgacacgggcagcagacgctgggcaggcgcggcaggcgctgacggcggcggcgactggccggtcggccaccacggcgcgcgcgcgcgggcggcgcggcgatttgggcggcatcggcgggaacagccgcgagagtggagagggagagctcgacgcggctcacgggcagagcggggagagagagagagaaagagagagagagagccggggagggagggggagatgggccgagaggagttcggcccatcgaactcgagggaggctaaatagacttttgcggagggatttgatttgggaaggatttggattcgggattgaactcggcaatagatcggggatttgagatctgagacggcatggacactagagaacaagcaaagaaacggatttcgcaaatagggtttttaagagatagttttcccgctaggcgccacgacggaacgggcgctacatcaaaggaacatctaaatcttctataagtagggtttaccttatcggaggaggggtaaccataccccgatggtaagcctatttacatcgcaacaagaagtgttaaaaagaaaaaaagaatatcaaaatatatttgttattattatattttta

SEQ ID NO: 13854 - DNA, 743 bp, Oryza sativa
ggactgcacctgggacttgaggaacttgacgtagtggatggcctcgtcgagcatgaagcggtgtccatcttggtgcggcccgggacgagccgctgcaggatgcggatgcgctcgctgatgcgctcccgccgcagccgcgccgccacgctctgcgggtccttggagatgcgcacgttgcgccgcttcggcggccgcacggcctccgggtcgatctccaccggctgcagcgccgcgatgtggaagatcatctcccgcatcgcctccgacgaggacgacgacgacgagccctgcggcgcgccggagtcggagcccggtgacgacatcgcgaagtccagctggtgcacgcccgcaccggcgccgtacgttgccggcatggagttatactgatcctggtaaccgccaccggcggtggtggtggtgaccgacatctgcggcggtggtgagaactggggagaaggggtccccatgggtgataccggcggcgacgtcggcgccgccatgaacagcgactggtcactgagcgcagtgagctgctccagctgaagcatcgtgctcatcaggtcaagctgcgattccgggtaggaattgaacaagtcgaagtccatcacttagctaggatatatatcgatcaagcaactagctagctagccaggtattgatgagctagacacacggagcttagtggaaagagcttgagattgagcttgagcttgagctagctagcaggagtagtagctgtttca

SEQ ID NO: 13855 - DNA, 13702 bp, Oryza sativa
cattacaggttggtgacaaggtcccggcgaggcgtggtccatcgatagcaaaggaagtggccaccagcaacgagctttggcgtggggtgtgaacggcggagaacgcggccgccagcgacgatctccgacgtggacggcgcaggaagcgagcgccgccgcagacgtatctgtgcccggctcctgatactaagtagggatcacctgatatctagtaggtatcactctgatattgacgagtatcaggtggtacttcataggtatcacacataatgatacttggggtatcatgtatgaaaccttcaggtatcacacaagatgatatatacctagcaagggatcatacgtaaaaccttaaggtttcatgataccgagaaggatcatgatacctcctaggtatcacatgattctactaaggtatcatccatgaaacccgcaggcatcatgatagcagccatgatactcagtgtcttgatggtgttactcttattcacagatttttcctgcctatcgcctcgatccttagacttcgccttctcagcatgttgtcctcccattggcatcaagttcattgatgcaagcttttctaccaaatcttgaattgttttgattgcaagatcatatccttacaaaacacgattcagaggatgtttcacgggaagcagaggagtcgacggacggcgaggtgccgctggaaggaagcgaggaattgagcgcggaggcgcgcgattacgaggaggtttcaccaggatgctcgcgccggtggaaggaagcgaggaatcgcgcgattcctagaaggattcgccatgatctggagaagccgacggatggtgcgcgcgccggcgggaggaagcgaggaatcgggaagccggcgtttggcgagcgttggtcgtcgttctcgtttttgagcgctggttttgctacaatgcgcgcaagtggtgggtgacagttgctcagagcaatgccttatcgatatcagaatcgtccctttttgaacagcattccggtaagtagcatccccttttctactactacttaaaaaataagaggtgcttccatcgtccgtcaaaaaaaccgggtgaaaaaaaaccggaacgaatccgattcatcaacgcggtaaaagaatatgtccgattccacaaaaatagaaatcaaactcccatctgttttcgtttgagctgattagaactttgtttctgtttgggcgaataggacttggtttgaattataccaagtcctattcggttagcatcaccaggagaacaagtgcatatatacatacatagtataaaaaacatagcacataacaaagaatcacatgcagccttatagcactttgcgaaaaaacaaaaaattagatcgaagggggtcgccgtcagcacacatatatccaaataaaaacaaaaaattagatcgaagggggtcgccgccgctgccgccgtcgccgtcgccgtcgttgccgaaccgccgccgtcgccgtcgctgtggatccggtggaggggagagcaccgccgccgccgcctcccctcccgctagatccgccggcggcggcggcagagggcactctccggtggtgggggagagcgccgccgccaccgtcggtggtgggggaggactccaccgccgccgccgctcgcgggaggaggggcgccgtcgccgccgctcgcggggcgcctccccacccgctagatccgccgccggtggtgggggagggtgctgccgccgccgctcgcgggaggaggggcgccatcgccgtcgccgccgctcgcggggcgcctcccctcccgctagatccgccgccggtggtgggggaggatgccgccgacgccgccgtgggtggtgggggtgccgccgccgccgccatcggtggtgggggaggggcgccgtcgtcgccgccgccgctcgggggcgcggaggagagggtggcgaagtgagatgggagggagggaaatgggctagggttccgcggctgagagggagtgggttttgtttccccactattgacgctcggccgtccgatcaaaaccctagagatcggacggccggtgtcgtccgggccgaaatcggcccaagagggatcgagagtgaggcctcttttccgacccaagcccaggttgcggcctgggggaggaaaagtgcgcccgcgcatgcgcaaaaggccgtgggccgaccggcataggtcggaaataagtctattgttggtccctcgagccgaaaaaaagagaataagtacatttttagtgctcattttttcagaagcattacaattatagttctattgaatatgtttatttcgaagcaaacctataagaaagtattttctttctttttccaattaaataattgttaaatgatgtttgtattaataaaattagcaattaagctctgaaaattccaataaaattccaaagagcgtaactaattatggagaatttaataaaattaaatttaaccatgtcattttatttaaccatggagaatggagaattttacttgtaaatttatttaattatacacatacctacttaaaaataccaaatatttcagcgaatttgtattttaattaattgcatatttttctgatctgtaaacttcccggtgcaacgcacgggcacttttgctaaaccaaacaacacttttggtcaatatacacactctgtaatcacccggtgcaacgcacgggcacttttgctagtttttattagaagtggaaacccctgattaagtcgtatgtgatggtttgctgtgctttgtacggaccacttacaatactactacttccgtactaaaataaactaatctcgtactaagatgtgataacgaatctaatagaacgttgtattaagacgtgtcacattttaatacgaggttgacttattttgaaagtgcgggagttttggagtagtatggaacgacgacttggatacactgtgtgccagactggcatatttattccgatagggaagtgtaaaaacctcttattatcgcaagatacacgtacgtattgctgcatatatacggtccctcgcggcctcatgtcgtggtatttgtctgcaccacacaaccgcgctctaattgcttcgatttgggagtaagctttaccaggagcaggcgatggattccagcagcgccgagatcctcatcgacctcggtggcttccggctatacaaagatggccacgccgaccgtgccggcggcatggagagtgtgcctgccggctacgacgacgagaccggcgtcacgtccaaggacgtcgtcatcgacgctgtcaccggcgtgtccgcgcgcctctacctaccaccgtgcatccagccagctaccgacgacgacggtaagaagctcccgatcctcctcttcttccatgctggctacttcgtcgtcgggtcagcgagctggcctcctgtccaccgctacaccaactctgtcgtcgcaagcgcccgcgtcgtcgccgtcgccgtcaactaccgcctcgcgcccgagcacctgctcccgacagcctacgacgactcatgggcggcgctcagctgggcggtgtccggcgccgacccttggttgtccgcgcacggtgacaccggccgagtcttcttgtccggcgccagcgccggcgggaacatagcccacaacatgaccatcgccgtgggcgtgcgcggcctggacgccgtcgtaccggcgccacgcatagagggcacgatcttgctccacccttccttctgcggcgagacgaggatggaggttgagccggaggagttctggggcggcgtcaagaagagatgggcggtcatcttccccggcgcgaacggcgggctggacgatccgcggatgaacccgatggccgccggcgcgccgagcctgacaaagctggcgtgcgagaggatgctggtctgctcggcggggttcgatccgaggaggacaagggatcgggcgtactacgacgcagtcaaggccagcgggtggggacgcgaggtggactggttcgagtcggagggtgagggccaccacttcttcgtcgacaagcccggcagccacgaggccagcaagctcatggaacgagtggctgctttcattgctggccattaaactgtgcttccagctggataatttgcctcgtgtttctaagagcaaggataacagtagagctcactatctactattagcacatcttaaagccaacacatataatagattagctataaggttggctataatttttcttttcctatctctatatctcacttatacatttattatttttgtcttggagcttgtgataagctagctcttgtatgagagccaatacctttgattttttgttacctctctactccatataagcttatagtaagcttatagctcactattatacttgctctaagatgtcaaaatggtgaatagtttatcccgaagtgagccttgcgatcactctgttctaaacgataatgatagaatccggtcgcccggacgggggaggaaaaatcgggcgctccccccgtcccccgtgcgcggtgcatgtcattggccccaccacagtttctgcccccacctacaacaaatcaatcacatattttgcatattttggaaagcctatgttaagggaatttgatttattttttttcaccaaaaatgtttcacctagtgtactcaaaatgttgcagtgaactgaaatattccattgcaacaaaaaaacccacatattttggaaaaccccctattaagggaatttgttttattttttttgttccaccgaaaaatgtttcatctagtgtacttataatacttcactctgtatggatcaaatgttgcagtgtactgaaacattctttcgctatttgctgaaacattgtttttatataaggtgaaacaacacccgatttaaacgagtgaaacattttcgatctacttagtgaaacaattccgatatacctggtggaacatcgtgcaacatttaaaaataattcaataataagctaaaaaacttttagtcggaatatatccatgtgtggtctgaaacattctttcgctatttgctaaaacattgtttttatataaggtgaaaaacacccgatttaaatgagcgaaacattttcgatttacttagtgaaacaattccaatatacctggtgaaacatcgtgcaacatttaaaaataattcaataataagcttaaaaaaaacttttagtcggaatatatccatgtgtggtcttgttttgaagatttaattgcaacgaatttaatggtgcaattggatcatgatttggataagtaatttaagagaaaaatcagtttaaattagttttgcacgtaaaccatgcgctgacgtcatgctgacatcagcgcccgatttttctccaaatcgatcaggcgcccgaaccgtagagtcgtcctgttctaaaagaaaaggactactccctctatactcgtaaaggaagtcgtttaggataatgtttaagtcaaacattgggaatataaatcataaataactctcaaattgttgagtttgaaaatgtaaaaattatatgaatagatttgtcttgaaaaatactttccaataaatatacatatattactttccgataaatatttttataggccatgtcactgttcaaaacattatactttccaataaatatacatatattactttccaataaatatttttataggccgtgtcactgttcagaacgttttctttactagtacctgctttccgtctggaagaaaacctgttcaggctgttcacagaagcgtttcacttatgcaaacaacgaactactacctccgtcttctccgtcttttaatagatgacgccattgattttttctcacatgtttaaccattcgttttatttaaaaattttatgcaaatgtataagatataaatcacacttaaagtgctataagtgataaaatatctcataacaaaataaattataattacgtaaattttttgaataagacgaataatcaaacatatgagaaaaagtcaacggcgtcctctatttaaaaaacggagggagtatgacgaacgtaatggtctacctttttccaaacaaacttttcaggctcgctatcaaaggcatcaccaaaggatactcttatcatttgacaacaatcaggaacttcccctaaataaccgcaaacatcagcatgtgtctaaagtttgaaaccaaccttgcaagtgcatgatgctatatgttagctgaatgattgaaatcagactgatgactatatatttccaccaagtaaatgtgctgctcagtcatttgaaaatggtcatatgtagcaataaaaagtgccactagtagtcatgtagaactgtaaagggtacatttccacaattatttgatacaattgctgactgctgagatgcccataaaactatcatttgacaacagtcaggaacttccctaagtaaaaactggagtgcccagaaatagttgaaagcgagctacatggcaagttagctttgtgtcatagagtacttggtactttcaaatgtagaagcatgcaagtactataatccagttcctctttccagtgggtgaaagtgagatcaccagattaagatcacacactacattcgaatccaaaactctaatgaagctggagccagtttaaaagatagtatggactacggacaacaggactatgatcatcttagataaagcaactatctacagtacatccctgaatttccctatcagcaggtttatgtccgcaagaattgaatgttggaatgtggttgtttttgttaatggttcattagaaatgaagttaaggctaaaaactagatttgcatacggtaaaacatggatccaaaatctatttaatcaatctcaattctcaaccaaatgtctgaagaatattggtaaaactaatatctgcaagcattccaatgagaatcatttgcaaatcaagcactcaagtagctcgacaaacatagaagcaaaagacaagaacaaacagaacaagtaggataagcatcacaagtagtcaatactcaacacaaaacagaaattacaaataagttctaatagtacggttcaagtgcaatgtctgtgaagatatccacagcactaactggcatcttagagatcatgacctatactatagggatcataaaaagaaaaggaaatagtggtgatcattcattgtataacagctataaatccttactcagccatccgctgtagcaaatggatcatgggaaggtcctacatcatttccaatggttctttgcactaagcgctgcaaatcagccatgaccttgtgctctcgcttcgacttctcctcataattaaacatagcaagcgccctcttatcctctgcactgtaaacctggttttccttccttatacggatagcattcatcctctggtgcctactcccactcatcacatagcccaaatcctcgaacttctgaatctcctctgcagatagaccaacctcaccacgtcgtgggatacgtttcccttgctgtacgtactgtgcaatagcatcaccttctccaggtctcagtgcaccaccatagctaatatgaccttctgcacgaggaagaggcattggcccaaccggcatctcattctccaaagcagccttcttttgggcctcgagcatttccttgaatttgattgcttctgggtcaatctctggctcatttgtctcatcgatttccttaacaccaaggtcggcatcggatggggcctgatcttccgaatcagactgcttgctcctcttcctccgtgagctccggctcttcttcttactgtccctcaaggggctagggcttgatcctgaagccgctgccaccgcctcctcctcagagcttccctcagaagctgtatcattgctcttcctcttcttcctcctggagctccttcccctcctcttagacttcttgtgcctccgcgatctcttcttcttcctcctatccatagagtcctcggaatcataagagccctccgaatcctcctcagccttgctgttgtcgtcaccctctgtatcagatgaatggtggcggcggcggtggcggctacgcttgctgctacggtgactacccttacgccctttcttcttcctccgggtatcatctgatttgctggaatcggacaagctatcagactcaccggagtcggattccgacgaacccttgctatcctcctcttcgctcttatccgaggaggccaccttctttggcgattcctttttctcctcctcctcctcctcctcgtcgctgtagccataatcctcatcctcaccttcgcggcgaggagggctgggcgtgatgttccagatgcaccgcttcatgctcttgcggagcttctctctcttgacgcggcggtactcgaagtaggtgagacccttgagctgctcgtcgtcgtcatcgtcggaggcggaccaggcgccggcccccgcgccgccgccgccgcgacggggcgcagggtggtctcggtcccgagcccactccctctccacgtcgcggccacggtcgcggtggtagggggaccactggcggcggcggtcgcggtaggggctaggggaccggtccctgcggctgcggtaggggctaggcgaccggtcgcggcggcggttgcggcgcggggagggcgaccgggacggggagcggcggcggcgaggggagggcgaggcggagaccctggagcggccggggaggtgcaccacggacgcgaggcggccctccgtgcgacccatggcggcggatcgccggcttaggtcggattggggatttggggaagctagagaatagagatcgggttggacgcgtcacgcgtgggggaagaagtgtggaggtgagggcttctcggaggcgaagtcggtttggaatttggatcggcggtatgtgtgcgttattgggcttgatggaccgaaagaaggcaaggggtagttatggaccttagcataggccgatagaggaggcagctagttcatatattgtaaacagctcattttaactccctcaattattggccgaatcttatccatgtttctcaatcgtgaaatcaggtatatgagtccctcatctattcaaaccgatttaatttgactcctctagtagtttagaggatgattttgtcctacgtggtgcctacccgtcaaattgattttgttattttttgactaatcaaattgattttgtcttcgtctaacgtggcatctatccggtattaatatcagctaaacaaattaattaatatagtaacacccacatgggatccacatgttataatgaccactttttcttctctctctctcccccctctgttggtctgcaggggcaacgatcgatgaaaaaggagcaagaggcagatgcaacctcatagacaggagaggcgtcgatggcgcagtgcagcggggtggaggcctagggcaaggacgacgagtgggagagttctaacttagtggaggtggcgctcggaaacaagttcgcgttgactcctagcgttctcgagcaatcaaatccgcgacagccggccatgccatcgcagctgctgcgcgcaccatatctgcacgagatggcactagcctacgaaggggagtatgcggctaccaagctaggttataaccctgaaggaggcaatttgatccggttttaatatttgggtaaaattatatatctgattttatagttgaggaatgaggatgcagaacaaactcagctgacagttgaagaagtcaaaatgaactttttctcatatgtttgatggctgaagttgggctgaaatgtgtgtgaagcatgtatcgatctgtcagagtgattttgtgcgggtgggctttaaggagagaacacaatgtaatgatgggcctcgaacttggacatgcctgttttagcaatttcatttcaagaaacctattcggccgagggactcaacagaactggattatctaattatccagtagattaattgaatattgcatgtattactataaagccaaaaatataataaaaaagaaatataagaaatactattttttttagagaaatcacacattccaaagcgtggcatgaataatccaattaacaattgtctgcattaacttagtcaattgtaagatatttcggtttagtttatcggatgtgtgtttgtatgatagggtgtgaatgtttatgtttacatgggtgagtgtatgcatatgtacatgagctcacatataaaaaaacaaagaaggataagaatcattttgttccacaagctatcagttcttaaactgctcctaagttttacgtgttagagtttggagccacacaagagaaattcaaatcacatctactctgaacgctattccttcctcccctgagccaaacaaacattatagcgtgacgccgtggccaaaccgccaaagcacagaagtcaggatggccaggttagccgccgcccatagctagccgcgtctgccagacatgcccgtacaagtacgaccaccccgaagcccaaccgtcggtagtaccggtcactctgcgtactgcaccgcatcgcactgcagcttcccgcctgcatcacgcatgtttcggcaatgaatgccccgcacctaagttcccaacaaccggatcgagctcaaaacaacgttagtacgtagtacgccgcgacgcccggccctacgtacgtactctcctgcatgcgccggccgctgcagcaatgcgatgcaggctgccaccgcctgcgctgcaacccctcgttgcttgtctctcgtcgtcgtcggcttgctgtcgtcgtcgtcgcgggtacttacgtacggagcagggggggccggccggcggagacgcggagagcacttagccgccggccgccgcgcgcccaggccccaggctatagggatagagcgatcgagcgagcaaactagctagcttggccggcccatgcatgtggccctcttgcttggtcgggcagcaacactgcgcccgccccggcgcgagcccctgtagcccggcagaaaataaatttgtgtcccgaggcaggcacatccgggtacgctggtgcacaccacatgactgcgttcgcaacgtgaataaatcctgccctactcctagatgaattgcttcttcttttttttaagaagaagatgatctgcttcggtatctattagtacggccaagagcggattatatgtcaaatgacttattaccccttcagattgataatacttgttgtttcgaattagattttagttaaactttaaaaactttaactgtaaatatcatctaaaatatttgttatacaaatatggagaccatatgcatatattagtcttaaaaaagttttaataaaatcatatatttgttgatagttttatacatattgtaatacaaaatagtagtcaaagttattttttgaagatcatgtccttatctaaaacgataaatattattaacatggatggagtagctacttaaaaaaattaagaaaaaaatatatttatccttaacgacttaaaagctaattaatgttgaaaaagatactacttgaaaaattatctaaaattaaaatcgatattaaaattttaaatttaagttttggcagcgactgatatgatatagggcaaaccgataaggctatatatagtcttttccttctttactacatccagggattgtgttaattttctaggttagtggagttgcgtcggatttggttcatgcatgatgcatcattggtgatgaggaaatgatcagaaactggccggaatgatcctaaccagatcgtcatgatcgatatggttctgggaaaagaataatgttcacgatcgagatagtaacctgtggtgtggtcacctagcgcataagccgtgaagatgattggattatattcagatatgacgttgccagctggatttgagatatatgcatactgcttgtattactcccaacgtccacatgcagtacaaatacatgttcaaaacataatttctcattgactttaatgagatatccttcgaaagatatattatgtccgacaagaatgtttggtcgcgtcataaacacattgatgccttagatggtgtttggttggaggaactaaagtggggctaaactttggtccctctcacaaaagcataagtccctgagagggactaaatttagtctctagttcctaaacacccccttattttcttccctttttttaccgtggtgattaattagtagttatgagcattacatttgaccatgtcgctggtctgtcctacaggctacagagctacaggactaagacgtcatgctcccttgtgctcttctacaggtccatttccaagaggaagtggttaaggtgcatgcatcctgcccaacatatttctttcttggacgcagcagcatccaccagccttcctctcttaaaacacttcaaacgaagggttggtgcacaggcccaaatcagggccaggggcccccacaaaaatgatcatgaaagggcacttaaaaggggaggcattatttggatcagaaaactatatgtgcttaagctagccgatgtatacaattccccacatgttatccccctctcaatttctaaaccaccacatattccaaatcagacagccgtcgcgagcacaccaccagagcttgatttgacatgtttgttccttgtcgtgagtttctctctatgtccttctcctggccttgcttggaccaataacgattttattcgatcgtttcgtgtaaacataaactattaaactattgtacaatttctataaagaaaagtaatttgattttgagagaaaaatgatttgttttgtgacttaacggaatgaaaaatgcgcacacacacacggaacacccacgaatacatgatatgccccctaatacaatcttaaaaagatgaagaccagtgataaatatctgactttttcttaaaaaaacgaaattgtgtatgcgtaatatgaattttagatttttgttttgaagagattttagactctgtgttgctttaacggtaaacaacatccatgcatggaagattgctagataactcttttgaaagtctttatgtgccaaatctaaaaagaagatttattcattgtaccctcaacgacttaaaccagcccaatgtcagaaaaaaaaaagaaaaaaagaagaagtgcaccaacattaagaaacagagtccggacggatatgcaattatgcatataggtagggagacataatcagggtatgaggatatatgaaccaaaaagacataaagttacgtttccttttcaagagaaggacgggtttttcacggacgcgtgccgcagccccattggctggatgaattgtccggagaggactcgacaaattaaaggcaaagaaaatctaaacaattaacggaaaccataagaaaataaaaccagcgtccaaaagttcgaaccagcgaggaaggatcagccgcgggccggggacaccgagagcgaggtcacaatcagattcaggaggttcacggcctgttctaaacaaagacaagaaacaactgattagttacataattgcatgcgaaaccaaaaacataacatataactacttgagtattaattattactccctttttatattttaatgtatgacaccgttgatttttttaccaatgtttaactatttatcttatttaaaaatatatgttattattatttattttacagtgatttgatttatcattaagtgttgttttaaatattttttttatatttgtaaataagatgaatgttaaacattgataaaa

SEQ ID NO: 13856 - DNA, 1690 bp, Oryza sativa
tgcacttaaggactgattccttggaatttcatccgaacatataacaagtacgaccgcatgggtggaatgggacacccctggctgagtaattagctaatcaagggagccttgatgccgggagacaagtggattcgccagggtggtgtcggggaggacccctgggcttcctggcacagtatggtctgggacctaacctgttgttggtctgggacccctctcgtcgacatatggtaaacctgtgtcggctctcgaaatgccttgtcatgaaagcctcaaggtcaccagacatggctgttctgcacggactgggtgatccggattagtaatgtcgtgtgggtaaagtgtgccccctctgcagaggttattaaactgttcgaacagccgtgcccacggtcatgggcggatgtaaggtgattccttagcgtagttttgtttgactactgctttgtgaaatttctgttgtggaatgggatcgatgttgggaaaatctgcagctgatgggatcagctaggcccgggtggccgtttgaaagctgttggccgggtgccaaccttgcatcaatttaaagactgatacattgcacatactccgaccggacgagacacactgtctcatccgtgtcgtttgagaagcactcacttagttgtttcaaaaaggagtttaaataaaatcaattgcaaaaacaatagcctttcctttgaagcctgcattaaacacttaattcccatggcttgctgagtactcctgtactcacccttgctctatataaataatccccccccacttgctgaagaagatgatgtggatcccgccgacgaggagttcttccagaagcaagtcggctacgatgagttttaggatttcggcctagttcccaagtcgcgcctgtgatgattggtccaagtcttggcttctgctttcccttttgtaatgcagttgtgagctggggatctgtccgcagcccaacatgactgtactcctactctataataaagagacctctgttgctgtgatattctatcttcttgtgataccagcactgtttcctgggactggtatcgattaacaggttaatttggagcgtcacgggctagttccgttcggggctagttcggggcgtgacatctcttcctcctttttccaatctcaccaagtgaccggcggtgaggaggccgatgacgggctacagggagggtgccaaaagttgcgagtggagaggagaggagtggcgcgcggtgaccggtgggagagaggagcagcgattgacaagggagaggagcgacgcgcaacggtcggcgggagagagacgaaaaccgcgtggcggccggagggagaaaggagcggcgaccggcgggatagaagaacagtgtgcggcgtggaggggagagtggagcggtgtgcgacagtcggcaggagagaggagcggtgcatgttaccggtgagggaaaggagcaacgcacggcgggagagaggaatggcacgcattggccagtgggagagacaggaacgacacgtgacacgcgggcgatagagaagcggtgagaggagcgacttgcggtcacggtggccggagggagagaggagtggctcgtggcggccggcgggggagagaagaacggcgcgcggcgcagcggggagagatgagcggttcgcagcggccggcaggagagaggagcagctcaaggcggcg

SEQ ID NO: 13857 - DNA, 1959 bp, Oryza sativa
gacggccgcggctgccgcgctcgccgcggcggccggagccgcgcggctcctccgcgggcgcctgcggctccgccgctcctcgggatccgggtccgtgcagtggttcatcggtgacgaggacgacaagcctcagaagcgggacaaggggaaaggcggggcgcacggccgcgtcgtgcgcgagggcgtggagttctacagcaatggggactgctacgagggggagttccacaagggccgctgcaacggcagcggcgtctacaccttcttcggcaagggcaagtacgaaggggactgggtcgacggcaagtacgacggctacggcatcgagagctgggcgcgcggcagccgctaccgcggccagtaccgccagggcctccgccacggccacggcgtctaccgcttctacagcggcgactgctacgccggcgagtgggccggtggccagagccacggcatcggcgcgcagacctgctccgacggaagctcctacgtcggagagttcaagtgcggtgtcaaacacggcctcggcagctaccatttcaggtgagcgtctcgccaaatttcgtgctttattactccatcacagcaacacactgttccgtttcatgtcaactgttcgattggtacactaattactcctatttgttcacatcttaattatactcggtgagaaatttatgcatctgtatctaatttggaacgcgtgctactaaaatttctttcagaaatggtgatcggtatgctggggagtactttggggacaagatccatggatttggtgtctacagctttgccaatggccactgctacgaaggctcctggcatgaaggcaagaagcaaggatttgggatgtacacattccgcaacggcgacaagcgatcgggggactgggattcagggactctgaagaccccccttagtccaactgatccttctgttcagcgtgctgtacaggtatatatatacacattgatctaactatcagcttatgggttacaattgcaaattgcttgtggtgttctaatggttgcattgtacaattaggcagcgcaactagctgcggagaacgcgtttcacctgccgagagtagacgagcaggttcacaaggcggtcatggctgctaatagggcagccacggctgctcgggtagcggcgatcaaggcggtccagaacaggatggatgggaaattctgtgatacctatgtgtgagtgagtgtgtggtgaagaaaccatggctttccttccttctaactgtacattagggtagcgaaggacaataactaatcggttgaggttcagttcagacgaccggagcaagcacaaccgcttgccccgagtcagagagttcagcaaagaacgggagccgccgggagagcggagctgacaattttgtttcgcaaaacagctcagaatctgcaacatcgcaatcgcgattggcggccccccctttccccctttcttgcaagctgtaaattgtaaatagatccaggtgtatcaatgcaagagtgagctttttttcctcagtccctcttcttgccatttactgcatcttctatgttctttatttgcattacacatataatgtggttgcatctactactacaattccattgcctctccagtctaaatcttgaccgcttgaggttgtactcccatgtgcagtgattctccatttgcaaatggtacatggtactgcacatgggagactgtaaatttctttctggtcctgcaacttgtaactgtgattagtaggacccaaggtactattgtaatttgagcactctgtgttgcctatccattccctgcatctgtgcccactgcatttttttcaaaactcggggcgattcatagctttgggtccacttgctgctccagatttttgcaccagaaatatgaattctggtgacgaattatgcaagtgtcaagctggcacaatgcattgctgtgtgctgggactgg

SEQ ID NO: 13858 - DNA, 2990 bp, Oryza sativa
tagcatagcttttcagtcttttgtagaaggctggcgatgttggatactacgtcgacgactgacgaatgcgaactaaaaactgtatgcattttgtctgctttttagccttgacgctttggttagtttctggggtttctttttaccctctgaattcgaagcatgcgtatgtcgtttttcagcattggacggtccgctgttatagtacaagaaacaagttgttacattttgtattatgtttgttcctaaacgtttggcgccaataccgagctatcgtcaactcgtcatgagtttatttgcatcacctcgcactgactatcggatcttatactccctcattttcaaaatgtttaacaccattgactttttagcatatgtttaaccgttcgtcttattaaaaaaaattgtgaaatatgtaaaactatatatgtacatgaaagtaatttaacaatgaatcaaataatatgaaaagaataaataattacttaaattttttaaataagacgaatgatcaaacacgtacttaaaaagtcaatggtgtgaaatggagagagtacttcatgacaaagtacccgacactataccgtgaaattgtatctgccagtgcatccggatgtactgcaatttcctccctatttacatgcactctcacatgtgctcggcttgcatactcttgttctagtacagaaaactgcacattatgcttcgtatatgcgagatcgatcgatgcattgctgttcaattattctcgccaatatgtgcgaggagagaagacaagaaatacaattcctcagatacatttttggctagtcagagcatgtgcaacagtgcaagatgatgagaaatcgagggccaccaaagaaagaaatcaaagatgcatggtccattggtccatgactccatgggggttaaaaaggccacatgatttgtagcgcagggatgtacgtataaaaaggattacgctgcctttttctctccctctcgtatggttgaatctgaatgagtggtgcctgcaaaattcaggtatatgatgtggcccatcggtggccgggtactcgaatactcgatgcacatcgctgtttgtctctctctttctttctcatgttacagccatgtcgaagcaccgtttgtagagtccacgaaaaacgggaaaatgcagtgcggacagagcatgtcatctcattttcctcctgcccaaatcagttcggagactcattttcatctttgcccaaatcaggttagggacgtgacatgcttacccaataattgctgccaagtgccagccaataattaggtttgtatggtttaccagtagtatcacccatatgcctacgtttctagaacgggaggagaagaaggcctaaacaattcaccgatcgaggtcggcgcccccaaagtctactacacaaaagctgggagatgagacctcctataccgctatacagctactcaaaagctgggagtatattactaggaatcgtaaagtagtaacacgctgcatagtccaaagcggcgaattcgcccatggattcggctgccgccctgaaacgcccgcgcgccggcgccgcgatatgccgcccaattagccccatctaaccccaaccacccatgccgccatcggctgctgccgaaacgctcgatgtctcggtcgctgatacgtcgaacgtcgtcatacgtgcaggacggcgacacggcgtgcagcgcggcgcgggggcgtcgcggtacgcctcgcacgtctcgaaaggtggccgaggagtgtcccggatcgcggcatatatggggcgggcctgcctagcggctcgcaccgcacatgacgtgaaatcatcaccatcacgccgagtcgcgcggatgaccgggacggccggacggcccggatcggcgtacagctgctcaaggcccggggggatgagtggatgaccggttcggtttgtggctggtcgcgcggtttccttgggcatcaaggacctcccttccaattcaaaacagggtgctctttaaaatactactcctccataacaacgtaccaaaatactagtaccaaaacgtaccaaaacggaagctgtttaattgaccgtggaatggttctcccgtgaatgagcacccccgcgtttcttttgcttgaaggcaagcaacgacatggttcaagttcaacaatcctctgcatgattttctcgaagaacctgagcccgcccgtgcacgaacaaaccccaccgcgcgcgcgcggtaccagcaaaaccagttgttcccaaccctggtcgcgccctcgcgccgtgccgttcacgccgcccgctctctcgcgcgcgcgcacacacgtccaaaccgccatccaccctcgcgcgccaaaccggccgcaagccgccaattcgcccaatccacccatccgcttggccccgccgcggcgtctcgcgcgcccccggcccgtcccgtctactacgatctcgtccccggtcggtcccagccagccaggaaaaagcggccgccccgctcggcacgtgcccaaagctcgtacgcaccaccaccactcctgcaccccgcgacgccgcgcgacccctcccctccccgtctcagatccggaactcgtggctccccccacctccccccacccaccaaaacgctccaggatcggacggaccagccatacacctccgctccgcgaagcgcgaaacacccgccgggtcgcgttcgcgtcgcgtcacgtcgcgagtacccccgcgagacgcgcccccaataccctactactgctactgtaccaccggaaccgggcgcgagacgagacgagccacacaggtcggcgcggcgcgggggacgcacgcggagcttggtcacctcaccggcttccctctgtcctcctgcacggtagttataagaggcctctccgcctcacctcgcctcctctcctctcttctctccgctccacccactcctgctcttctgctctttgttcgatctgtgtgcgcggcggtctgggttggggggatttgaaacggagggga

SEQ ID NO: 13859 - DNA, 1883 bp, Oryza sativa
ttttttgtggcacataggtaagcaggaacttttttaatggcataagggtaaaagactctgattatgttggtcctatttcgtaactgatatgggattttgtcagttgacagtttagaaaaatagcagaacactttctagaagagatatttcagtattttttcacatagtcaacagtagaaagaatgagatgcctacacgcattgtcttcaaagaaacatatattgtacccattggaaaattgatcagttactgaccagcgaattagaaactataaaatcatgctcaatcaccttgagctctctattggagaactatgtctctgcttcctcttctttttaaggattaactgaaagtaaatataaactttgggctgcgaagatgacaagaacctctattttctgtaatgctttagttttgccctgaacaatgaacaaattagcacaatggagtatattgttaatgaaactcgataaagaaaataatcagcttatcccttgtagcaaggttgggttcaccatcctgattgtgcagcagtaagtgtaatcagatcattaacaggcattgttaattcaaaatcaatatctacccttaaatcttgaaatgttcctgagccacaaaatcataattagcttcaatttggatagcatatcaacgcatcagtgctgaagggtacatagttttaccttaaaactggagagggaatgaagttcataactatctcctacaacacacatttttatttagtggtaattcatggttcttttagttcataagttgactagttgataattattaggatttactgattcatgaaatacgaacacatgaatccataaaaaacattcctaattactacccactttggtcagaaacttgtggaactttaagtatcaaaatctttttcaatatttagattggaaaataaaaaaaacatatatgtagaatactagagttttcttggtaagtttcaaccaaaatactgtatttctgcgggactctataaatattttaaaatagaatcagttgttaaggttctgtgtgggaactgtgtcaatgtccaagacaatgtttttgtctaaccatgtaatgtatttatgatcacaattttgttacatattccttataccaatcctttaatttatggctaaatatttcctgctctaacaggaacttggagggacaaccaccatgatggaaagagagaaggcttccgttcaagagttaatgactgttgtgaatgaaatgatgcgaaacacagaatttgctattaggtcatatatgatgctgagaccaagatttatccgtccaggtgctggagcaaatggtggtggctcaaatccttctggtcctgctggagctcagtccaatcagccagtagcattggctccaaccattgatttctatagtggtatcccaaagcggccttcccattttatgcaacagactatcaacaggtttgagaaatatcttggagaatgctgcaagtggatcgcggagctagagcagcttgttcaaatggagaacaataaaaggcaatcagcctcattagaatctctaccgaaggttatgtcgaatgtgcatgattatttcatctatgttgcttctaaggtaaatctcctttttcatacacacactgcagttgaactgttaaaatgcatttattttgaggttctcccccatgatataaatcatttattatgtaatatagtcataaaaataaatgtaaatctgtaagtcaaccaaattttttttgtaacagctgtatctcgtgaaaaaaataagagagattgcttacttttaggcttgctgcactgccttggtgcgatacccagtattttctaatgtttgtattttttttaggtggaaaatcttcatcaatatgt

SEQ ID NO: 13860 - DNA, 5084 bp, Oryza sativa
agatctcagggtgagatggaggaaagtgggacccaatgacatgtgtctcactatttttattttctttgtttaactgacatttgggtcccgcatatttgtttaatcttttagttttcaattttttttccagatcaaactgccacgtgagcaccacatcaatgtcacatgagatgaagacctagttaaaagatccatgtaggcgccacatcagccaaaaccggggacaatactaccgagggacgttgtttgcatggttttataagttgagggatgagtggtatccggttttgcagtctagggatgtatttcgaactcggtgacaaattgagggatctagagtgaacttattccaatgaagaaccgcccaagcccagtgcgtcggccatctgaaagaatgaaggcccgtgtacgggacgacgggtccgatgccgcctccccaagcaaagcgaggcgaagacgagaggtcaaaaggccggcgtcccgtccacgggggtccacgtcgcatcgcaggcggtggggcccatggcgtcgtcgtcgccgccgtggctgctgctcccctccttcccctggcctcccccgccccctcccggctcctcctccggccgcggcggcggaggaggcggcggcggggaccccggcgactggaagccgaacgtcgtcgcggcgttcgccggcgcccaactcggccgcgccctccgccgtcgcctcgccggcctcctccgctcgccggtgctgcttcttacccctgcccgctgtttcactccgattttgggatgtagactcttgggtttccaccgttgcgatatccagcccatccgcagctattaaccgatttcagactcttggtgatatgctagttttattagctgtgatattatcatgatgtgttagtggtttgttaccgtagagcatttccactacttccgtttattaaatggatcgataaattgcgtgcttaatcacacaatttattctgaactgaattgcacgatgtgtaggaggcgcgacatcttggtgccttgccgagaataggtgacatttggtttgaaggatcagactcattcgccacacactcgattcttggagtgttggagaatgcgctctccgcaccatatgcttgcagctctgttttgttcaatggaaatggatcggacaggaggtacatcggtagggggaagttgccatccagaaggccaagtggaatcaattcgaagaagaggctttggactaatattcttcttgctgttaatattctgtaagtcattgctcaattcatgttattggttcctcctttgttgatagtaagcttccttctacatttgtggattaacattgttctactttcaccgaagggcttatgtcgctcagataactacacaaggacgattacttatatggggggctaaggttggtctgttggttttaattttcatttcattttattctgataacttttagtctaactcaattacaaaccatgattttagatcaacagtatgattgatagaggagaactctggcgtctggctacatcatctcttcttcatgcaaatcttgctcatcttgctgtatgtatttgtgtcagtttgtgtttataatctaagaaataacattgctaattttccttctgatcataataatgatgcagttcaactgtttttctttaaattcaattggacctatggtggaaatgcttactggtcctagaagatatcttgccgtgtatttcacttcggctctggcaggtattttgttattacctatgtttgagaacatatatatggtggtgataggtgaacattgcctgtcttcctttagttttgtcataatgaattcttcaaattttgccaggttcattaatgagttatcgctattgtgcgtctcctgcggttggtgcgtcaggggccatttttggattggtatggttacccttagcttttgatttcagtcatagaaataagtctaatcatattgttggcaacccaaaggaccataagagtttaaaactagtttcaagaaatccctggtatggtttcttatgtcacaccatttgcatgaactttatctgcacatgtccaggttggtgcctatgctgtttatacgtggaggcataggagatttttggggcatggaaaggaaagtttagagcatattggacgcgttgttatcttgaatatggtattgttctacttatctacctgactttgttcttgttaccagctttctatcgttttcattttagcacttcttttgtggttatcatctttaacaaattgcttaaactttgctgtgtaaatagggtatgggtctccttacaaggggcattgataactggggccatgtaagcctcctaatcttagttcaatgtatgaaatatttacgtaatgacctcacttgacacttgaataatggcagttgggaggcttgctcggaggcatggctatggcatggttcctcggtccagcttggcaatatcaatatgtgtcaaaggacggaagagcggtgttcaaagacaatgcccctattctccaactaagcaacgggaaatggttgaggtagaattttgtatttaaaacggattcctaacttgtgtgggacacagaaattgaagactgaagagaggtggggtttgacactgccattctgccaaggtgatggagtggacgcctagtttggactttggaaagctatttccagggaaactccagctccaaatcttacgcaagggcgacatttgagttcacctgagtcattatttttggatataagttgcaattgtctactgtgacagattatagctaatcaatactcaaatagtcaccacagcaattgtatttaacatgcttatcagtgttactggagcccaactggcacggtgtacatgaatccatatttctggagcccaactggcacggtgtacatgaatccatatttgatacagctaactataggctcaagtgtatcaatctatttatttttggggtgagatggtgtaagtatctgctttggatattgatgattgttatcactactcttttcttctgattttgtgcccaagatgtcacaagacgtaatgactcacgacaaacaacaatctgttcaggcagcacatatttagcaccagctaaatttcagaacttgtttacgggatggcctttgacttgtttccgcaggctatcagcacaacaaatggacaaacgacaaatgtcgcagaaagacgggtgtaaatgtatcgtattatgctcagtatatgatgatgttacaggaaacgaacagtcgtatcgcaagatacaacatcaattcgactatggtaagtcattacattctcctctaccataagcacccaacccttcggtgagaaacttgatatttggtagaggcgtagggcagtcaccttcgtgacataaaaaccctggtaaattagcataatacagacctatatctacagttatactccaactctgaagtgcgagaaaccaccatacagttagaagtaaccgataagcaaaacctgcctttttgcagtatgattgctcatgattgcattcataaacctgcctttgcagtacgatcgctcacgattgcaactccatgcttcaggagatttcaagaagcaaactttgcaaccacaaccaccttgtgcactggtaactctgtaggcaaacagtccagggcaccagccaagtctcacttcaggaatggagagctgcaaattttgacaatggatgtcaaatgaaatatttatgttcaatgaactgctgaagaatagcgaactaaaaaaaagagcaaagcggcacagatatataaagaaaacgtacataaactggtaccttttgtaagtattttaaaaggttgaattaaattattaggatggcatgacgttaatatacaaagaaatcaaaatgcccggttcacctaattcacctaacagcatattgattcacaggttagtaccacaccactagtacacctacctgattcattgtaaaattctagatgaagcgaaaaaaatatctcactctatcacttcaggaatataatgccaaactaacaaagtgtaatgtaaatttattattattactaagttggtagttgccatggaaatcaaacagtgcagttcattattgggttagtgtagtcaagtcgatcaatgctaaatcttattcaggagttaccatatcaaaccaaccattcaaaagtcttaatcatgaaatattgaagcaaataataaagtaaacacttcatagaatagggtacttacaatatggggaaggggcaattgaagggggggacttggtttttcgtcgcttcttccatggagccattgaaggtcgaaacacaggcaatgagggtgaaggtattgacatcatttgataagttggtccagggactgcaccaggtaaatgattgggaggatctacatgaccaggaattggtggaaaagctggagaaagatatggggaaggagcaacagatggctgcggggagtgtataaatggaggtagcttagggtctctgcgaaaacaaggtggtttgcctgttgggctaccagcggaagaaaagcggtcacaattgaaacatggaaagcaaggatttgtgtcaggcaaagggggtgaagcttgaggaggaagacttgggttcatatatgttggaggtgcagggtaatggatgctcccagatggtgagaaagatggtggtacacttgaagaagggaatggagatggagatggagatggggatggggatggagatggtgaaggagatggactcggagataaatctgagatcgaatgctgtaggtatgatgacagttgaacaccttttactttaccaaatacagagtgattaagcccaaggttccttgcattgggttctttgattagctgagctagttgtttcaatctatatggtaaaagaatgctgctcccatctagaacagatgcctcaatagttgccggggcatcaactgaagatccaatctcattcctgaactgcaaatatactttctgcacatatatgacagagggtgtaaattttaaacacaaacacatacaaatttgtaaccaatcaggaggaaattaaat

SEQ ID NO: 13861 - DNA, 17244 bp, Oryza sativa
  unsure (1)..(17244): unsure at all n locations
agcttcatggagtaggtgccgtgtgagcttcagataaatcatgcagatttcttcagattatgtgggaaaacaagactggttcggtccgctagctcacggttgaacgttgttcatgtcaagatgatgatgctgcaggtcagcttaattcataactgcttgtattgatctttttgcctaattttcagcttcttggtggtgcatttgttcagcttaattttgcagatcggggtgagtagttggggtggtgctggtgggtagtggatcatggaaccaggtaacacggactcgctttggtgagttaaataaatgaattggagattagtctgacctgcaagccaattggactagttatgcatttcaaatcttgagactttttgactgttgacatgtacagatggataaagagggggctgaatttgagctattctgttggtgtggtttgacatccaggcttccagatgaactggttgagtagccttaattccttgaagaggtgcttgcagactacattgaattctggagttggacaaagggaattttcaatccttccctattactagcactatattcaaaggagtagaatatactctctctctctctctcttttggcgaggaaaggagtgaaatatactgggaaccatgtaaacaaatgtgtatctttttttttgacataagcccttagttgtcagtttgtaattgcttttaagcagaggctatggacatgacatgagtaccagattagtagtttgagctaattttctttgcttaattatgatagctgtagaacagtaggagtacagtactaagtactgtagttaatataagcagcatcactccagcccgtacaaactcaagactcaagagggccaatcaggaggcctgatcattgcatcaggatgcggactcttgggaacggcacttgtcatgggagaaaaatatggtcttggagactgaaaccgtacgtacaatacaatactcacctgtgccattcttttatatgcaaggtcggcaaccaacgcttcaatcataatacaatttcggcagacaaggttagcatggtacaaccttgtccatatgcaaaccatgcagcgacagccaattttttttccaaaacgcaaatcttgtctactagtagtactgaactactgatagattttgatcaattcaccatttattaaagatttaatcagacgatgccaaaacaaagacagcgtgagttcaccgtaccggtctctttctgagacaaagaaaaatgaaagaaaaggataaaaaaatgagtaaaacatgcatggagccatggagggagggtgtgaagtgtgaactaggaaaaagattggcatcaagagaatatgggcacatttaagcgtgcactgcctcgtgtgaatgtgtgattgagccattgggtgagttggttcttttgtcgtgctacgtttctttgatctcatcatctttttttcctaactgttttagttgccccggtctgcaggatggtcaggtgaatggtgctagatgttaacagcagcttcagaattgcgtgcaccgttgaatgtaacaagtgatgtttgtttcacctgcagaaccagtggctcaaggaggattgcctgagcctgacgatttctgaatagcccctcatgtctctttcagaaatccaaaagaaaaaaaaaaacttctggtgagaagaaaaattacccgaaggatcgtgaattatctcagagatagcatgtgatgactagtagtccagactccagacatcacatgtcaatgcacatgacaccagagaaaacagttaggtaaaagaaagtgggttagtgaaatcacagattcacagtaacagtcgtacctccagcaaaactgtaatgatataattcatttttttgaccacttgcaggaagttagaggcatgaattttctgctgttataaatgctttgctttaatcactacagttttggtggattagtgaaatggtaggtatagaaaacaacttgagcaaataggggccgcagattgctacttaggctacaaaagtgtaatggcagcaaatcctgaaccatcatattcgcttgcacagccaaatacaaacgacaatagagatgaagtcactgacaggataacactatcgctagaacagtacatgcattttgaatgcaattctgatcaggcaaattattcaaaattcaatagccacatgtgattgctggcatcattttttcctgagctttgtcttcatcctctcaaccgcggctctcagcgtctcatcatccttgcaaaaggtgaacctcaccaagttcttcccatcctcagggttgagataaaatacactaggtggtatggcgacaacaccgacttcgcgaatcaaatactcgcagaactcaatatcattgtcgaaaccaaatggggtgtggtcgaccatgacgaagtatgttccacttgaaggatagacaatgaaacctgcatccttgagtccgttgactagcaatgccttcttagctccataatccctcctcagttcctcatagtagctatctggtgctctcagagctgcagctgcagctgcttgcattggtgtgcaggtcgcaaacgtgaggaatgagtgtgcctgccttacaccccatgtcaggtgtggcggtgcgattgcccaaccgatcttccatcctgtaagagagaatgtcttcccaagagagttcatggtcacggtcctctcatacatgccaggaatagaagccattgatatatgatctgcctcaaaagctaacttgtcgtagacctcatcagcaaaaagcagcacatcattttccttgcagagagtggcaataaactcaagttcttcccttgtaaacattttcccagtaggattgtgcggggtgtttatcataatagctctggtgttcttcgagactgcagcctttagctcttcaagagggactgaaaaatctggaggacggagagtaatggcttttacgttggcaccagccattgacagggtagcctcatatgaatcatagaatggagcaaacaatatcacttcatcgcctggattaattagacctaaaattgttgcagctatagcttctgtgcatccagatgtgacagtaacttccttctccggatcgacttgcagtccgctgtccttcaggaatctttcagcaatagctgagttcagttcaggcacaccatatcctcttgcgtactgattcttcccagcattgatagcttgaatagcagcctcttttacaaagtcagggccatcgaaattcggaaaaccctggccaaggtttattgctccatgcttgatggcaagcatactcatctgtgtgaaaatggtcgtcttaaacttttccaaccgctttgcaacctgcaatagagaggaatcaacataaacctcaagggtatgtattctttgactataattatactgattaaacaatgcatataataaattctgtgttactcaaaaccatacaacaatacgtacagacaattccctatttgtttggtatattaggactgaatttctaaaagaaaaatattcgattcttgtcaggcaggtttcaatgtattgggcactggacatgaaattgatatagtgtgttatacagtggatattggttgaccatagaaatcaccaagccaacatggaatctttatcttagattaacaaaaacatattatccaacctcaggatttgagtcactggtctaactactcttttgtgtataagttggtgagtatacctaggaccactgtctggcagctttagctcaaaacccttactcagaggtttgggataaaggattggtttcagattgaatctccttctcttcagctgtcccatgtcatagcactgcttgattcttatctcagtgcacctgtttttgtaatctcttttgaggtggtgaatcaaacacgttcacaaacatggcatggaaatatggttcaaatgttgttctcaaggcgggtttcctaaggctgcgaacccagaacaaaaaaaaaatcaggtgtccaatacatactaataagctaattattgagtaatattgtgattaaggtagcgtaacacagtgagaaatggccaagctacccggtgtccggtgcaccagggtagctgaacataggactgcccctgataaggcatcatactgtagtgctagtgtgccatatgcctttggtagaatctcacaggagttttcaccctaccttccaaaaaggaaaaaacaacaggctgacaaaaagttacaacgatagctctaacttcgaagtggattttaagagaaacatacatagttctcactggaataatagaatatggcatgtatagggaaatcaatgagctgatttagtcagatattcagatgagtaaaaggtagcacaagaatagccaggttattgaacaatgtgaatggattgtgaggactaacatgggacctcagtatacagcagaagtagatcatacaagcatatttggacagaagaaatgaggaatactgtagcaatggcatgtaatatgggtgcaaccatcaagaatttgatatcttgaagggaacatgccaccccaataaaaccattcagtcacaaccagctaaatcaaaacttaaaaaagtgtattacactattatgcctaaaccgtatccctttcttatgttaaattctgcaaaaataatccaaatcatgattcatgacctctttcaaaaaatagaaatatagggatggtgctaatcagctgcaattttttccacaggaatatacaaataattggaacattaaactatgtaaatttagtttaacacattcttttgactaatgaatgagagagaaactacactcaaccataatcaccaaggtgttcttgatgttgtaggtttctgcattttctttccccaacaaatgtaggagtacattgttttctttctagatttctgcaacatatttttttgagatcacaaggtcgatggctagacccatgttcatccacactcctggaatcatggaggctgcggataaattacgacctcacggagtgtgactacaaatctacaacagagtgttagtgtacgtttccccagggaactcttactgtaaccccagggcccagggtgctctgatgagaatacaacactaaatgtagtattatcaacacatacaaatgtaatactacaacacatattaatgagcaatgactacccttaagcagttatgcttactacgttagcaacaacaaaatctgtgataaatttctcccaatagttatgctaagtcctaaatctgcaggatacgcccgaggcaatgcatagcattagtaatcagttaatcaccgaacctaacttcaactatcatctcaactacaccgaggttatcctgatcaacacttccaggaagcactgccagccacaaagctacacatccaagagtacgcaagcgtaaccacacacgacactcccagtaaaatctcagccacagaaatctcagaaccacagagggagacagagagagagatagcaatcaagctaccagtgggggggggggggggatcgcgaattcacctgcacaggctgctgctgctgcttctccgccgccgccttggcggcgccgttctcggcggcgacggtggacgcggaggccatgggggagagcgccgcggccgccgccggcgaggccttccggagcgacgcgacgagcgagcggcggagcgaggagaggaggaaggaggcggaggaggagggatttaacggcatctcatgccgcgtcgcggtcgcggtcgcgggcgtggcgagaaagccggccagattcatgaggggggccgagcagcagcagcgggtcgagtcgcgccgccacgggtgggcgccggaggaggcgtcgcgaacttggcgagacacgcgagaccgcacgcgtggcgtgggtactagtacagagtcagtgacgagtgggccatggaaatcatggagcccgcatgtctgtgagttaaagggtggggtttcgcgtggaaagtgtgcgttcgaatatgcccggttttttggaagtgaggggagatggcactgcaaagtgtgtgtgtggcatcggcgtgcgtgttgtcatgtgccattgaacctggacatgtttttttagtggaccggagcgacttccggcccaatcaatttgctctcttcatgggccggaaagcccagaacaaatcgcctaaccaaaaaccctcacctaaacctccaccaccacaagccgctctcccaaccggcggcgactccggcgacccccgcgccgccggcgaccgcgaccatgcgccaccaggtaggccttctctcccgcctcctcctccggcgccacgtacaccgccgctccaagccggccaccgcgccacccccgcccccgcccccgaccccgccgcggccgccgcagaagcccgagccggtctccatccacggggagacgtggcacgacagctacgcgtggatgggcgccctctccgacgccgccgccatgcgccacatggacgtgcacatggaggccgaggagaagtacgccgaggcctgcctcgccgcggcgggcgccgaccgcctcgcgcggaagctccagctcgagatggcctcccgcctcgcctccgacgcctgcacgccgcccgtccgctggggaccctggctgtactaccgccgcgcggacgagggcaagcagtaccctgtgctctgccgccgctccgcggcgctacacagcgagttcatctcgtatagcgacccctctgccggattcgacttcaccgccgggaagcgcatcgagcagaaattggtggattacaacaaggaggccgagcggttcggaggtaaccaccgaaataaaattgggattgacataattccatttcgtcttaccccgtacataataatctgattactagcgctctaaagttagcagctgtttatttaagtttttttttcagtgaatctccttttttataagtatatgtaattcctctacttggctatttaccttgcaatggacaatacctaagcagcgtgttccacaatattttgctactgcaatttaattctgagaagtaattaattggttttccattgctatttttcattgaagttatagtatttattcagtttaccttcaaagagtagggttttttttttttagtaatttgtaagcttcgataacatgctatgcttgttagatattctttacctgcctattcttgttaccttctcatctttgatagttcaccctgcggactatgtaggcacttaaagtttagggccttgtaaagtttgaaagttgttactgcttagtattaactatttttggaagattataattgcataattcttctttagttgatgtgtcacatattgttgtttcctaaccatgaccacaatacttgattttgtcctgactttgaaatttctagtgctattatgttgtcatattactctactattctggtaccagcttatgacctacgagtgtaccaatatttacggttattaagcaccgagtgaaggctgggatattttaaaaaacaggttgctccccagcttttcaattgaaagttaaattaagaaggctgagatttttttttgggatatacaatcttttatgggagatcgtgtaagcatattttggtgcatcagcatcattccaatgttccaatttgcctgtatgggatgttttgcaaaatagatggagacctgtatggaagttttaaaatttggtttacatactcttttggaacacatcactgcataatggagatatgcaatactacagttttggaagtagacaattgttcaatctttttagtcctaaagtgggtgctcagagtcagttaatcattttttcttggttatgtagttctaaaaagctatatcctatgcttcatatgcaggatactcatacgaggaactgtctgaagtgtccccagatcaccggttcattgcatacactatgtatgataaagataaggattccttcactttaatggtcagggacctagtgacaggaactctttgtgataaacctcgtgctgaccgggtctcaaacatatcctgggctatggatgggaaagcactggtttacattgttacaaatgaggataggaggccatatcggttggtggatctgttctctttttgctatgcatttttctctttgctgcactcaactatatctttaaattttgtctgtgtaggctgttttgcagcattattggatccagcaaggatgatgttctcatgttggaagaacctgatgagaatatttatttaaatatcagacataccaaggattttcggttcataacgttaaatgttttttcagacactcactcaaaggcactttttcttgtgcactatacctgtaatattgttagttgttcttctcttcactttctcatgctcgattaaccttttccaggtatatttgataaatgcttctgatcccctgtccagaatgagattggtttgggaaggtgaatcccaagttcattgtattgttgaacaccatcatggacgcctatatttatttactgatgcttcaagagaaggcacccctgttgattctcattatctaatgctgtctgatgtggaatctcctgggccgaagagctggaaggtgtgaagtttgccatattaaattagtctactctgaatgcacacatcagctcaggattagttcgcattagtgactttgtttaatctatttgaaccattttaatgtttgcatcaggatgtttttcttgaagaaccaggcgttattcttgaagatgttgacttctgtgatactcacatggtgcttgttctgagacaaggcagaaagctgaagctctgttcagtaaagttacctttccctgaacacatcagagtaagtcaattgttgttccttatctatatacaattcaagctgagaaaatttactccttagttcttggtggaattctatacaccctcacagtctgctgctctggtgttcgatgataacattggaaatcttttctgcttatttaattaatgaaatccacagttattttgcctattggatgcttgatactgtttttatctttggatacttgttttccatgtatcaggtacctgctcgtctgtcagatttccatccatttgacttgtctcttccaaatcatgtgtgtcagattttacctggcccaaattacgattatcgttcctcaacaatgcgtttcacaatatcatcacctgtggtatggacatgtgttatttatttatctcatcctctctagttcacttatgcaccttttgtggcttttattcacaaagccataaaaagtcctgttgattagaaaatgctgagttgctttacttgcactttttgtgtgaataacatcctttcttctccaactttccaatctataagcgcatcccttcttttttgttgagatgacttcttatctacttccatggcttattacatttttttttctttgctatgttgctcaatcatttgcatgaatggtaatatgaattagctctggttattctggaatatgttcttgaagattctttttggttataaagcaacattatatgtggataatgttatgacagaggaaatttatccttgaaacataaattgtttggttcagcctagtgctttttccttacgcacttgtaacattctcaatatcccctctgttttttgtgcttccctctttatgtcagccttatcatgttacattttcaactgcattattgtgtttttatttggaatttagtgccatgcctttataggattgttaagtgataacagtttggtatttctcatgatgttacagcaatctgcttgcaatgtgcattattaggatatttagttgtgcttgcaatgatgtcatttttttttgtatcatagcactatattttattagacattggctgtggctcctttacttatcatgctctagagaactctaatgaattaggattatattcatgcttgttgatgcattcttttttggacaactttatgatcatgtcattttagatgcctgatgcagttgttgactacaacttaccgaatggtaagtggcgaatagtgcaacagcaaaacatgcttcatgaaagaacgaaagcactatatgggaatgcttttgctgctagtatggttaagccatcttcaaaaggaggtgatttgtcaagtgaggactttggagattgtgattggaatgaactctctgaatactatgcttgtgagtactatgatgttccatcaaaggatggagttttggttccacttacattagtatattcgcaaaagcacaagcaagagggaaatccagggttacttcatggacatggtgcttatggtgagattctggataagcgctggcgcagtgagttaaagagcctacttgatcgtggctgggtgattgcatttgctgatgtcaggtatgcctattatattttgttaaattgaacataaccatctcaacctcttgaaataactgacaaatgctagctcaaagctgtacaagtacgagaaattgtttatacatttgttgcatcaaggaatgtatcagcttttgtcttctgaattttgacgcacaaataattgtgtcaacataacagcacatcttttttcaggggtggtggaggttatgggaagaagtggcaccaagatggtgcacgtacaaaaaagatgaattctatatatgattttatctcttgtggtgagtttcttcttgagaagggtatcataaaaagaaaataacttgctggatggggatatagtgctgggagacttctggtggcttcagcattaatactcggcccgatttgtttcgtgctgtcgttttgaaggtatttatgattaactgattggcttgtgtagaaatcattagctgattttcaagattactttcttattttctagtctatggtgttattcatcaatgcacgtgggaactaggaaggattttcaagtcattttgtcattatatatgtttgccccaaatcaaaattgttctaaattttagaacattacaattggtttaaattgctgcagattggcatcacaaatagttcacatagtccacacatcacgaactcttcttttatgttgtttctttgtcattaaaagatgtgacagatgaaatcagttaatgaagcattttaagtaacagattatccatagggaactttgtgttatcaaattcttcatcaagtttgggattgctgtattagttatcctttccctgtaatcttcagtttgtactattaccactgatcttgttatttataccaatggcccatcatgattcatgacttacattttgtcccccaggtccctttcttggatgtttgcaatactcttctccaccctattctacctcttacagctattgattacgaagagtttggatttcctgtggaccatgaagagttcctttcaatcaggaagtattctccttatgataacatccagaaggatgttccttacccagcagtgtttgtgacatcatcatttaatacaaggtacacttttctttgtgggtacttactacccccatccccttctgaaacctctgcagcataatgcacaatagctcaacaacttgatatttttttattttatgtatgacttactactttctacttctncgttcnnacaatgtaagtcattctagcatttctcatattcatattgatgctaatgaatctatatagatatatatgtctagattcattaacaacaatatgaatgtgggaaatgttagaatggcttacattgtgaaacggagggagtagcattgaagcttgtaatatttacaacataaccttagactagataaatagaaaagataactggctaatggctattgcaagtttgcttctgtagttctgttgtcctggacatgaatatgttttgtggttgaaaatggtaggtttggtgtatgggaagcagctaaatgggtcgcaaaagtccgagaagttactcgctatgatccagagcggcctgtaattctcaacttgacaacagatgttgtagaagagagcaagtatttgcaaaccaaggaattagcattggagactgctttcctaattaaaatgattcatgatacatgaacatcttgtttatctctttgaatttaaactcattgcccaaagatggggagcacatgttacaatgtcaggcctctcttttcagcaatagtctggaatcaactgattggagattatctgaggtaccacacttctatttcgtacttttttttttctcagaatgtcctgggggaaaatcatatgtgcatatccctacagtttatgagatagttgcacgctcacaattcatcagtctcagttatatggtctgatgatttggaagccaaaattcctgtctactggagatcgtctgactctgatcaagtctgtcctgtttgccttgccggtgcactacctctcggtgcttgagctgccacagtgttcgatcaaagagattaatagaaagtgtcgggggttcctgtggaaggggcaggaggaggtgagtggcggacattgtttggtggcttggaaagcggtttgtatgccgtttgaaaagggagggttgggtataaaaagcctggacttctttggcaaagcgcttcggctcaagtgattggctaagaagggtgagcagcaagaccggccttggacaacagttgcgactgtggagccgaaagatctgagagacctctactactcagcatcacggcaagaggtaggagatggaaaaaacacgaagtttcggcttgcggactggttgccaatgggaagcataaaatcgaggttccagttgattttcagccatgtggaacgcaccggcttgacagtggctcaggggttgaggaaccacaggtgggtgtgtgacatcaaaggtgcgccatctaatcgagccatcggggagtattttcagatttgggatgcagtccaggaggtgcaggtgcaagggggagaggaggatgtgactgtttggaagagggctgcaaatgggaagttcacccctgcttcggcttacgaactgttcttcatggcaaatacagaagcgagatgtggcagtctgatttggcacactagagaaccttccaaagtgaaattttttatgtggttggccgagagggaggtgtctcacggccgacaatctcaccaagcgaggatggccacaccaacaatcctgccccctctgcatgagcaatgacgaagattgcgagcacctctttgtctcctgtccttacacttcaaatgtctggagaaagatcaagggttggatcggtgccgggttccagctgccggcagagctcggattggaccttggagattggtggttggagtggtggcaggtctttcaaaccagccagaggagcgcatttgacactttagtgctgctggtctgttggatgatttggaaggaaagaaacgctcagagccgaacagcggggttcctgtttggcgcaattaaagatgaagcggcaatctagaaagaagctggggttttcaatgttttaggagagtaacaaccttctgtaacttgtttttcttttaggaagttgctgcgatggcaacatcctttcacttcgacagcctcttgtcgaagtctgaaacttgtatatgtgtaaataccccttttcttaagtaaatttggtccgcctatcttaggccggcctggctaaaatatggtctgatgatctgatctgctatcacgagggcagttctgacgtccaacaagtccacaacgcatggtatctgctaccaagtgctgcccatgattccttgttggtaaaatttatctttgttatgctgctaccattggatcattttcaattctcagtagctcatctacacaatgaaattgatgtttttttaccttcgtttttcaatcatggaattgatatttaatatctcatgtgctagatgatgcctcatgccctcacctgctcatgctcgtttccatgtcaagttaatagtactaccaaaatttacttatgctatgtcatatatgaaagctgatttgatataactggttgctagggggaacaaagctcttgcacacttggcttggagcattaaggcaattgcaccataacagaagcggaccaaaatataccttatctagttatctggctgcttgcaccacactattgttttatccttctgttcttaaaatctgcatcttatgactgcccaagtgatagctatgaccttgtgggtcaggtgaatttagcgtcatgaagtggatggaacagttggacactacttgaatgaccatatgtccctgctgatatgaaggctgtaacaaagcacaggttggaaatctgctgcaggttgtgacagcactgcgtattggaaattcagttgttagactttgctctaggatcacctaggttagatctagtcgggtggttctatttgggattgatgtttgaactatagagattgaaaacgggagagggtttagatagaccgaccggttgaggagttcgtggaggaagaggcgccggacatcgtcgttgtcgtcgcggcttgacgtggatgcgacgccggtgaggtcgacggcgatgacggctgcggcagtggtggtcgtagacgtcccggcgatgaggcgtggcgcggcggtggcgtttcccgtcactggctgcgccccctctcgatcggattagggttttgtggggtggagttgncgncgncggtgaacttcgtaccttgtgccgtgccggcctcccaccccctctttaatggcgcagtgtgacgggggcccaccagccattgggctgggcgccccccgatcagggcgcggtcaaggccctcttgagccgttgggctcaaggggagggagatctatctaacatcagttactgcgagatttcatcagatggaacttagagcttcgtttttgtcttctggttttcattcttcagttaatctgtgataaattgaacttctacgcatctcaatttatattagttatgagtatcaatatggtcctccagatactcttttgacgtcttcaatgtggatccgtgaccaaaccttcgtttttttttccataatggtaatctttttttttgaggacattcataatggtaatcagagtataatttttccttgtgaaaaggtattgctggtggtatattaaggatttgtagcataattgtcaccatgatttttaaatgtttcgagctacgtttttgttgttttggataatttgaaatagaaaaaggtgagtacaaaggagctttgattccaacctttccaaagtgaaatttaagcaaaatttgttgtttgggtattgcgttttagcttcatggttttagctgtagagatttttgtagaattggatctttggagaaatacacttataaattgcagcgtttttgccactacacaccgttaccaatattttattatattggcatggtgaggagtgaggagacgcgtgaaggtttgaaatacccttgagttattccaattaggccaagtgaaatgttattggagtatactcttggtacccgtctttgcgaggtgagcgtaacgctaaaataaatgttgggtcaagcatgtttagttgtagtcaggatgatatcattgctcacccaacgaagtgtaatggctcagtacgctcgatgagacaagcggtggcaaacaggtgtaggagcatgccatggcacacattgagcacctttgggaaatgacgcatgatctcggtagggaggtccgaatctagctctaccactgcgtggaccatcttaccatcgcgtggagcaaaagctgacaatgtgtgataaggactttacctcacttaaccacatttcaagtgactggcttttgctgcgccaactacatgtaaacctataaagtcagagtatgcattggtaaaaaatatctaaaatgtaatgttccttgcaaaataaaacggcaaaaacttacagtatgtagaaatttccttagtaagaaaacaatggaaaggacaaacgtgaaattcaattttgaaattcttccgacccgttttgcctccaggggtaaagccgtcatcttaacactgccctctcaaaccttttcggttttttagggtttaataactcttcgagcccaccgtgtccggcccagagcccactagcccccctcgatcccaccggcgacctcccgccgcctccgccggggacaagcccccctgcgcgccgcgctgcaatggcgttctccttcgcctcaccggcgccgcagaatccgttccagacgccggcgcaggccccgtccctgtctccttcgccgtttcagttcaacctgcagcagccgcagcagcagcagcagcagccgccgccacagcaacaggcggcgccggccgcgcaaccgcagcagcagcagctgatgctatatacgacggacgggaagcccgcggggtacaacacgaagtgggaggagcttcacgccgagtcgcagaaggcgctgctccagatcgagtatggtttccctccccggtttcccctattttgtggcaaatgagagtgcttgttcgtgattgaacttagtgtttaagcgtctttgcactgcaatttttttcttgatctgtagtcaactaaaattgctccatctgacttggtaaacgcaatccttgttggtatgctattattatttttttgttatatgggtatactagtcagcttaggccctagtggaatttgctgctgctgggttggtgataaggtggaaaagtagtttcttttttctgtctgtggtttagatttaacgctttatgcgataagcttgtgcctttacagtctctcagagatcagtttgctttaaacaaatatgttcttctagcaatatatactatggagggctactgtttctgatggtttagcagatcattgtttacttgggtttcaggggaaggggaaacacgttttgtgctctatgatctatgccatttgctacggattacttaagctactgcctcattttgcattgatgtggtcaatacatgggttttagggttagagagttcagtttctctgtttttgttacctgtttgggacttggcatgctattggtgtaatttttcactttgaattttgtagggataaaataagggagtacagggacgagagcgagaggttggatcagtgttctcgccttcatgactcttcaatctcaactgtcaattttgagaatgatgcaagtgaaattgctcaggttggacttgcttttcttgcttttgtcagtcgtacatgagacgcttgattatgtgagtcttttacccct

SEQ ID NO: 13862 - DNA, 5473 bp, Oryza sativa
accttttcttcgccactttctcctcttttcacccggaacgtttttacggactcgtagtaacagcgtgagaaacggtgaagtgaaggggatcgatctttaccggtccacgccccggctcctcgtgcaattcaggaaaggtccctgccggacaagccctgctacagttttggaagcatctcaaatccgatttcttttttccgttacagagaaacgagagggaagccgtgccagccatccctattggccggtcaatgcatcttacactgttctgcagttcaaaaagaataatacggagatactacaccgtgactagaattagatcaagtttaagtttaatagtatagccagctactaacttcaattcatttataactaatttaatagccaattcatataatagttgcttactatactattaatatgtggtcccacctatcatacacacattgcgtcttggagtttgtgctgcaggtggctatagatctgtagcccgttgctcttctctcttatcgtttatattattaaaatatgtttatagctgactaatagtctactattgtacctgctcttattctgtgacgcgtgacctcaacttgcattgagatgatagaaatcatcgttcgagaggagatatttggagcggttaatcaagatcactcatcgtgaggtatgaaaggcacatcgagagtgaattttaaactctcgaggggatgtcctatagccgacgcttttaaccgaagaaagagacaatctttcaacagacaaaaataatataatgttgattactaggagtaaagatgaaaaaaatatgcaatatgcatgctttactgctatatctttactaggagtgtaagggcatgtttaatttgatgccaaaaaaaacttatcaaattttggcaacttgccaaaattttggtaggatttcttatatagttaccaaaatttggcagcaaactaaatgtagccactttttttggcaactttaccaaaatttggtaaggttgaaaatggcatcaaagtgaacaggccctaagttttcatccatcaataaagcaccagttaattaatttagattattacaaagattattaatttagttataaggataaattaaatatgttaataaataaatttaacaaatgatttaaaacaattggtcttagcaaagcagtagcaaaagaaagaattttgagaaaacattttttttttcaaaccatggaataaataatatttattcattctcaacttattcactggtttactgaaacgatttttttttaaatctagataataacaccctcaactcaatagcgagtttgtacatgttttctcatttgaaaaaagtagtaatagtacttcctaagccaattatcaaaaataatttggacattataggatggagggatattaaaaacaagaaacacatatccaggtaaaatgagtaaagtagcgcacaataaaaaaacatactactattgaattctctcgtgtgctactttagtcagtcgtctaaatttttataatgttatctattcataggcaacatattacgtacttgccaaacacagaaatgatagccacatgcacaatacgtctacccacactactataaactcaatcaccggaagtccttttcgctgttgttgttgctgagcccttttcacagctcctctggttgctaccgcccctctcccttcactgtcatagatgagctcggagctcaccttgggtggggtaaggaaggaagggagggagggagggcagaggcaggtaataccgtcggtccatgaccctccacgacgatgggtggtagccttcacgaagggattgaggagggagagagagaggatctaggagggacttagtggccgccaaatggggaaggtttttttgggcgattgaattttcacgggcggcgcactttagctaatttttacaggcaaaccatttttacgggataattttaatttttaattgacctgcttaaaaaattaaaaccacagtgcttgaaagaaatcgtttgtagtggggtgccaacagcctcactcaagaatggccacctgaaatgagaggtggctccccacaatagccatgcgttattcctatccattgacgaaaatacaacgtttcgcgtcgcataccgtaagaacgagctgatctaagctagagacatagatatactccatctcactagcgctggtttctttttgtttagcaacaaacatcgtataatgatcgagcccaagacaaaaccagatgtcttctacgatcccgtttctacacatatgtatagcgtgcctccggtgcatatatatcgatcgatccatcatcctggatgcatcttattggtcacagctagctgtcgcgcccagggctcggtgagcctcgagtgtacgcatgacgcatctcgcgcatgcatcacccgatctctcgccgcgcgcgtatgggattcattaacgcgaaacggcacgggcaagtgcaacgccagcgtgcgcaggctgcagccaaggcaaagcccgcggcactaagacgcacctggcgcacgccataaatacgtgtttccgtttgtgggggtctgggcacgctcctttcagtttcagccgtgacgaaccgcgcgagcgcaccggccggccggcctgcgctctcgcacgcgactggatatgtgggtgtatatcgcacactactacgatcttaggcatgcgcgggtggcagcagaacgcagctagctggccgtgggccgtgggcgcgcgagcgtttatggtcggcccctgccgtgttctcgtgccgggattcagcaggggcgcgggcgccgcagcgggtgtctttttcgttgttcgctctgctggctttggccacgtagcgcgccgggcgtaatccgcaggcgatatatggacgcctcacgcctcctttccctgttcacactggtcaggatccttatttggatatttgtgggacgtacatattcaaatgttgcaaaaacgattatcctattgtttgctaattcgttatttggctctacaaaatatcacataatcttttatttgccaccactcttggtccacgtattagtaagacaatgatcgtaccctggtatttcatctatctttttaatattgacgcatagcgtgatgtttgattatttattttatttaaaagtcataaatattatttattttgttgtaacttgtttaattatcgaataaactctaatattaccttataattttttttgcatatttacactaattaaatgttcgaataagacgaacatttatacgaaaaatcaaaggtgttatatataaaaccacgaggaacgaaaattccattaatttctatatgtgaacgttcacccaaggaacgaaaatttcattaattgagcgctcgtcaatgggtgcgcctagtgcacaaccaatctcacgcgtctgagtccacgcgagtacgcgacagtgccttgcctctcgctgagtatatagtccatctattgtttgccagttggtttcaatcgaattttaaataaataatttcaaaaaagaaaaaataactaaataaaaaattattgtacatagaaatattgtatatgtataaactttatacataaatatatgcattgaaaatttatttatataaagtttattatgtatatgaacttttaatccaaatccaaatctaatttagttgtataaactattaacttatcaaaaaatggaaaaaatgtggcgcaaaaaaaggaaatgtgattcaacacgtgagggataggcatgcgaataagtctttttgcttgacaataagcccaaatggccatccaaggtcatatatgatacatggatccacaagcgtcaaaagtctaagaatactcttataggcgaagaattgaaattgatacctatcgggtcatatatttttctccctctgcatgtccacaattttactacaacaaatcgagtctaaagaaagaagcacccaagccgagagctatgcgtgtaacagttgtgcatgtgaccaaaagtgaaacaaaaatatttaagagtaggactcaactcgcttatgtataccttgaatgctacaattcatgcatacctcatccgttccaaaacataacatattataatctagaatcggatgggaatttagagatggcagtcggcacgggtagtgactacccatacccgtgcccgtgaggtaattcatgcccgcgggcatacccgttactacatgagtacatgacgggcaaggaacactacccatgcccgttgctcgtgggcgccatgtacccgtgggtatgcccgtttacccgtcacaaactcatagttcaacatttcaaccataaatctccacaagcaaagagacattatcatagtttaaagaaagtgtacagttgtactaagttcaacaatacaagcgttacaagtacatcaatacttgatggtggcatttatactaatttgattgagggaccacattgtcagttgatttttgcgggtaaacaggcgaagcgggcatatgtagtgactacccatgcccgagcccgtatgcccgttgggtataggttttgacccaataaaaactcatggggtactaaatagagaacaaacccaactctattagagtttttacccatgggtaaacgggcaaatgggttaaattgccatccctagatgggatatatcctaaaattatgaatctgaatagcaagtctatccacattaatgggtgtgtttgcaagagcaagttctcaacacttctctctcttttttttcgtgcgcacgcttttcaaactgctaaacggtagattttttacaaaaagtttctatacaaaagttgtttaaaaaaatcatattgatccatttttgaaaaaaaaagctaatactcaattaattatacgctaatggaccgctccgtttttcgtgcataggagatgggttcccaacacccaccttcaaacacagagtactaggataagtcacaatcaggttttaaattgttatattatattagatggggcgattaaaatttatgagacatttatcaactcgataaatatgaattttcaactctaaatttagagttgatttttagtttttttttccacaaaatttattattcagactttgtttttatagatcattaaaaacatgtatataacattaaaatttttatatgaaaattatttctcgttcgtgaataaacgaaacgatgggtcgtacgaatgacaactccacctcctgtcatccagcttttccaaacgtactagtacgtcggttacaggccacagcaaattcactgaggagactgacatcagacattaacatctgaaacgattttataagcatggcgacacgtctagaacttcgcgttccactgcagcccctgcaaactgtttttctccgtgaatgtgctgaatggcgtcaatgtcgatcagatagccaaatgaccttgttggacatcacgtacactttgcattaaaaacactaat

SEQ ID NO: 13863 - DNA, 3738 bp, Oryza sativa
  unsure (1)..(3738): unsure at all n locations
ccgcgccgccgccaacttctccccctcctcccctccacctcgctgaagctcggcctcctctcgcaggtgcggtggcctgggaggaggcgcggcgcccaacgagaagtgcggaggtggccgacgtgggtagtaggaaaggaggccggcggtgtgcaaggccacgacaggtggcgcacgaggaggttgggcggcatgcaggtggcgcgaggccatggggaacgcggaggcgacaacgcgcagaggggggcacgatgccgccccacacggcgacttgtgggacgactgccctcccacgcgacgacgatggcgcagcggggcgagcctgcctgagctgtgtgtggtgggctaggcttggcggctagagggacgacgtggttgtccgacgacatacgttgtgtgggtgggttgtgtggttttggatgaaaatcgctggtgaaagccttggctagcctttggttggcttgacgacggccgcccttaggcgtgcgtcgttcccctccttagaggtgtcgttatggcattttttctccctcactaccaagaaccctgcctgtgcaacgatggtcgttagtggactctcgcgtcgaacctctgtaagcctagctgttcagcgaggccttcgtctcctgggtttcgttcttggatgtggcgagcatctagcattcttcgttttctactaggtgaagtcggagctgcttcgttgggtgcgatgaagctcggcaacaataacacattgcagtttttgaggagtgttggtgttagctgtgtacaagaagtggtgctctggcggcttgggctgatgttcaaagtggacaatcggtgtcttgctcgtttctgcgatgtctttggcaatgatgatctgatagccgtggagttggagctgttgtgtcgctagtcgacaagctcggcaacgataacatttgcctcacgaagtcgaagcctttatatcgcttacaacaagctttttgtcgatggctgctttgggctccgcctttgtccttttttcttggtcttggtagcttaggttagctaagtgtgttgtagttgtggttttcgcataatttttcctaattaactgtgcattgtaaggtttggttctgttttctttttaaaatgggataccttcttctttatataaaacgtcggcaacggcctgaccatacggaaaaaaaaaacattactccggccggtgaccgtcctgaacaaaaacacagaacgcctgaggctgcgttctttcttcttatgaacagtgattacggaaaacggagcgatccattagcacatgattaattaagtatctgctattctttttaaaaaaaatggactaatatgatttttttaagtaacttcgtatagaaacttttacagaaaaatgcccgtttagtagtttgaaaagcgtgctaacggaaaacgaggaggactttgctgaaaagaacgcagcctgaaggaatgtgtacacttcggccggtgaccgtagagaaaccggcgtggagaagagaagggtggaactagacatgtgggaccgaggcctgcatgctgcggaccgggggaatctggcagaactatcacgttccgagggaacggaaggtggtcagagtccggactactcccctcttggatttacgcgaatatcgtgggaaaccaaaaaaacccaacccgctctggtgaggttggcttggcttgctgccgctatccacggcagcacagcgctcgcccgcgaggtacgactagctgcagaagaaacagcgcccaatgcccacacatgatgagcgttgcagaagcagagagagatcgagagagagagagagagagagagagaggagatcagaagatctcttgcccgttctctacgctttcggctccggattagacctctgatgagcatatctcgtccacagctctcctaatcatgacgctgcgccgttctcggttctcacgatcggacagatagtctacattaccgtagcttcctcttctttcacttgtctactcgtagctgcctggtatacctacgagtagtccagtaggagtacagtactagtactgctccagataaaaattacgtgtacagcatcccggaaacaaagactgtgccggcctcgctgtccgctggttcgctccatcccggccgatctcttcccttgcatgtgagcaaaaggacctgcatagctgtaactgcctttcacatctttgaccctgagagatcacgcacgagaggtggcaacaagcagcaggagtagtactactactacaaaagaagaacgggngaaagnagnatncanncancgcncgnnagcncgnanannaggncnttncnncctnnttnnccggnactnntgtcgtccaaaagatcgttggattcttgaagcattatcacggtccaggggtcagcctctcggctgctgctacgcaccgtactatactccagtaccgagtatgtacgttatgtggtggtagtggcgacgctgcgttacatctgtacagaaaacctgatttgcttgttcgattagttgggcacacggtggcttgcaccaaggtttaacccacttgggcttttgcaccgctgcggaattagaaccctaaccttgaccgcgagaacagaagaggtgagctaactaggaagctaaacgcgtcggattagaacagcaaaatggtcgtcgtcgttgcatggagtcgcgttggcgtttgcatgcgtgctgacttgactagctggtgcttgttggagaagaggcggctgacagctgctgctgcgacgacgacgacggcgcgacggtcaggcttaggtcgtcgcactccagcacgaggcgaggcttcgtggccggcgacgtgggcgggtgctcctccggcgaagacgctctcttgctgccggcgccgcacggggcggcgcttaggtgcacgccgaagagcttggtcggcgccgatgaccgagcggcgctgctgttgcctgcctccccgccgctcttctcgccggctagatgctgctgctgcggcggaggggaaggctcctcggcgatggtgagcgagctgctcgacgttgtgctcccgcctgagttgttgagcacgttggcggcggcgggcttcttgcgcgcctgcatgccgaggccctgcaggaacgcggccgccgccgggctcggcgccacgggacgaacgtggttctgcacgaagtagatgatgtcgttgtacagcttgcgcatgtgcgcaagctcctgcagcagcgccgtgttgctccgccgcaggcgctcgttctcctccatcagcaccgcggcggtggcggcgcgcccggcgccgccggcctccgccgacgacggcgacggcgcgggcccgcctagcgcgagcaggcgcgtcgcgaccggcaagttcggctcccgccaatgcggctgcgggaacggcatgccgatgccatgcgccgccacaaccccgtcgtcgccgacgaacgcgtggtggtgctgagccgccgcgacgccggggtggtggaacagagggaagtgcggcggcgcgaagaacggcggcggagacggcgacgccgtcgatgcggacgacgtcttcctgcggtggatctcggtgagcagctgcttctcccccttcctgaagaactcgttcgcgaactcccacctctccggcacgaccttcctgaacccctgcattgcaacgacgtcgttacttacacgcatcaaaacgcacgagagaacagaactacagaaggtggcggcatggcgctttgcttacgtaggtgttgag

SEQ ID NO: 13864 - DNA, 655 bp, Oryza sativa
cgtccggtcggagtatgtgcaatgtttcagtcttttgaattgatcaagattggcacccggccaacagctttcaaacggccacccgggcctggctgatcccatcagccgcagattttccaaacatcaaacccattccacaacagcaaatttcacaaggcagtagtcaaacaaaactacgctaggaatcacctcacatccgcccatgaccgtgggcacggctgttcgagcagtttaataacctctgcagagggggtacactttacccacacgacattactaacccggatcatccaacccgtgcagaacggccacgactagagaccttaaggctttcatgacaaggcatttcgaaagtcgacacaggttcaccatatgccaacgagaggggtcccagaccaacaccagattaggtcccagaccatactgtgccaggaagcccaggggtcctccccgacaccaccccggtgaatccacatgtctcttagcatcatggctcctccgataagctagttactcagccaggggtgtcccattccacccatgtggtcgtacttgtcttatgttcggatgaaattccaaggaaacggtccttaagtgcaagagcgggaaaccgtacacccggtacgttccccggtccgcggttttggaaattcat

SEQ ID NO: 13865 - DNA, 4983 bp, Oryza sativa
gttcccgctgcagtttagtcaaggcttagctccaggtatcttttgtttccgctgcatttttgtaagacttttatgatgtttgtaagacgtggatctgaatgtcaacattgtcgtttgtgtaccccggctggtcctggacggggattttaatgcacattctgcttggaattctattcgggaatttctgggcgtgacaggtgatggacactgggcttggacaaagggagtgtatgtggactttgtttgtcttacttatcaggccgaggaggagggtggctactgggccaagcccaagagcaagagagagggggcggctgctgactgggcgtcggctgacttggtcaagtggggccgacggctgaggtggcgccaacgtggacgtcacgtcggatggggaagggagaggaggccgggcggctcatcggacggctcacggcgtgcggcgggatccggcgaacggcggcaagccggaggggcggctagctctggcggcaggaagaggagaagggaaactcattccacggctcggatcgggaagacgacgcgcgacgacggccggcggcggcggccaatctcgccgacacgccaacgtggccgcacgcgagaagagcgaagggcacgcgggctcgggcttcgccgaaccggtatggggttgcgacgcgcacgcggtgacgcgggacccgatggtcaccggcgacgcacgcgcggtggcgttatgcggcggcggaaggggcgacacggcgcggaggcaaaggagaaggtcggcggcctagggacagtcagggggagctcaaggggatctccgggagcgtggcggcgagaggaatcggcacgagaggtgccgacgacggtcgattgcggcggcggcaatcaccggcgagcaaaaggggaaaacacaacgagacgacgaggattcgattcaaaggggtgggagcatctccggggttcaaggaatccgtttccggtgtcggatggggcggagaagcactgaggagggccggcgacgagcagcggcctccgggagcggacggtaatggcggtgaggccatgccgggcgacggcagtgctagggaatggtttggggaggtcctagggagctcaaggacagtgttggcgagggtggtcgacgagctggggcccgacgacggcgcgcgactgcgcgcggcggcggaaacagagcaacggcgaggcgcgcggcgcatcgtgcggcaggctatggcgtgcggcggcgggcgcggcatagcgagcggtaggaggaaagggttcggcggggagctcaccgacaagaagaagcggcgtcggcggatcggagggagtcatggtgaggtggtcgcgacggtgggacggaacggcaccgggtgggcgcggccggggaggaagagaggagaggtggcgcccggagctcctcgtcacgcgcccacgcacgcaccggttcctccggtgctcggcggtggacggcgacgacgagatcgagtcgagcggcaacagggcggcgacggttgttcggctacaatggcgcgggggggggcgaaaacgagagagatggaggggaggggctcggctgtggttttataggcgcgggatgtggagcttcgaggggaaggaaccgagcacgggcgatcaaggagaggcggtggcggactcgcggtcaagttgtgacagaggcggtcacgggtggcaaaggaggtgacggtgtggatgcgttgggtggcgaaggcggtggatcgagcggcggaaaatcgaaccgcgggagcgggaggattagcgcgggctggcgcggtcaaggtgggggtggcgagctggcgctggcgtctgcgtctctgcctccgagcgctagcggccaaggagtggaggcatggcgtcgttgcttgggagggaaaaagagagggaggatggtggaaagggggggctttaccatgccggtttgggaaaaaggaggtgggagagggagaggagagcgcgtgaggcagagagacgtgctgcctccacgtcttggacgcacgcgcgcacagggtgggggcgagcggcagggcggcatgggcggccgtgcggcgcaggcggccagggctgatgcggcggcgaccgggcggtctgccacgcgtgggcgagcgcgggaaagagcgaaggcggtggcgggttttgggcggcgacggcgggaatcggcgccgggaggggagagagcagagagagagagagcgaagacgagagagagaaagaacgagagagcgagagagctctctctcggctcacatgcgtgcaacgcacgtgcgaggggggttaagatgatgggctgtgaggggagatgggccgggggagaaaacggcccacaaaaatccgagggaggcaaaatagactttttcggaggggattgattcgaagagaatttgaacttggaatttgacttagattttggaattgggatctcgatgagaggaaggagtagacggaggattcaagatggggttttggatattttggatctggggaagtatttggcgatgattcaaagagagggatagaatttcagagtttgatttggagacttgagtcggaagaggaatttcgagggggcaaatttgtgatggtgacgagagggatcaaggacggatttgaattgagatcttggcacaacttagactcgcacacaaagaacgaaaattttcgcaattaggatttttgccgaattagtttttaacgcctcacgaaaagcggagcgttacaactttcaacttttccgtcacatcaaatgtttggatacatgtatggagcatcaaatgtggatgaaaaaaaacaattgcacagtccgactgtaaattgtgagacgaatcttttgagcctaattacactataatttaacaatgtgatactacagtaaacatttgctaatgaaaggttaattaggcttaataaatttgtctcgcagtttacaggcggaatatgtaatttgttttgttattagtttacgtttaatacttcaaatgtgtgtccatctacttaaaaaaaatttggcacatgaactaaacacagccctagaacaccaccgtaaaaacatagattttcatctatggttgattgttcggactacatataactgttatttctctcaataggttataagagttgtatgttgttcttatcttccttaaaccaggaaagtgggatagcgagatcttcgaaatcggtggctgatacttgttgattgaattttgctcccatcaccactaccgattgacgtcaaaccaaaggaaaggggaatattacatcaaagagtaaatgagttataaataagtcattcgtccagaacttgccaaaaccatgccagcaaacctgatacaataaacacactgccaaggaacctccaatcaatgtcttcaagaagatggctagaacgtcattgtcgctattccgaacatctgtaacaacattttcacttggagatttcacttgagacacggtaaagcgagggggcgtcgtgacattgcccccaataaggtaagtagcgtttaaaggtgtcaccgatttctatgcaaatgcacgtcaccaacagaatcaccaacgacctcttgcctcgcttgcccaccaccaccctagcgctctcctgcctcgccatgccaccacgcaccacctgccaagaggcacggtgacgagacaggacatgccacagccattacccattgctgcctttcgaggaacaccggaattcggcgaccctagtgcgacaacgcatcagtggtatatctggcatgcgataacgatgatgacgtatcaccggagcaccacacgtgtatgttgccatcattgaacaatgcacaaggaagcctgcacgctagccatgtcgttgtcaccgttttggacgctgaaaacagatcccaggtatcgccaggtgttggatcccgccaagaagacctcgctgctgcttttctcatggggcatctccgacacttccttccaacagcagagagaagagacccactacggtgctttctactggtagtataaagcaatcaaaatcattgatcttatttgatcaaagggttcagatctatttatactaccaccctagttagttagcggtagtagaaacgtggagggacattattgtcaaaaaaaaaaagtgcgggggtataatcgacatttagcagtggctaaactttgtcttcttctttatttttggctttttcgatgaaatatgaatgatgccagcacaatggatgactacatattgatctagccaaggataaacataaatgaaaaatttacctctaatcattgtattagtaaattactgatttacctttaataacgaactgtttggattattttctactggtagtatgaaagcactggcgtatcgcttcggagagaaagatctctcgactttatttcgcctctcactgaccttagagcaaggtgtccacgtcaaagtttcactagtgcagataacaaactgtaatgggagtaacagttcactttgttgcaaaacagcgtgcaaattcttctcgccaccttatcaatgcagaacatggatgctactccaccagggaaatgtgctaatggttcacttgatgaagtattgaaccaaagaaaaaacaatgaaaataaaaaagcaaaactagtttagacaagacgcaggaccaagatactttatgtttagtcttactggggcatcttttgttctctatatattttttaaaatatagccatatatagaatttcagtgttgtaaaaatcagaatatatgggttgtatgggtaaggcaccggcacacgattaatcttgatgcagacgacacataatccttcacaaccacaagccctcgcttgtctgattcatcttcaagaagcaaggtaaagggccgtctcagtttggtcctgtagaagattgagaattattatttttcgaacgaatgaaattgagaattaagcggcatatataaggaactacgatcgctaatcgatcgcttaatcagggcaggtgataaat

SEQ ID NO: 13866 - DNA, 632 bp, Oryza sativa
tctttcacatactttgttctcaccctgtcatgcctaaacaagtggaccgtgatgaaacaatagtgagcatcgactagggttaaatggtacaaaattgaacattgcaatgaactcatacaaagataagaaatatttacttgtgtaattcaactccagttgagatgtcctcaaccggtcaatcctgtttcttcccgaactgtcacatgacacggtgcggaaggtggtactcaactgcccagaaacaaatcaatgggcactggtacatgaaatagtcagagtctcgattgcacatcgagttcagggtcaggcttgaagcctcatttgtgtggtatggtcaccactcaatctacaaaagttgaagagatgtcgttggttagtatctcaattaaagaagtaaatgtctaactagaagtgatattggaagtacttacatgttgaggctgcaagcagtccatctcattgacataatgcttgtatgccacatcccggtgagcatgtgcagtggcagtactctcaaaaaggtaggccactgtcttctccatgtctggctcattgtagggccaaggagtgaagctttgcctccacttaggccttccaaccggtagattaaccacatccacatctgaatcaat

SEQ ID NO: 13867 - DNA, 1525 bp, Oryza sativa
atttcaaaaaaaaaagaagtttgttaggcataactcaagtaatgcaaagtgctaaataaattttacctctaaaacattgcggagcgtgttctccgtgtcctcaccacccctcggagattggagggcatgccccatttcattcacactcctgaggagctctctcaactgaaagcgtgagaagatatatgttggggtctagggtgcaaatggaagtaactttgacaaatgcaagaaaacttacgactctgtctctaagtggggcgtgctccatttgatatccaactctagtccagacatcatagggattccgcccctcatcggagtcgcggtcatcctctatgtcggcttccgtccaagtagggcggaggaacagtctatatgtcctatgcagccaacgaaggtactctgagaaaagatgattttggtgtatagtctcgatgtacctatcgttccttccggctgttctccattcatcaatgtatctattatgctctagcccccagtctttcacattctttgttctcaccctgtcatacctagacaagtagaaggtgatgaaacaatagtgagcatcgacaagggttaaatggtacaaaattgaacattgacaatgaaagcaaacaaagataagaaatatttacttgtgtaattcaactccagttgagatgtcctcaaccggccaatcctgtttcttcccgaactgtcacatgacacggtgcggaaggtggtactcaactgcccagaaacaaatcaatgggcactggtacatgaaatagtcagagtctcgattgcacatcgagttcagggtcaggcttgaagcctcatttgtgtggtatggtaaccactcaatctacaaaagttgaagagatgtcgttggttagtatctcaattaaagaagtaaatgtctaactagaagtgatattggaagtacttacatgttgaggctgcaagcagtccatctcattgacataatgcttgtatgccacatcccggtgagcatgtgcagtggcagtactctcaaaaaggtaggccactgtcttctccatgtctggctcattgtagggccaaggagtgaagctttgcctccacttaggccttccaaccggtagtcttaaccacatccacatctgaatcaatagcacacaaccactcatgttggatgatggtgcctgacgacaacaggcctcacagagctgtctatatgtccacgccaacactgctgagccctaactgaaacggcccagatcaccaaggttggcgaccaaaggaatccatatcgccgaagcaatgtcacccccagcatcaagaaacagaacctctcccaacaagtgcaagatgtatgcacgggcataacactcaacacgccatggctcagcatcgtcgtcaagatgtgagaagttctgactcagccaagacaggggtattccattctgttcttcttccccccttgcccctgctcaatgttcagtggaatgccaaacagctgctgcacttgtgcatgccatccaggagtctctgtcctgcc

SEQ ID NO: 13868 - DNA, 14160 bp, Oryza sativa
  unsure (1)..(14160): unsure at all n locations
ttcctttcatcgttgtagaatggagattcaaagggcccgacggcggagggtctacgatactgggttcatcgaccctcggaaaatcaacaccgaaatgatcgacaagtacgagaaagacacagaggacaatctcgtccatctcctaacgcagcaacattcaagacgtacatactactgccgtacaacacagagtgagtttttattgtcgttcgaacanattttgttcccatacatatagcatgtacatttttgatcatatatatctcttctcacgcatattccagattccactgggtcctgttttcttcgacttggacgcatgcagagtcactgtgtacgactcaatgaataaagaggagaagatttttgataaggtcttcaaactgatagacaggtaatataatgccatctattccaaagtcgcggggaatctattgctattatgttgatctcaagtaataattaattaatcatagcttgcaactgcatatgtagggcttgggatcggttccgtcaattggtccgcgggacttggaaagaaaaacttggacggaggtttgattttccagtgagtacatgcatgatccaaaattatattggattgaatctctaattacagttaatataaagagtatattaaatctctcatcgtttctcatgtagtgtgcaaagcaggaccagggaactaacttatgcggctactacgtatgcgagtatgcccactgcctatcaaaccaaatatgcacaacacgagagctcgatgtacgtatacataaaccattcaaaatttcattgcgtatcgatttgttaagttgtttattaatttcatatattcatacgtcattatttttcgaacgatagcgtattcacatgagggataatctcccacacaaggattttatcacggctgttcaagaacaactgatgggattcatcaacgaagaagtccttaatctcgacggtgaattctactacgacggatcgacaattcataacgtcggtccttcctcttctgacataacaccggcgtcaaagtcgtagctatagctaccgagcaaatgaattgtactatatatgcatgtatatatatatttatatatgtacacatttacttttgtgttaatatatattttggtaacatatatatatgcacataaaatgttaagtgctttaaattatacatatgtctgtgtaatatatgatttatacatacacacacacacacacacacacacacacacacatatatatatatatatatatatatatatatatatatatatatatatatatatatatatatatatatatatatatatatatatatatatatatatgtctatatantatgtatatatatgnanngagacatatgtatatatatatatatgcctatatattatgcatatatatgtatatatatatataatcaaccatgcagcaaacagggccttgcaaataaaaaaaaatggtgcaccgatctttagtcctggttggtaacacaaaccgggactaaagatggtttggccggccacgtggctgatcaatctttagtcccggttggtaacacgaaccgggaataaatatcgatctttagtcccggttatttcacctgggactaaagatagttatctttagtcccggattcgtagtcccggttggacaaccgggactaaagggggttaccaaccgagactacaaacagtttctccaccagtgtagctgagacctgagaagccctgtgttgcgatggaataattatagaggaaaaaggcacatatggtgtcggagcccaaaactaataacttgaatccgactgagattaatgaatcaatccctggatcagtaaatattgatacatacaatataaccggttcttcattgcatatgttaaaaagtcttacaatactaagggttttacaataataggtactcacctaactaattaatacacagcagaagtttctatacattctgactagtgaggtataacctttagggattctctaagttatcgggatgttcgtagtaatagtcataagggtcctcctcttgacccagatctgaaaaaggggttataagagcaagggtgagtatttacaatactcagcaagttatcatgggaatatgttatgcattgacatataatagggttctttgcaaaaagcagtactagacaatctggaaaagttatagcaagaatttataaaacatataaactttagatttctaaccagggtaccatatgagtcccagtactcaactccatgagtacggctattcgaatagtttcaaagatattctactgtagcagatgtacgctttacccgcagtccatgacttgctgataatcatcggctttagtcatggtccagtattaagtcattaacaattgtggcacctgttccatgaactcatatcctcatatgctctgaatgtaatgttaacagcagcaagaggagttctggcgttcccaaggtatttaaggggaactgatcgtatgacaccacgtcatctcgatcagggtttagaaatataccatatagtttatactcgagtatcacaaaccatttacctgtacatggtaatggttaaagtttcccttcgcggctatagttgcctcctgcacgaggacttaaaaataagaaccactatacagaggtgccatattgctaattaacataataactaggtctgtccctattctagaaactgcggtcgtactcgttcgttcaacataagtatctggtaaaacttatattgattgagacagtactagccacccggaaatcagccaaatcttacgtactgtcccaatctaagtatagggtattttaaccagattgtaagcaaaataagcaatactaaattatctgggtttctatgattgatttatgcatagaaaatagaatattgaatagaaggctataagtaaataatttataaaatataggcttgaatgatcaaaaggtatatggtaacttgccttgctcgatgtcctgagattgatggatattatctattgagtcagaagaatcctcaagacctagggttagacatatgtaaaattcaaatttaaaaggaattcaaatgaaatccaaaaatatgaaaaatagagaaaataaaataaaatgcaaaaatagcaaaaaggggctcaaaagatagagaatgattttagaagaatattggtccaagtttcattggaattggatctatattttaaaagatatgagcttctaaagtttaaaaatcaaataaaagtgaaatggcactgtgtgcgggtcccacctgtcagtctctctctctctctctcttctcttcttctaccttcggccgtttccccaaatgcagccggcggtgctagggtttgggattacggcggcgatggagggggaaagtggttgcggccgaagaggggagggagctaggtatctccggcgacggcgatcggcggcggaggagctaatttggtatgtggatgggttggcgactagggcggcggtggtacggttaggctgtaatggtgatcaaggtgatatgagttagacatggctaggggagggggttctagagcatctacgaggtgtctagagggattccggcagcttgccgacctttggcaaggtgcggagaatagttgccgacgagcgcctccataggcggcggccgtgctcacatcggcagcttagaggggagcatggtagtgcaaagggattgctaaaatggaatctaggtagtatgtagatggttgaaacggaaaaactcaccgagatcggttgaaacgacggatgcggcccagaaaaacttcgcggcggtgaagaacagagcagcgcgggggcggcggtgctcgggttggtgcggcgaggtaaaactcgacgcagagcttcggttagggcttactatgctagaacatggttgatataaggtgttctaagggatatttagggcggaggatggatggagaggggtggagtcgatcgcgcacaaggtgttcgaccgacgagggatggtggttgatggggtggattggcgaagcagagcttcggggttgtagggctttgattgttgatgatggatgatggacaaggaagggattggggtcctatttatagggctaggaggagcggatgagctcggacaccgtcatcgccatggatgagcttgggatttggatgaggcaaaggtggcaaaggctgagagagggcgggaaagatcgatttgagtggcgggaggccacgttcgaatacttaccgatgaagtattgacttgaccgcggttggaatcagctggcgacgtgagggcgctaatccgggcgcgacgcgcggcggcggcgagggtgaaaacggctggctcaggggtgaatggtttgaattgtgagaggagataccaccgtctatcttcaatctaaccgtgcggcaagaattggcgcgattcaccctgggtagaagcgaaatcgtactcggcggcagctttggacgggcgcgcacggcgtcgagcggcgatttcttgcggcggtcgtcgtcccggctttgtcgtcgtcaagattggtgcggcggcggtgggctgagggcgtcggacgggcgacggtgcgccaaggcggtcaggcacgcgcaagcggccctgaggccgacgcgcggcgacacggcgcgtggctaagtcggatgctcgggcggtgcgcgtgaaggggaggatgaggcaaagaaagccacggttttgagtgggttgtggtcccctaggaccaaatctagactttgcacaagattgggtaggagttgggctgctctagttgggctagacatttcatcgagcaccttgtgtgcgatgaacagtgaatttcagaatttttgaatatttcctataaaaagaatgaatttaatctatgaatttgaaagagtttcactagggtttgaagtatagcaaatcttcgatgaactaagaaaataatctatggtttgaaatttgagagaatttgctcaaattcactagggtttggaataaagggaattattagggtaaattagtagggctctaagaaataaatacttgaaccaatttaagaatcaaatagatttttaaaccaaacaaatttaatcaaaagccagcatgatgcagtcaaattttagtttaaaatttgaggatgttaaatatggttgccattaaaaatattacaccactaagttgtactccctccttttcacttataaaacactttaatttttctcattgtcaaacctttaaatttatttaagtttatagaaaattttagcaacatctaaaattctaaattagtttattaaatctaacattaaatatattttaatagtgcgcttgctttatattgaaaatattgctatgttttaaatataaatttagtagaacgtaaaaaaaagtttgactaaaatttttttaaagcgtcttctaatataaagcagagagagtaagaaccagagaaaataatattaattaatcaaacaatgcatgaccaactcttcagtctatttttttactttttttagaggaacttaccttttcagttatgtgaactcatcaatttccaccactctagaacgaggcagtccggcctagcacacctccaaacatgtaaaagcccttaccacccagcctaggctcgtgcaacccaggcagactaatagggctggctcgagtgggccggattgtagagtaggcccatccatgggcaaggcccagcacaggtctacggtgtctagcggcatgatcttgtgatatccttcatgatctcctatcctctcactacatgctctctctctctccatcctaaaatataaatagttttgaatcgatgggacacatggcagatttagatagattgtcagtctagatttatcatactaggatgtgttctatccaaccaaaacttcttatattttaggacggagggagtactacacagtggcaaacctagaacggaaattatccagggtccttaacctgtcataacacatataatactttaatttttaactaatacaatatagttaatataagctaaaacatccaagtattaaaaattacccgggtccggtaaccacagtagtacggaacaccccttatactacccccgttttttaatatatggcgtcgttgacttttttacaaacatttaaacatttatcttattcaaaatgtttgtgtaaatataaaaatatttaagttatgcttcaagaacatttgatgataaatcaaatcacaataaaataaataataattatatttttttaataagatgaatgattagacgtatcttaaaaattcaatggcgttatatattaaaaaagtaatcattgtagatattttttgtttgttcgagctatgtgaaacacggagaaattcaataattggacactttttagtttccaatttactttaactaacacgtgtgaggatgatattgttggtaacttttttgacaatttgataagcacgatcacagcacctaaagctttgcggtgatcctagagtcgccaaccacctcaatctagcaaaagctaaatcaagatgggttttgataaactaaactggctaccggagccgatctagatagaacgatagataactacccgtctcgtgggcaaaacggaaggttttcaggataaacctacaaagatgtgtcgcactctcgcagcgacggcggatgatttacagcgcaaatcaacaaagatggacaaactaaactagaattagaagcaaaagtaaaagaacgattcgattgattgatggttgattgtctttttacaatgaaccggacttgtctcttatataggggttggtcttgccctctacaggctctcctccacgtccaactcgggctaaaaaccaatggaaacccaaaatatgtctttccgagcaaggaaactcgagtcccgacaaaaacagaactggactcggattctaccggtaagactgactacacactgtcggtctgactagtctactagcagcggtctgaccggccgacatacggcggtcagaccaaccctcttagaagaaaaccggcggactttcaaactttgacaatttttcctattttatttttaggtgccaaatttagatgtaaacagatatatgggaccataagcgggctaagatatattaaataatgggagcccgacttgggaaggatcaaattattaaatatcttgtactgctgcttactagctttcttcgtgtgattcatcatgccaatcactctcccgcaaacaacgcagccaggatgaggtcttgccggctctctctctcctcctccttgcgcttgcgctgcccactcggcaggcgttttccaacaagcaaccgctccaacccacttcaatcaatacaagaaaattgcaataaccacaacatttgagtatttgagaaaccatttgtagtattagcccttgtactatactcctacatatttatatttgggttttgactaaaacgaatggtcaaccgttatatgtaaagtcaaattaaggtgagaggtagcagtactcgtcatacgtacgaacaaaacactgtcgctatttccgatggagctgtacacgtacacgatcattccaatccaatccggatcggtgtccagttcagcctgtacacagagcctatctagtcgaccatgcaatgcacaatctgtgcgaccaagaaaagacagatcagagagaaagaaaacgggaaattaacccgcagtagttgccgcccgttccttccaccaatacgtacctcgatggagatcatggaagagccgccgccggcagcgggaggcgacgacgatcgcgaggtggagctaccggaggacgtgctcgccgagatcctccgccgcttgcccccgcgaagcctcgctgcgtcgcgctgcgtctgcacggactggcgctccgccatcgactcccgccggctgctacgccctcccgctgtcgctcgccggcattttcatccacttcaacgccctcacgttcccggagttcttctctcgtccatcttcgtcaccgacaaccgtaaggggcatgctcgacttcctgccacccgaagaacaaagccccgacatcggggaccactgcaacggcctccttttgcttttctctctccttgtggtaaacccggccactcgaaggtgggcgcgcttgccaccattgccccgcaccttcgccaagctggaatctgggttctttgacaaagaattcatcgtcttcgacactaccttatcgccgcactatgaggtttttaacatccaatttgttgacgtcggatggtacaacgtaaaaacgatggatcccgtcttgaagaaatcagaatggccaccatcgccgctcgtcctccatgtcttctcatcggcgacagggcgatgggaggagagatcattctctagagaaggggatgcagccggaaccgtggctagcgctcagaggctgtgccggccggagcagtgtggtactgtctattggcgaggagcactctacgtgaactcgtattttgtcatgatgttaactttagcgttaatatttttatttagtttcaacttgtattccgttttcatatttgttaatataaattcttatgtttattttgttcttcgtagggtatcatgtctgatgggacgacctatcaagtaatcaagcatcccaaaatttacaagagcaaacaaccaccatatatttacataggaaaatcagagaaaggagtgtacctcgcatcacttcatatgctggactgttgccttttaatttggatcctcaataaatcatgtggtcagtttaagtgggtattgaagcaccaaaacaaccttaagcccatgctactacgcctgaataatagtaaacaagatcacggaccgtagatcttacaagatgttaactaccatctttatagtcaaaagtttccaggagagtgggagttatacaatgggaactatgatccctctcattttcattctccaaatgatgatgcaccggcggaaaataactttgaatggtattccgatgatgataatattgtagaaaatcaaggtaactgtgaagagcacgatgatggcgactaccttgagttgcttggatttcatccttataaagaggtcatctttctgaattctatatcaaggaaaggattggcctatcatttgaatagctcaaagcttcaacatttgggtaacttatacccaaaacactataaccacttcgcccaacatgaatacataagccaggcatttccatacacaccgtgctgggtcgatgagttgcctgaagctagtacttcactagatagtctccatcaagattagcatgcacgttgtttgcatgcggaactctcttttgtaaggcttttggtttgtaatataatctcaagcaaagcttccaagtaatgaccatatatatctgcatacgtatatcacgttgccactgctctaatatatatttgtgacatgagttagctataccacatagaccatgaatactcgattactgtggttcgtacatactctccatctcaaaatgtaagcatttttagcataatagtaagtcaaacatttttaactttgactattaataataaaaaataaaaaaaagtcaatcatgtaaaattgacgttactatatttataattaaacaaactatcataatatgcaaatcttattatttaaaacatcttatttttatagatattattgatcaaagtagcttaggacagagggagtaacaactagtaacagtgcacgtgggaggctcgttcccacacatataattgcaaatttattagagacaatccattatatgccactgagtttgtcatagctctacgatttgccactgactttgtcacgttctataatataccatcgacttttacttaacttatatgatttaccatcgccgtccagttagtctccgttagtactgtacaattttgtccaaatgaccaaaatacccctaggataaaacttccaaaatgtggacaaaaattccgaaataccatattataaacataagattgtaaacattcaaaatttgtccaaaaacttaaagtctgacatttcagaatttttatccaaaatttgaaagtttttgtctcaggggtattttggtcatttggatgaaagtgtacagtactaacggagactaaccggatggcggtggtaaatcgtagaagttaagcaaaaatcgatggcatattatagaacgtgacaaaatcagtggcaaattgtagacctatgacaaactcagtggcatacaatggattatctcaatttattatgttttcccactgtgcatattaaacagaccatataaatgtgaagtttaatatgccacatatctctccgtttacaatgtgtcatataaacggaaaacaaccaatgataccaaatatacaatttgcgatagtttgataaatgtttggcataataagaagtgtataattgcaaaaaaagaaaatccctaatgtaggttatagcttccttggtctcacctggttatgcatgtgcatatatgcctgggcaccgtggcttgttgacattcctgacaggtaagaaaaccctgaaaaacaccaaatagaacggaagaaaaagcgaaaagaattactcgtggaaagtatcggcaatccctaccagtataataaaaaatcattatttctataatgatgcatttagcataattagttactactgttttcaaggtagcacacaaatgttgcatttagcataaaagagatgaagagagcctctggtggattggtggctagtggtgcactggtgcatcagggtactgcaagcagcgaaatcgccgactccgctgagcctcgggttgattgccgatgtttgtgactccgatagtggagcgagatcgatgtcggcgactgtgacgccgatctggtgacacgcggcgtgcaacgatgctctcgaggcagaaatcgacggcggcgcgatgcgtgggcggaggggttgcgaggaggcgtcgctgtgcagttggtgtgagggtggggcagcatgattttttggatgaacgcgagagagaggatgagtccgggtctctgggagggcggagagaggaagggggtgagggaggtgggagcgtcgtcgggcgttggattgggacaatcctgaccgatcaatgagaaataaggatgtaaaaatcaattggtaaataatagggtagaattcagtttcagcaaatatagaaataatggttaaaaagcttacagtcatagggcctcatcttttcacttgtgcttttttcttatcaaccaaaatttgaattttcaattttaaatttggagctgattttgagattttttttattgatcgctaagaacacgtatataaaagttttattcacaaattactttttgttagtgaaacgatggctgcgatatttcatcaaattagaatttaatatgttttaattaaattttctcgttttttctttccgttgcaatgcacggacacttttgctagtacctaattaagaaatacgcgaaactcctgatggggatcgatcggccctagcgatcgggttgccccccatctccttcacgtggtttctttttttttttgcaccgcattactttcctattttagtaaatttatacacctgaagtttgtacacctcaagtttacacatctaaagtttacagacccaaagtttataaatcaaaagtttatatatccgattcaaatttaaatttgaattatctccacaaaaaaaattaaatttgaattcaaatattttttatataaagtatttctatacatctaaagtttatacacctaaagtttatagactcaaagtttataagtcaaaagtttacatacccgattcaaatttgaatttgaattatatccgattcaaattggagtttgaattatatccgattcaaatttgaatttaaattcaaatattttttatatatagtatttctgtacatctagtctatagacccaaagtttataagtcaaaagtttacatacccgattcaaatttgaacttaaattcaaatattagtttataggcccaaaatttataagtaaaaagtttatatacccgtttcaaatttaaatttgaattcaaatatttttccatttcaaatttgaatttgaattcaaatattttttatatatagtatttctatacataaatttttctaattttttttatttttttttaaatttatggtgtagtaggaagagaagaaggggaggaggaagggggagaggaatatataggggatggggcgagcgatcgcccatcagccacgcccagaaatacgtaaggcttcagctaaaaaattttctccgtcttcccatttttgtctttttcgccgttttcctttctttttttcttttcccttttttccgttttcttccatccgaccgtctctttttttttctttttcacccttttttcctttcctttttccttttccattttttccgttttcttccgtccatcttttttcgccggtttttcctcttttttttctgtccttctctttcgccttctttttccttttttttcctttttttcagtttttcttcatcagctgcttttttactcttttttttcgtcaccttatttttcaattaattgcaaaaatcgattccccgttactcctttatcatttttcccatttttacctttcaattctgttttaattcaccggatttagtctttatttaaaagtcaatgtttttatcccgatttttgcggattcgcttcgattttgataaaaaggaaagagcagatcgattgtataaaagccatcaaccaattttggaaaatctagaaatatttgaccggatttgatggggaggatcagttctggcattatatgaacatgagatgttttcaccattttccagaggttgaagacgacagtcagctatacgagctggagctacagctctacttgtgggttaggtcaaagagaagcagtctaagcaaaggaggtggcggtctaggctgaaactgaaaagaaaaaaaaagggaataagcttttgttcaaaaagcaaagagtaaaatgtatagggagcttttggtccaaaactaaagaatctaaaaatatttttacccatcgcaacatacaggtattttttctagtgaaaactaatatccaccgaccaaatctagattagtctaaatttataatagaaattaagcacgagtaacgcgttgcacgcatggaacgatgaaaataagcacgatgaacacgtacatgattgcacaagggttagctctgatcgaaccaccacatgcacgctctctcgccaacatgcagcttataagcatctttagtggactaaagatccggcctgacaccctctagcaaccggcgaaccgacactaaagatcatatagtcctgttgtccttaaaaaccaggactaaataatgacgtttagtcctggtttataagagaaccgagactattgtaaaatttggccgaccgatcgaagatcgtttctccagtagtgttacttagtaattttatctaattaaatagcaatacaacagcatataaattaatatacacaggtcaacactgttatcgtcgtcaacataagcaaattaatcaagctagctagccttttgccattccaagttccaaccatggccagctagtggtgcacaagggggatcaccatggtctcaccatcaccctcctcttggccgcggccttcttcttcctcatcctcctctcctcctccctcgtcaaaatcaacgagaaaccgcccaagttagaccacaggaagctagcagctgcagcaggtggcacaaatgtcgtggaggggcggatagcggtctgcctcgtcggagcggcacagcggttcgagctcaccggaccgtctattgcgtggaatgtgctagcgccgcagtacccgcacgccgatctcttcctccacaacccgctcgaccgtgactcctacaagttcggcctcctcaaggacgcgccttgagtggttgcggttaggttcttccgcccacgacatatacccgagacaattcgcgcgcatgccagactccttactcgcccatgggtgtacgggtaattttgcagctctcagtttcgttgtcttctgtttgagaaattaattaattctgttttcacaaaatcatctggaaagaaaaataaaagaataactttgtacacactactaa

SEQ ID NO: 13869 - DNA, 1506 bp, Oryza sativa
atcatattaagtacaacaatagaaggaacaaattattaatcacagagttccttttacctgcagtgtacaagaagcatttccctcctttgctgacggacaacgtctggaggctgaggaacataggcaaagatgggccaatcgacaagagattggaggccgaggggatcaagaacgtccaggacttcttgaagcttaacaccatgaatcccaacaagcttaaaagtgtaggttctcctgtttcaattttgttcaaacactttgggggattatagttcataatttgtataatacaaattatttctgctttaatttgttctgttgtgcacacactgttcagcttgttggcatgtcagatcggcagtggagcgcgacattgaagcaagcaaaatcatgtgacatgggagggaaatgctatgttttcaaatctgaaggttgtgagattaaattcaaccccgtaggagagatcttagcagtgagattcggcggtcggatgtgctctttgcatgaactgcttccacaccaaatggtaacttccttcattccaccaaattaattaatccctgtatggtcaatgaaatttgattgtcttactaatttcttaagattaccttaaatttgctttgatctcaattgcaggtccaaatcaagcaattggtcagccaagcataccaacagtgggatcagatggaggaagtgcagaatgagatggcacttgttgataaaagctaattccatttcatgatgaaaagcccatgatttcttcaggcatgccaagtaatgaaattgctgtagctccctgactttgtcagctttatttttaatttcaaaaaagcatgcattgattccttggaccttattatttgcaggctatatcaatcaagcagagggattgatggagaattcaggatgggagccaagtgagatgagccaggaaagcatgatcagctctgcatctcagaatgccatgtatgttgacagcttgggaactgcaacaacctcaactgctgaaatggtgaccaataacatcagcactctagaacctgcatcaactgttccagattctgctttgtacagctggaattcgggcatggctgctgatgatcacttcagctggcagaacaacacaaaccttgtaccctgggatcatgctaattgatcattgctatctggagtccgaacaaattaatcctaattgctatcggtttagatagctagtgttgttatgcttttactcaaataataaatatgttcatattgagggagctgtttttttttctctaatcttaggttgtttggctcttatcttttcttaaccttgatgagtgcattttgtagcaatatctactggtcaagttagttattatgaaaaaaaaatagagggtcacatacgtcttccctattaattaatgcaatactggtagctcgtatatactagcactggtggagaaaccatctttcgtcggtcgggctaattccacaatagtcccagttgcaacaaaaagggta

SEQ ID NO: 13870 - DNA, 745 bp, Oryza sativa
tgttactcgccctacagactcccgagcatccaggacgaacacgagggaaatgtgtgattccctggaagattggatttaaggaggacatccacacgtacaggagtcggatgaggagcaagagagataccgaggcgaagattgcagatcttgagtacagggtatcgagctacgagctcagcatgcaagaggaggtggcaaggaaggtggatgaacgtatggccgcacatcggtcccaggatccccagccgtacattcatcctgcaatggtcagcccatcaggcaatcgtagcagctgcgtctcaacggggcaggtcggatcacagagcatggacgccatgcaaacccaggacgaaaccacctgccccgttgatgagatcacgcagcggacaccatgtgagctgcatattcccttcaagaacttatcaatcaaggtatgctcatagtttgatgatttttgacttgtacattccgcaagttgctgcttaggttgattactaatagataacctctcatcacgtgaaggtggcgtcaggaatggccatcccaacggacccttccgggacttaccactacaggccgattctagcaggatactcgagtgtcgaagttgagttggtggaagccgcgtacgaggacctcgagttggactacccaggaggagacggtgagacgcatctacgagacacaagccacgccatcatactatggcgcaagcagtacatcatccttcctgggcgacaagcgg

SEQ ID NO: 13871 - DNA, 3212 bp, Oryza sativa
acattttacattgattgattataaaagtaatggtccatacaaatctttgtgccggtataactattggccaacgatcaatagaacttgatagttacttttggtgttccttttagtatgtagaaaatgggctacatattttacaacttactgtatctttggtgagatgcacctgctatttttttctatatgttggctagattgtttcattgttattaatcgataccttgggtgcatgtaacactatatatatttcaaacaaaaaagccttctcgggtctaaattgatttcgcagtgtgggagacaattcatttgttccgtgcactgtggtatgattgttgtcatgatttaaatatttttgctctaaaatttatgattaaacattagaaatttacgtgatccaaacgatcactgtttgtgattttatgttagctaacgtccattgggcatttagtgacaatatttatattgcataatcttaaatgtgaagcctaccatgcttaccctattttatcttttttgtttgaaagaattagccatttatacaatcatggtagtttgaatactaaatagtttttatcttttaagtttctaaaataattggtagataaagctcttagctcggtcatctgtgatatacacctgtactcccaagctaatttggcccctatcacacatgtagtcacaagctaatttggcccccatgctgatggtgttcccattaatgtcgatgggggcaaaactgtgaccgatcaggagtcttaagcgtttctaggatgttcacgtggtggcttgagagttcttttaggaggtttaatggacttttagtatataatagataaatataattatattattttgacttaccatagttttagaatgcggggaataattttttttaacaccactcatagttaagtttattttacttttaccgttgttgatctaatttaattattgtgaatacattgataaaaatatatatgattattttttcatattttttatatttatctaaatgacatatataaaagtcagaaattataaccaaaatgtgacttttttgaaagttgaaatataatgaatatgatctttaaccatatatttagtcataaattatctaacgatataaacagataaaaaatatccatttagatttgtggtttctaaccaacattgcatacaaatagttataatagaggcccccactaaagataaatagagggacctcgaaaaaaatcccgtacttacgactccatgcgcactaaaatttttaattacatgaaaagatatgtacttattatgagtattgtgcatatctaatatgatgaaaagatatgttcgagagcgatgaattctagactaccaagagcgatgaattctaccaccatgcagaaagatgcggtgttttttttttctttttcatggagataattacaaataatccacaactttgcacgacaaaggcgcatgcacataattctggtgctcataacaatcatatgcgtatactgatagaatttgcaacaacattagagctaattaagtcgttttaccggacagggagtcagcaatgccattggcaacgcaatacgctatggacagtacggtgatcatggggttgatgcccactgcggtgggcagcacgctgtcattgcacacatacagttgctccacctcccagctctcgccatgggcgtcgacggtgccgttgcccaccgcggtgcccatccggcagcaacccatgtggtgcatcgagcagaagaggccccacgtctcttttagagattgatctaatggttaaaaatattgggtccaccggattaaatgaaattcaatagtttttgcctttttctaagagattttaagaatttctctaatttatcagagtgccacgtggtggcttaggagcatttataggttatacgtggcagcttagaagcgtttgtagaaagtttcatgacttttaatgtataatattatgtaccaaaacatggtcaatatggatcaaacaaaaaaaatcaaatatgttaaaaaatataaagccatctaatcattgattttttttaactcttgagctagaaacctaatagagcaagtgaggagatcggagactcatcatcagttaggtcatatgcgtgattcatcaacactactcttgtcatagatgatcttacttcttagatggattatccgtacagacatatctcaaacattcaacgttttgatccgttcgttagtatgagagctatcataaatgatttgtcaaggatggcttcgcttaagcgtgtcataaattgaatgtgtagattggcttaaaaaagtcattatttatttatgtcgccaagatcattcatatataaattaaagttccatgtaaaaatagatctaataatttttatagtaacaaattatggtgcatacccttaatacgataatagaagaagagagagaatactgagtgggaggagcagatgtggtggttcgtacgttttatacgtacctgtagctccaagagaaaagggtgatcggatcggtggatttaatgtaatggttagtattaccgggtctcctgttttacttaaaaataacagctagatatttttctttttttctcagaaattattagagcgtcacgtggcggtttagaagcttttgtaggaatcccacgtgccggtttgagagcgtttgtagaaagtttaatggacctttagtatataatatataataatatatttattttttggctagcccattcttcaaatttacattgcacgggctataatattgatactataggattcctcgacttatgagtgtttatagagtgccatgttaaatcatatctaccctggtgcaagtgaacttaggggtcatccgatggctaagatgagcccttaattagttgatgtcgtttcatatcagaaccgaaacaacatggaagtttgaacggcatttttcttaaaaaaaacagcaaaagtagtttgcagatcaaagtttgaaccaaatcttaattcataaattgcaccggagcagtatatgtttggggactcaagagtttggatggatccacatcgatggactcatggcactcacggctgtttttgtggcgcagatcttctggtgcagggcgatcactcagtgaaagaggtctacgtatatgtagtcgttgtttcgtcgcgcgtgcagaacgtaaggctaacgtagcacgttct

SEQ ID NO: 13872 - DNA, 819 bp, Oryza sativa
  unsure (1)..(819): unsure at all n locations
ttttgtatatgcatggtactgttcatctagattaaaatattgtggctagattaccattgtgattagcctaatgacctacttggcttagttatttatgccttgtttgatatctagcatgatagaatttatgagtttttcttgtcctatcatgtcgcaagtaggttatgcttgctgtatatgctttcaaataataatgcttggaataaaattaatggctaagtatgtattatttccaacattccagaaacctttagaaccattggtcatggctgctcatgctgttgatctgatgaggcctgagaagtttgctggtgaaaactttaagcgttggcaatccaaagttcgtcattatctggtgtcgcagaacttgtggtatgttattccacaagtgaggccgctgacccaacagcagcatgcggactttgagaccagtaatgatgtggctttaggtgtcatgctttcgctcctgtctgaccagctctacgacgtgtatggtgcttacaccagcgccgcagagctatgggaggcactggaccgtaaatattcggtttcagatgcaggacgttggatatatgtcgtggagcaatatcatgactttaagatgattgacaaccaatcagtggtgaagcangctcatgatcnttttaacgatatgggtgagatgtctcagnttggtgctattgtgatntctaagtttgtggtggngggcattattgccagcttncttcattttggagggattttgccactgcacttaagcacaaacgggaggacatgatggttgatgacctgattgcccacctggatgtggaggagaag

SEQ ID NO: 13873 - DNA, 2127 bp, Oryza sativa
tttggcggcataggttctaagataggttccaaacttcactctatctgaacacttaagattcgactatcatcttattattcctcgatccacttgacttgcagaagttgacaacatcgacgtcttcgagtttctccatcaagattaacgactactcaagttgaaagaggaagggggaagaacgacaaaacgatttgcaaagaattctagataaggaagaaaggaaaattttcacaaattatgttttcggaaaattagtccttaaggtttgaccatttggcttatcctacagtcaagatggctctgataccaacttgtcacgcccggaaattcactagtaatttccgaactgatttgtgcataaaatcctcgtccaggaatcagccgaggtacacaaactgacaatttaatatacaaatccatcataataactaaactgataaatacttacttaagaggcacttagtcctcaccaagaagaaaaactgcagcggaaaataaaatctagcgaagcttcagctccactcccacaggcagctcaactggggtataagccaaacgtcttctccttctggatcctttttcttcaactgaggttgattgattattgcaaaaatgagcatatgacatactcaacaagccacacagcaaatatgcaagtgcacaaggattccaaaggatggcataatataggctcatttgcaaaagcagcatttagcaaagagttaagagtagtaaaacagtagagtaattaattaaaaattttaatcaacactgaacagcacacccatgctgtacaggcccaaccatcctgaacaaccatacccggctgtacagatctaactccaaaccaggagctaagcaaattattatcaggtattaacatccataattattgtgagaggtgtgagactaatcacgaaaaacattgctcaacccgcccataaccgcgggcacggctattcgaatagttttactctggccagaggtgtaccactgtacccacaagacacaaccccacatcatgtcaccatgtgcctcaataccaccacggtacctcggaaaggagttgtgacaataccccttgcacaacacaatccaccacagcgcaccgttcctggatcataatcacccccttataaacaaggcatggactccccagtgacccccatgggcttatctcgccacttctcagtctggtgctccataatgaaccatgctatacaacaggtaaagccgttgcccacgctggcttgtggttggtacggttaatgtttcacaacagtagctcgtgaaccggtccttaattgtcatgagcacgactctcaaaaccatgtgctcacaacccaccattatcaagttttagttggcaagtaattaattagccaatcacgattaaccatcgtgagctatcattaagccatccttaaataatagtgagtcataagttatcccaatagtgtgctaatgtttctaagcatggctaagcaatcataactaatatctagctgaaccaatatataaagcccaactagtcaagttataataacccaaggtatcaaggaataaagtaatcaatgcaaattggccataacaaaggaataagttcacaccacccggtgacattcgaaaataaatgcacagttgaaataaatagagaatttaaatataggatcaacatgctcaaaggattgtgtttaggatctgtgtgacttgccttgcaataatcggtcttcaagtaatcttcttgatcacttccgacgcactcacgaaccttcgcaacgacggaaacgacaagctaacacgcaaaacgaagaaaaagactaataaaaaccaaataaacagtacatataaagtaaacaaacatgtagatcatgattttagatgaatttagcaacttgaaccactcaaaaccgagttacgatgatttagttatgaatttccgaagatttaatctattagaaaaaactggaaaaggagaagatgatgacgtcatgatgacatcatcaatggccggaccaagatggcgacctcgcccgagatagagcgacccgctgcggatttggaggacatgaacacgtagaggacgacgagacgaacccaacgatactcaccctcgtgccaaacgac

SEQ ID NO: 13874 - DNA, 1156 bp, Oryza sativa
cccaacactagcatcctcacgtagccaccccataaccttatcacaaacccacgctctctttgcattcctgaccttctcgctttttctagtactaagaaaaccatggtacatctcatggaccttaatctgaaaaagaaaaaagatgcaatttgataagaaaataacaaaatatgcaatgtaacacatacctgcactgctggaccaccatgaatagttgatgcatgaagcctccatccacatccttctttgatacatctagctctgaatctactaggatcagtttttttaacaaaaaactcgaattatttcttaatggaatattgagccacagccaatctaaactcacacattgaaggataaatagtctcaacagtcatgggtgggttctctttgtcatatgcaacttgtgggattactggatctgactgagcatctcgtgcaatccactcttcatcatcactatcagtgatacttagatcatctcccccttctacctcaggcacattatcagttccagcaatagagtcatcactctcagatgaagagtcatcactctccgatgaagagtcatcaataccaactgagtattgtttctcatcatctacacctacatgctcatagtgcgggaatggattttctaggtatgcatcacttttggatgcctgactagtgctgccttcctgagtaaaaaatgcctgagaggggactgaaagtgatggagtgcaaggcacaataacttgggacagattaatttggtttcccagagtgattaccactttaccccttttagtatgatgaaagcactcaaacattgctgtcaagtcctgatctttgcatattggaatgagttctttgctactagcatgaatataatgcaaacatacagtttcatttaaagcccatggatatttttcacaaatatcacccagaaaatctttgaagttagttacgtctgcatcaataggccatttgaaagaaaaaccacccggaaattcaggcctacatgtcttgcccattattctcacgtcaagtaaataagtagaagatgggtccattctgttgatgaacacatcgtcgatgtgtgagaagaaaaatgtgaaaaatgtaactgctctgactccctaatacaagtatattactcatagggcataagatg

SEQ ID NO: 13875 - DNA, 556 bp, Oryza sativa
agcgcgccagctgagtgaaacggttcaggtactcttgtactgtggtattcccttgctgtagtctcctgaactcattcttcttcatccgcatcaccgcagcaggcacgaagttgtcacggaaggctgtggtaaattcctcccagtttggttctccggcatcttcttctcgggcttctttgtacgtgtcccaccagtctccggctggtccttccaattggtttgccgcaaagatcactttatcggcctcacgtactcgaacaagagttagcttcttctcaatgatccttaaccaatcttcagcatccataggttcttcagctgtggcgaatgtgggtggcttggtcctcataaactctccaaagcttgaccctccgcggtcgccttggttgttcgcgatagcttgcagaacttgagtttgggtggccataactccggccagagtggttaagtcgggtgtctaagtttcgtcaaagctggttgttgcccgacgtcggcttgccatctgtgtaggttgatggagtaagtatcctattttctggggccagagctgaatgcc

SEQ ID NO: 13876 - DNA, 719 bp, Oryza sativa
aattcatcagtattgtacaaattgagcctccatcatcattaatcatcaaaatcattgttatatcaatcagtatcagttttttcatcatcagaattatcagacccagtcggccgaaggtcgacatcttggaatctctcaaccacgtcagcagcaatcttgtcagcggctttttgcgcatcattgatgaggtcaagagcagcttcttcgctcatcccatctgcaaagccatcaatggcatcaatgtcaactcttggataaagggatttggtcatcgccaatgccagacttgctcccatacttccaacttctttgatgttcttgaagtaagtatccggagcgactctcagcttgtcgaagatttcggcaacatcaagtgtactcggaccggcgttattgaagaacatggcttggatgagtggagtagcggcattagcgactttgtccctggccccttcaagcctattgatcttgtcgactaagacatcaaactgtgcctgggacttgatcttgcggtctgcatcaatagattcacattaacgaatcagcatatagaagataatggcttttgaggtactgattatttggtaccttcaacctcctttaaagatgagtccctctgttttgctagttctgccttatcattttccagagtttgaatttgcttctctagttgagatatcttggcagcttgcactacattgactctggttaatcaagat

SEQ ID NO: 13877 - DNA, 8158 bp, Oryza sativa
attacactcatcctaaaactacgaatctggacataaactatgaatctggacataacctatgtccagattcgtagtgtaatatattcggacggagggagtatttgctctaaacttcggaagaaacgttgtcttttaaaaaccttcaaaaaatacgttgtttaaccacttatttttgttaaatcaaagtgtttttattattattctgtgatgaacaattggcatcggagattattggttttgatatttggaatttatttttgaagtggttttggagatgattggatttcacaggtgaatctacaggtactgttggatgtggtccggtcagaccaggcatgtgctgccggtcagaccggcgtgtatcgcgcggtcagaccggcgcagcccgcggtctgatcggctgactctgtgtcgatttcggtttcgggttgtttgtttggatatccgtgattgtttcatgattatggcttctagatggatactatgagtatgtaatactgttgtttgctactaatgagtcaagttggagatagcttggtctcggaatatggtttctttgtttatttcatgtgtaggtgactagatgcctcgagagagtatttgctgtgatggaccgggagtcggcttggggataagacgacgttcgtggtgctcagagatcatgcgggatacttaggctagagttgatacacgtggttcgtgaagattccatatggcatacgatggaggtattgtgtgcgtatgggatgcggagtcgaatttggaaggagtttaaatttgatatgattggttatataaagtttgtttcttgtactagagggtttcctaaggtgtttaggacttctagtatgagtttggttcgtggctttaggctgcctacctcgggtatataaatagagggggagcgtgaggcttccctgtatcgcttttgagagcaattgagttgagagttgagttagggtttcgagtttagtcgaaatttttgtaaggaatactgttggtgcactttgtaaacacagagagaatcaataaagtcgtcatccactttaagagttcttcgatttgtgtttcatcgggtttcggcggtctaaccggcggcgcaccggcggtcagactggcggcatcccggcggtcagactggcgggtgacctgcggtcagaccggcttcagcgacaggtgacaggagctgatctcgacggtcagaccagagatacaatctcggtcagaccgacggcaaccaggcggtcagaccggcgcatctacttcggtcagactgcaatccgtcgaatttgagggtaacttttatttccgtaaagtattggtttttgggcataccaaccattcacccccccccctctggttggcttagttgttgtgattcaatcctacaattttaagttttttttattgaaatatctaatttataatccctataatccagtatttagccaaaaaaggaccctgattaggatgacctgctgtaatctgtttatgctaaagtgcccacctgaatgtcttcacctgaaaaaaaaaaggcaaaatagcagaggtctggattctgtatcttctgattgaacttttttagtatattcaagatcaatgtgaaataaagaagtaatctgaaacctcacaattgccatatgccaatgtgcagcactgatagctgaaagaacaaggatcgatctgctgaccaagttcactttcagaagagtcacaatccagcaatgaactcatatttccgtttcatgcctaaagtcacagataatcatatatcttttacttacacagtggcagatacagataattgtatggatattcatacatgggtggaactattcttgtttttattgcatttacaaaatgcataagcatatgcatcagaaaaggaaaaaataaaaaactaacacctatgaaatatgaatctatcatcctatgtacatctctacatattcacaagctatgaaaagaaccctgtatgtacatccaaatctgaatgaatttctaatcaagccttcatcttcgagaaaagaggaaggatccatcctttgctctaaatcggataaaagaaataccgtagactatccataattgctttcaatatgtttgtgaactaggttctacaatagtgacatcgacagagtgcttggagacgatgatgttgctggcgagatccttttggagttgcctaacattttcagctgtgatgattctacaagtgctccagtcgtcagcttccatatcaactcccaggtatgtgaaatggtcttgaacgctcaaactccatgtggagatgcacctaggaaataaacgagggaacagaaattataattagaagctaaaaaaaccagatttgagttgttaggttgttaaaatgagcctctaaacctgcagcaatttggatcttcaccactatcatcacatatctgttcggttatgtcgccctcagaatcattgacccatacctgaaattcgaacaagcatattatgtgtgtacactgtacaggatgtaacaccacatctctaaagaatattagcatatttgatttagattagtatcattgtcccatggaaggtgtgcagagcatctaacaacttgctgcactaggcattgattttgtattattaatggtaaatataaaaagggtgttaatacaaaaattcataaagtgtgctatagtgataaaatagataaagccagggccaagttaagtgtacaagagcgcattcttaattagcttatgtgcaagcctgtgaggcatacctctcttgggaagtggtggtaagttagatggggaagaaaggagaaataagggggcaaatgtggcacaatatcatgtccatgtgtgactcgaatcgtgttgggcacatatttggcaaaataagaggcaaaagcagcattgccaacacgaggctgtccgaaagtcatgagttgaacactattgcttccaagattgatctgtggacagagtaaaagaacaagactgtatcagtttacataacaaccaatgatggcattcaatttttttatggaaagaatgtgatacagatattacatctataatgtcttagaagagttgtaatctgaacactggatgtattagtaaaactttgagcctcgggggtacttacagcgagatcaagcgcacagaaggatgccatggctcctcccattgagtgccctgtaactatgacattgatatctccatatgactgtcttgccttgtggacagcacttgtgatagctagacgtaaaatcgtgttattataggaggagaaaaatccactgtgcacctttaaacagagaagtggagatattttaggggaaaaaaaaggcactgatcttcttttaataaaaggacttaaggagatagaaacactttgctagcgataataacctttgcgttaggcatgttaggatagctcagatcaagttgtttccatatcaagtccttgatccaattctgcatactgagtaagcaaatcaagatataaatcacatgggaacagggaacagtaacacactgtgcaaaatcagtgtacctgttttcttgagttcctcttattgcaacaattattgaatttaaattataatccacaccaacgaatgcctgttacattgttcacccacatagtgtcacacaatataaataaaatcattaaacgcttaatgtactcaaatatcatcgagaatttatgatattagtttgaaatttgtaagataagaacctgtaggcagttctccacatccacgattagagatttcatctcaaagccctatttcaaatgtagtcatatcaaaactagcaacaaatttatcctgtccatgacaaaagaaatatttttcctaaagaagaagaaaaggaaaatgcttttatgattcattaagaggaatggcagatcctgacaagcggacatttgaggtgattctgcccccaaccatcagtaacaatataagctttacttcgcagttaatgagtatccctctaaatatgaattgaacagaacaaacttgaaggcttcttacttgagtcaagtcattacaccttgagcacgtccatgtataaagagctgttaaatctgtcatgtacacctggagaaaacgaagagccatcagctaagttcttcttcttcttttttcatttttaaagtagctgattttattttggggcaaaaggagaaaacaagaaagagagacagttgcctttgtgaaatgcaaaacatgaacagaaatgttacctagaacacatactgcttatgtaaaaataaggaaaagtttcttacagcagaagcatattccacaagagtcatggcaagagtatggctatagttcaaagtttgctgagagtgctggacagagatatctgttataatgaaaaaagttagttcactccagtttttgatgatgagagcatgaatacaaacattgatgatcaactacatctactatacgaaggtatgcagcagacgaaccgacattatattcggtaataaaatcaaatgttgacaaatgaaaagaaaattgattaaggacatttgacttgtttggacatgcttaagatattaagccccatttgctcataagtgaaggaaagccgaaagctgatttcatattctcaatttttatggcatcaaacttataggaaaagtggccccagtatcacgttctggcctggtaaacttgtggtagcttcaagctcaatcttaaacctcaaatcagcagttccatgtgacgagtaactattaatgccccaaaaattgtgctaactgctagctaaatcttcttgtgaaattaagcccaatcggagtaggtggtgcagaaaaaatgctcgatcaagttgtgtatataatatatggcagatggcatgcagcatatagcagtactaaataaactttcaccaacagagtgtcaagcttgcattggtgaaggccaaactaaagaatactctataaatgtttgaacttcacatatttcaggatcctgagacaaagttttatgaatgcaaagaatccacaagctgtaatgaagtggaattcaagtttaaggaagcaagaaagaagttgagaactcaataaatattaggtttaaggttcaaatatgtgtttggaataataggaatctctgagcacaattatatccattatctttcttgccatcaacttctttatttccaatgttgttattttctactcacccaccaaccttgtcttccttttcagcaattagggcatcaattatattagtaaggacagggcagcaagaaattccaactgtcacccacctactcttgctcatgcatccccaattacaacagcagaacagctataacttggtcaactagtccagtaactccagtaaattactggtcatttcataccaaaccgacagccaaaacccagaacttggtaaaatcaaaagaacaagacaatctcatccatcatcagcactccccatttctctagaaaattaaaccttattacagatgcctgcataagcattggtctgctttctcccaccaaagcagtcagttactaataccttgatttgctatttgttctgttaaacgttaacccattttggaatacattgaggcaaacttagaacaattacccaacaagcatcaaaattggaaacttagggcaaagggtcacatgaaactacctctcccatgggaagcatttgacagcaagagcaccagagccaacacactgacgcatctccacctctccatgaacctacagacacatccaaaccaacctcccatcatcaaatgaatcagataagcaagcaaaaaagaacccaacttgatgagcctcgaaatgcagagcaaacaatcccagaatcgaaccggaaactacaccaagttatacccttgcatagtatgaacaagaacaaagaagaggaggaacaagattatcagtggggagaagagaagagaaaggaagcttagggggcaaagaatttgacctcatccgagctactacctccaactccaagaaagcaagaaagagaggctggattggatgaacaaagttacaaaacaaacaaaatcggaggaggccgagtattaatgcggagtgggagcccagcggtcgctttcccggcgctgtgtttggagggagaagaagaggaggaggagagagaatcagaatatgcggctctccctcctccggattatgctatgccaatgccaaggcctcaagatggtgggaccctaaaaagacatcaactttcgctgtctcgtcactcctgaatccatgatttgttcaacaagatctcgcaagaaaccgtgcatttctcatataaacaattaaacaaacgagcaccactctgtctttgaataattctgaagaaatttactgtactactcttgtcactgaataatctgaagaaattgtatccaggacattctggatctgaagaaatgagggaggatcgatgaatcactggatggatcgccgccgctgtcagggcaggtggccgtcgctggcggctccagcgaggcttcgacgcgaacgtgaggacgcgtagatcggagaaagaaatggagcccggatatctcagattggatggagctcgtgtttcctaatcgtgaacggcaccgatcgagtgcagaagaggaggcgaaccaacacatttgcgacgaattacgaagacctaatcgatcatgagatgatgagagagacctgcaagaaacagattgctcccctactcatttctccacgtaatctctcaccatgagagcacccacaatggtaaagtaaggagctatctatataaaacatatacatctcagcagtagactagattaatagtaaaccactttaatggtatgtctacatgggtatctatagctctctaatccattgtttcgtttttctatagactatctccaggttaaggttagtagatagctttgctctctctctcttcatttaatctcttctaagtaggaaaatatgctaacatggatctcttgtagagagcttatagataagcattgtgggtgccctgagtgttgcttaaacacgaagtgatatctctcaaagaaaaaaaaaagaagaggaagagcggactagtgggcctgaaatgggtcgcccccgttctgggccgtcgaggaggagagtggtgtgggctataagcccagcagaaactggaggtcttacacgaagaggcccagttgatgggccgatccatgggaaatgtctagtgggcaggcctggaagatggagtcgcgagcccacgtcgttgtaggctaacaggccgaaacagcaactgcatttgttcgtgagttaagtttgcgatgatgacgataaattgatgagatgtgtaatttgtaaatgggataatttcgtttttacccccactttaatgtctaatattgattttatccctattttttagggttttcgtttttacccccacttttttaaccgaaagaggcgtttacccctggtttagacggaagttagtgagcccgggtttatggcagttaagaaataaagaaataaatgaaataaagattttttgaatttgtgatttacctttttacccctgggaaatatctaaccctatactagtcgcttctctcctctcgcacgcgggtcactctcgaaaccgatctgggcagcacaggcgacgacgaattgggcggcgtgcgggcagcggccaggcgacgacgtgcgggcggcggccaggcgcagctcctcctgccggcgagcaggcgtgcactctgcgcgggctaggcggcgggaggaggcgatggctacggcggctcgtcgcaggaggcgacgggggcaacccagccaggcaatggtggcggcggcagcgagtgggcggcggcgacgagcgggcgtcggccatgcgcacctcctctcgctggtgagcaggcgcgcgctctgcgcgggctaggcggcgggaggaggcgatggcggccgcggctcggcactggaggcgatggcggctgggaggagttgcttgagttttcttctttttttttgacaggggatgttgctctaatttgtgatttggatctgcttgattttgggatgattgcagcttgctatttgtcttctagttttgtaaagaaaaagtgtcaaaattatgcctaaattctttcagtttttgtctaaattttatcaaatttgtggcaaaagtatg

SEQ ID NO: 13878 - DNA, 6652 bp, Oryza sativa
ttcctgcagccctattatgtgagaaaaaaataaaacgatgctagccgcacaattgcgcagccataagatctggtaatacaaaagtaatattattaataaatttgctatgaaaaatagactttatatagccatattttctgttttgtcatcaatatatgattagaaaagagtaacaaaaaaatgtgtggtttggagctaaacacttgagcagttaaaacagaagagaggaagtactatccacttgcttcacaacagtacaacacaacacaacaactgccaccaacaaaatttcagttgctgagctattaaaaacaacactaaatttttgcctcccaatgaacaactacaccagcatcttggttgcccttttgtttatgccatcttgagccttgtgccctcgaggccttgacttccttcccctacccccacccccaacatctccctgaatttagctgctttcgcggcacagatcagtgcgcaagccataaagatcgagccttagcttcgagctggaatttatcggcggatcggctggcattttttcagtttgtgcgcgcgcctcaagctcaagaaccgggagagagatgagctgcttcccgtgctcggggtcgtcggggaagggcggggttgacgccaagagcgtggcggcgctctcgccgggtccgcggcccgcggcgagcgcggcaccaggtgaatcccgcatcttagcccccctccgatttctcttcgcagggtgtggaaagattcgatttcttctggtgaatccgcttgctggcgttgccccggtcagctgtatgattctgtatcggtttcgctggttgcgaatttgcagcgagtggctcagtgcggtagctgcgcattggtgtgatccatattggctcgaattctctcttcgtttgggtttaaagggtaacagtgagaaaaaagaagtcaattttgcatagcgttgattgtttattatgctttcttgcaaactggcgctttggtcatttgattgtggtaaataattcaaggctttaggtttgtaaatgttagtctggttgcttgttgagatagtggggttgaaggggacgcaaagctactttcttggaaagaaaatgtaattgattgttctcgtgagaagtggagtgaaagggagaggaaaataaaatctgaactgaagcttgcagctataataataatattattgcaactttcagtctcaggcgaccaggcagtaatgtttgatgtgttgtttactcttgttgtctctaactgattccttcgcgtgggtaattgcttgcttcgaccttgcttgaattacagtccaccctttgcatagttgttgtagtctgaagcgagtacagtaatttagttgcgtgttgctgcgcatgcaagtattatcattctctcatgagatcattgaattgaggaataatatgttaaaatttgcatgttggatgggtcaagatcgatcaaactcatcacgtggttcaggcattaagaaggacgattctgtccgaagaggaggaagctctgcgaatgatggtccagccaaaattttcactttccgagaattggctgttgccaccaagaatttcagaaaagactgcctgctgggtgaaggtggctttggtcgtgtctataaaggacagatggagaatggacaggtttgctattcctaacattggctgctgtgtgctcttgttcattagctgcaatttagagcatgatttttctgagtgtccgacaccttttcttttgcatatatcatctagcaggttattgccgtgaagcaacttgacagaaatggcctacaaggaaaccgagaatttctcgtggaggttctcatgctaagtctcttgcaccatcctaatctggtcagattaattggctactgcgcagatggtgaccagcggctcctagtttatgagtatatgctattggggtcactagaaaaccatcttcatggtaagcttctcagttctcactacgtgattttactgtttcagttcaaagtttgcacattatcaataacacttagttgattgagcttcacataacatacagaagaagaattgtgaatttcgtgacataatgggaaacattaatgtttaagttcagagacactaaaacacacctcctgaaatgtcaatgcacattaaattgatagtgatcaagttatgtccttatggttcctatcacaagatttgtgtttgtgctttagtctcaacctgctaagttgattcctgacctatttgatttgaaagagaacttgccagctacccttcactgtcttactgtagtttgctactgacaacatttaattttctttagacattgctatctatcattttataactcatggggcactttcttaatagatcgcccaccaggcaagaaacctcttgactggaatgcaaggatgaagattgctgttggtgcagcgaagggtttggagtacctgcatgataaggcaaatccaccagtcatatatagagatttcaaatcatcaaatattcttctgggcgaagactattacccaaagctatctgattttgggcttgcaaaacttggtccagttggtgacaaaactcacgtatcaacaagagttatgggaacatatggctattgtgctccagaatatgccatgacaggacagttgacagtaaaatctgatgtttacagctttggcgttgtcttccttgaactcattacaggacgtaaagccattgatcacacccaacctgcaggggagcaaaatcttgttgcatgggtaggttcatccttttatttttaagaatgtgtgggctcaactgtactaaattatctcccttcctttgggtgtagaggggatgttctgtttcaatttcatcatgatgtgaagtgtcttatccttataatttgcaggctcgtccactgtttagagaccgaaggaagttctgccaaatggccgatccatcgctgcaaggttgttatcccaaaaggggtttgtaccaggctttagctgttgcatctatgtgcttgcaggagaatgcaacatctcgacccctcattgcggatattgtcactgcactttcttatctagcttcaaatcattacgatcctaatgcaccttctgcaaagagttcgaggacttgcccatccaccccaaaggcaaaagcacatcgacgaacaaccagtgttcctgatgcccaacatgctgccgattcacttaactggaacttcccagacttggggaggaaggaaactactagaggggaattcgagcaggatcacagtgaaggttatggcagtggcagtagctctggaaggaatgatggtctagatgttccagaactgctggccttgcataatggacaaaataacagtgaagctgatatatatcacaagtccagtgtcaagcttgatgcccatgagaaacagagatcagggtcaggcaaaggcagcaggcagtttcgatgcacatacaaacagacattgttgcaattcttttcccgattgctgccaattttgccagacatcttctctgcttctgttgagggtaggatactctttgttggtacagttgcgcgctgttatggtccaggtgctgtatgactgtacccatggttgtattttagttgtttccaaaggtatacatgaagatcatgatctggttgaagcaagaaaccatcttgtcgcagataaggagcatgcattttgatcggtgtcaattgcattctacctgtaaagatttttattctctttgtaataggtcacagtttgtgccatacctatcattcaggaattaggatgttttatacatacagaaaacaattcttaccagaatgcgtgtacagacctacatgctacagtggattgtttgtgttttttttacatgtaacacaattattttgcggacaatgacatactgtatagaccatagagtgtatgatcatataatgtgaaagactcctgttgttagaaatttacctttgtgcctgaatgtcatattaatttgtagtgattaatgttgtggtttttactggagtggagtggaatgggagaactttgcagtgacacaacaaggagaactgggttttggcagagtttgaggatgccaggagctgaagattcagaaggttcagccttcttcagagttccagcaatccaagcacaaaggccccaaattctttcgatatattgatagctataattttatttatttgttatgagcagccgaatctccaatgcagcatagaaaaggaggtctgagttccgtagaatatcacggaagttagtttttggttggtaagctcgacatcaaataaggaatgaatctgaaactccataactccacatgccaatgtacaccagagacagaacagcgattaatttggtgctcatgttcagtttcagatggtttacaaaatagtataagtaagtctaccatctcaaaaaaaaaaaaggagctaagtcttcaggtgccatgcaaagcctgacagaactcttgttcagtcttcggcatttctgttgccatttgagctttgccagagctctctctttgtccttcccaaagcaactgttttttccttccttccttccttccttcctttctttctttctttctttctttctttttggacagtcttcggttccttcaagaagacttcaataagctgctgaaatcctgagcggatgaacaggttattaaagaaccatgtagcaaaggaagatatatgtggccggctgattgtacaacttagaaccttccaagtaacttgtaagtagataattcaagacttgcaaagctagatcatgcaaacattagccgcttctgtgagtgcaagcatacatgaactatttgtccaaaggttctaagttatgctccaagagccatcgtcccagcattcagccaccttaaatcaggaccctcacatgttgagaaaatatttgccaacacaagatttaaaggtacttttcctacccagatatccttccagaagctgctatccatgtggaaatatgcttgttggaatttggaacatatattctcactgtttttttgtcaaccaaactgttatggcatcttgtttatctatcattttagacaacagtgatatactcaagcaactccgatgacaacagtgataaaaggaaggacaaattggaatttcatgatatttgatgtcggtcaaaggcactctgtgctgcctgtagtgagtacaaacagccaggacatttcccctgtgtttgattttgaaggacaagtgaagaatcaagataccctattggcatggctcaagaaggagagtcttctcttagcagcctttgatctataacaccacacttcaaacgcctccgtcaagtctggatacttagcatgcttcgactgaagccaatctgacaaaatgtcagcttgactgttcgacggtagcgttagcacaattgaaacaatagctgattccaggctctgccagacctcactgtctaggttgatcttaggtgcttcagcatcaccgtcatcgtcatcgtgttcgggatgtccgaccaaaggctttgttctccttgcaaagccaatccaaacattgacagcatcacaacgtttctcggttgggagaacaatgttgccaaatgcaatcgcctccaggacctttgcagacacctcaatcaccttcaatctagtcttcaggcagctgattcccccacaagctttgtcgacagcttcaacgacatcggatgaaaccccaatccagtaaacaacaacacatttcatcatctccagcttgctcaagatctgacagacccaggagatatctgaaacaagagaatgcagctcctgctgaacctcggcgtcgccgtggcctaaaggcgcctctccctgttccatcaggattgaactcgtgaacccactgaacctgctcagcaaagctgcaacacaatccttcacttgagacctgacaatgtcatcatcgaaggctaacaatggcgcgtcgtcgtcttcggtgagcatgtactccagctgctcctgagccgcggacttgagctcctgcggcggcgagcgcgtcgacgtcgcgtgccggaacgccgagaggaggatgccggccaccggcgcgggatcgatcgggcggagccgcgcgaggacgcactcgtactgggggccgaggcaagggatggtcctgaggatctcctcctcgtcggcctcgtcccacggcgcggactccaggtagtcgacgcaggcggcggcgacgcgcgggcaggcgaggtgggcggcggcctggaggacgccgagcgcgccgcggacgccgaagcgggagcacggctcggcggcgtagaggaggcggagcgcggtgacgtgggggctgaggtccagctcctggcagtggacctcgacgcagtagcgggagccgaggatctggcacgtgggccagtcgtcggagaggcggtcggcgaagtacctgctcccggcggcgagcacgccggagtggcagtagagccactcgtcgcggccctccggcgtccgcagccgcaccaccacgtcgctggtcgcgaggtcccgatcttgggccgccccgctgccctcctcacgccactcatctgcgaagctcgggcccgcccgcccgccgcgtgggttcgccggagctccggcgacggctcaggtgaggtggagattggggaaatgatagtgaaa

SEQ ID NO: 13879 - DNA, 6360 bp, Oryza sativa
  unsure (1)..(6360): unsure at all n locations
cgcggagcccgcgccccacgtgacggccctcgtctgacagcgccgccgcgggttccctgtccccccgcacctcgctcgatcgactcatcgccattgctctctcccgccggcgatcgagaccgcccaccacagcttttcatgcgtgggcgcgcccccacaatattcgttagtccatgtcgcgccgaccgcctgttgccggccggtgataacgcggaatattatgtatccggcccgttcaaacgggatgatatcttagaaatatcgggtattaggtgatacctactaccatcctgtctaaacgagatatcagccgatacctagtaagtatcagggcaggtgatctctctgagagttatcatctcgcctaaacgggataccgttatatagacatttcaaaagtttattacttttttataggagagaactacaaatcgtgcgtccaattcccaccaaaagttttttttgctatcaaatgttttagttaaccactaggtgaagcattaatttatacatggtgaaagaaaagcaattgaaacatttaaaaaaattgtgaaatacagtgaaaatacaagttgaaacaatgttgctgtcacttatgaaacaataagttctaacactctgaaatatatatatatcggaatataattacgggatatcttgttgtaaagatttaattataacaaatacaacattgtgatcggatcatatattggataaataatttaggagaaaatttattttgaagattgctatatgcatgcatggatgaagtggagagagagagagcaagtagtatgttcgaagagagagtaggggtagataattgcgtaaattttatgaaacttaatgaaaacatatgctacaacatttcgctatcacacatgtaacattaaatttttacaactgaaacatatatttttctttcatcaaaatataatcatataacatctcacttctcactgtaaagatctaattaaactaatataacggtgtgattggttcataaattggattaataatttaagacaaaataatttaaagcttaacaatgagataattaatatacatgggagaaagagaaaaaaaagtacaatatagtactgaagtacaaggcaacacatgcatacgcaagagtagcggagggagtaaagggcgtttgatttttattttgctggatcggtcacccgacctagatcattctctctttattcacgtttagctaactaagtgttagaggaatcataataattcactaaattcgaaataaaattaattatgtgttgtaattgttgtaatgtgttttttctataaacttagttaaaatcaaataattgatctaaaacaaactcaaaacaccttacaatatggaatatggaagtgcagagagtaaggccctggttgtttcagactaatattattgtaatctagattattaaatcagattactgtaagctggattgtaataagttaatatagaataagttgcgtgttgtttatttctctggattattggatgtatctaagggtagtgggtatttagctactcaataatctggaaaaaaagctcctctagagaagattattagattatactaatctggcttatagattataataatctacttgtttgttttagcttacttctaataatctaaattataataattctaagctgaatcagggcattaaatatacactctacatgagtttgcatctggccggtgcgacatggctaacgacgccactacgatcatcctcgtccatgagcgcctggttccacccgtttttgtatattctctgttgtcctacctacaggaattgatgcatagatttccctttttcccatctaagttcaaaggttgcaggatataaagatcttgattcctgatcatttatccaccaattacgaggagttggcattctcatatgtaattataatacaatcgtaatgtaattacatgtaacttgcatgtatctacaatgttacttccaaaaatccctccgtaacatcctattttcgtgaaaacggagatcgtgagaacgaatcctctcacatgtgcgcaccctatgactttttccttcctcacttgcacaaatcttgaagtaaatctaacggttcaaaattatgtgaaagttacatgcaagttacaataattacattgcgattgtaatataattacatctatcaaatttttaggagaaaatttctcgacaaatatatagcaaaattgttctgaattattgtgcttttgaaagatcctcttgattattattggactcgttttatttcatgtgagatctttccgcaccaatttttatgcgacttcaatagtaggtttaatttacaaaaccgaataaactggttccatggttcttagttgcatctattttcacatgaaaaaaattaaatgcatttaataagaatatgttatcggaaagataattaataaattaaactaggcataactaagatgttgaactcaatggagaataacagaatagccggttccttaaagttgctgatgtagtaaagctaacgtacaaatgttgtcttccattggcaaaagtagattgatgccatgaaagcttggtgtagcaccgaatctgcaggacaagctagcgttactgtcaaatagaagaaacgcaaagttaccaagttacctactatcttccgttcatccgtgggagaagtatacatgacaacttcatatatgtaaggaacatggtcaggaaatatcataggaccagacgaccaattcttctcttcaagctggacatttccaaagcttttgactcagtctggtgggactacctcctcactctcctgcaaaatagaggattcccaccaaaatagagagaatggataacgggtctcctctcagcatccacctcaaagatcatcctgaatggaatgcctggggaggcaatcaagcacggaaaagggcttcggcaggggaccccctatcccctctcctcttcatcctagcgatcgaccccctacaacgtctgctagacaaggccactgagcttggggcgataagcaaattacgagggaaagcggtacgtttccgcatatccttgtatgctgatgatgcagctatcttcataaacccgaacaaagaagatatgcaagccttcactgatctccttggtcgctttgggcacgcaactggcttatggacgaacctccaaaaatcacatgtggccccaatcaggtgtaataacttggacctcgatgacaccctaatggacacgccagcaaccagagcaaacttgcctatgaaatatctaggtctacccctgaccacaagctggctacggaagacagacctccaaccgctatatgacaagtcgatgagtcgcattgttggctggcgaggaagacacatcggtctagcgggacgctctaccctggtaaaggcggtgcttacctcacaacctgtcttcctactcacaggactcaaagcttccaaggagtccctcaaggtcttagataaacaaaggagaaaattcctttgggcgggaggagaggctttgacaggggggaaatgtaaaatcaattggacgcgaacctgcctccccactgcttccggaggcctgggcatcctaaatcttgagaaatttgcaagagccttatggttacgttggctttggcacgagtggaaatcacccggaaaaacttgggtgggctctggcacgccatgtgacgacactgataagctcctctttgcggccgcacaaccataacgattggaaatggtgccaaaataagcttctgggaatcggcctggacgcaggggaggagattgaaggatttgcgccgcttgtatacgcagcctccaagaaaaagaacagaacgcttcaacaggcttcgcaagcgaaccaatggcttcttgacttggacttgccagggactgcgagctggacgacagacctgattgatcaacttgtcggggtttggatcgccgttcaggctatacacctggtagagcacgaggaggacaatataacatggaagcttactaaccatggcgagtacacgacagcatcagcatataacgcacaacttcttggaaccaccgctactaacttcaataggctaatctggaaagcctgggcgccgtgtaagtgcaagaccttcgcctggctaatcatccaaaatagagtcaggacctctgacaggctggcgacaagaggttggccaaacggttccatttgccccttatgtcgtcggacccaggaaacaactctgcacctcctcgcagcatgtagatacacaaggagagtctgggcggcactagcggagtgggcgacgtgcgagcaactaaatcctagccaatggaggcaaacttcaacggtgctagattggtgggaggctaccgcaaacatacaagagacacctaagaaggcactccgcactttgatgttgttggtcgccttgagatatggaacgaaaggaatcgcagaaccttccaacagaaggagctttcagctacctcccttttagccaagatcaaggaagaggccaaaacttgggccttagcaggagcgagaagtcttaatagctgctttcttttagttagctcggaccaaaggtcctagctcctttcttttttcctttcgctttgtaaagttctccttctctattcaatgaaattggcgctcgtcgattcgttcaaaaaaaatagactaagctgattctaagaattcaaactttgtttcaaaacaagttgattcttacagtttacaaaaattatccaaaaataagttgatttatatatatcctcttatctattcttggtctgtaaatcgacaagttttattctcctatattagccgttatacatatatatagcagcatgatgtttttcatatctcatttctcttcttaaatattttaattcaggtgctgtaaaaaaattgccatgcatccttagttgatgtagaggccgaatcttcactttgtttaaaaagaaaagatgaatacatgttgccacaaaaatcctagggaacctatatatattaccacgaggtacacgctgttgaaatgtccccgtagaaattgttgtcatgcatgtgaagaaagcacaattatcatggttggcatgaaagtgaaaccggtcgatatagaaggatgagaagaatagattcattttttttttgaagaaaaagcggcaagagaattgccgattatattaggaggtagaataaagtcttacagcatagttcttagaaagattaatacatcttgggaagaaaagataggtagaaaagtagagctagtaataaattagcgcggtttgaaaacaaaatcccgatctctaatgtcttccattatagcagttatagtctgcgggatgtctggtgattggttcctgaagatttttgcatttctcattaaccaaatacgccaccatggtgttaattagaaggagaagaatagattcattcacgggtaaaaccccatcagtcgacgtcgtcgcgcgctgtactacgtggtaatcgattccatcgtcgcatctgatctcaacaccactctacatacagtatcttttagccaagccaggtgtactaccacacactggcagtatgtacagtactgcatccagctatagcccccccnnnnatatacggtgatatgcagacgcaggtagcagcatcatatcagcaacgagcagatcgatcgaagaggatagataggtagatagaaataatggcgggaggaggggtgtgggtgttcaggaacaacggggtgatggagctggaggagcaggcgacgagcaggaaggcgctggtgcatgtggcgacgagcgaggtgatccggtcgacggaggcgctggagcggaggctgggggcgctggggtgggagcgctactacgaggaccgcgccaccctgcagctccacaggcgcgacggcagcgccgacctcatctccatcccccgcgacttctcccgcttccgctccacccacatgtacgacgtcgtcgtcaagaaccgcgaccacttcaaggtcgtcgacctccacacctagatttatcacttattacatattaatgcaaaaaccatatatatatatatatatatatatatatatatatatatatatatatatatatatatatatatatatatatatatatatatatatatattgctttgcttaatttggtgtggtgtggtttggtttggtttggtttaatctctgcatacatacataatcatgcagatggcgtaatgcatgcatgtacgatcactggtaatgtaatgtatataagtgtgtaatgtgcactgtgtgattgatatatatgtatatgattgtaaaatcaaatgttcaatatatatctatactagaaaaaaaat

SEQ ID NO: 13880 - DNA, 595 bp, Oryza sativa
acatctctggatcatgcgttgataggttgctcctgcgttctttaatccaaaaggcatggtgatgtagcagtaggccccgaagggtgtgatgaatgaagtctttaagcagttagattcctttagtcggatctgatgatatcctgagtagcaatccaaaaagctgagtagctcgcagccggcggttgagtcaactacctagtcaatgcgaggcaacccaaagggatctttggggcatgacttgttgaggtcggtgtaatcaacacacatgcgccattgtcccgtcttcttctgaactaggactgggttggccagccagtcgggatgaaggacttccttgatgaagcctgctgctaacagcttggccagttcctccttgatcgcatccttcctatcctgcgcaaaacggcggagttgttgcttgattggtttagcgtcttccttaacatgtaaaaagtgctcaatcacctctctaggaataccaggcatatcggatggtttccacgcaaagatatctttattattttgaagaaaggtgatgagcgctttcctatttacaatctaactcagcgcctattacagcagtcttagtaggatc

SEQ ID NO: 13881 - DNA, 537 bp, Oryza sativa
attccactttactttctttcagaggtgaggggagcatttgggctttggaattctgcatatcatgcttgttgctcttgggatgtgacttttcttttccgaatgacacctctgattggggatttccatctggtgggtaatgagttgatccatttctgtcttggagagaagtaacacttctcttgttttcatgtaccatggaatcacctttagtatccaagactgccatcctatgttggattgaagagccatcagtaagcaagttatttttattagcataatgcaagtggttatgacttctagctgcattggagcttttcaaagaagaatctttcctcccagatgcatgctgcagatcatcatccaaactccttcccgaaataatcccattggaagcatggccttgagttaactgaggcaattcattatctttatcagagttcccttgtgaaaaaccattcataacaggttcactagcaagcatgctctcatgtgacttcctggcctgccgaacattatctactataacttcagtattct

SEQ ID NO: 13882 - DNA, 641 bp, Oryza sativa
atatgtgttttactcctgtggaatatttctgttaaatttttggaatttctgggtttctgtgtgatgtagctctggccaccagtggaaggtctggtattttataagcttcttgttcacattgcaggaaacaaataaaaatttggatgagatagttgaactggcaaagaaactccaggttacatttctgcaaccttaaaattgttagcattttgtcgaaatgcattggttctgctctttgctcagatatgatctgaacttcatgcaggaggagaccaatataaaaccactgtgggggactgcacagcttttcatgcacccgcgctacatgcacggtgctgctactaggtagatcagttttgctgcccctttgcatgaaatttggagtatgttctgaagctaatagaagccttcattggtactgcagcccagaggttaaagtgtatgcttatggtgctgctcaagttaagaaagctttagaggtgggttatctttgaactctgaacattgtgataggttttccataagtcaattcttgatttggcttttaccacttgaaggtcacccactacctaggcggtagaaaactatgttttctggtgaagaagagagggttaccaaactcttcttaattctgacatgaa

SEQ ID NO: 13883 - DNA, 570 bp, Oryza sativa
  unsure (1)..(570): unsure at all n locations
actataaggcgaaaaacgactcgggacaccagcgaaaaggaagcagacacnggaacggaaagcacccaaaaagggactgaaaaccagaggtttgaaggcaagacaggaaacaaaaccgaaggagacagggaagggaacgctaagatagcccgaccaacgacacaactacggaagaaggaaaagaagtttgagcggtcagaacagggccaggaaagcctggagcagctcaaagaaaagctgaccacggcaccgatggaaggtcttgcagacatcaaaaaagactgagatatatattgtgacgcaccaaggcaaggactaggaggagaacggatgcaggacgggaaaacagaggcctaagcgtcacgacaattgcgaccacatgaggaaaactaccctacccaagaccgagaacacgcagacgtggtacatgcgctaaagaataggagacaatatctaaatggaaaccaatgcgatagctacactgaccacaagaggcaaaagtaaatctccacccagacagaaacaaaacggaggcaaaggcgatggactagaaaaaatcaaggactaaga

SEQ ID NO: 13884 - DNA, 626 bp, Oryza sativa
tccttgctaacattggcatcagtggtgccattattgctatcaccattggagtctttctcagagtcaaaattgctagggttgtcattctgggtgccttcattgatactatcgtcgatatcttggtgaatgatgttgacattgcacgcttgatctaagtggtcatgaatggggcaagaaccatggttgttggtggtatcatcatcattagtattgctagtgttgttgtctgcgttgtgtccgtcttcttggggtagtaactcttgatgcacaacagaagatccggtgatctgaagtggctcagtgcgctgtctttggttaccacatggaaatactgggatgttgacaatccttctcttgcagttcgtcatccgattatgctcactttcgagttgcatggctttgtccacaagtttctcaaaatcttcataatcctctaggagtagttgcactgcaagctcatcttttaacccctggagaaacttctcttgtttgtcttcatccgtttccacatcttctggtgcatagtgtgcctcccgatagaactcgtgcaggtactctgtaaaggtcaaatctccttgcttcaggtagcgaaactctcgttttcttagtgtgatcattcctgcggg

SEQ ID NO: 13885 - DNA, 629 bp, Oryza sativa
ttttcaccgcctaggtagtgggtgaccttcaagtggtaaaagccaaatcaagaattgacttatggaaaacctatcacaatgttcagagttcaaagataacccacctctaaagctttcttaacttgagcagcaccataagcatacactttaacctctgggctgcagtaccaatgaaggcttctattagcttcagaacatactccaaatttacatgcaaaatgcagcaaaactgatctacctagtagcagcaccgtgcatgtagcgcgggtgcatgaaaagctgtgcagtcccccacagtggttttatattggtctcctcctgcatgaagttcagatcatatctgagcaaagagcagaaccaatgcatttcgacaaaatgctaacaattttaatgggtttgcagaaatgtaacctggagtttctttgccagttcaactatctcatccaaatttttatttgtttcctgcaatgtgaaacaagaagcttataaaataccagacctttcacctgtggccaaagcctcattacacaaaaacccaaaaattcccaaaatttaacaaaaatattccacaagagttaaacacatctttcaaaggtaattagacccaattaaatttccaaaatttaaca

SEQ ID NO: 13886 - DNA, 807 bp, Oryza sativa
tttgtgtttatatgttgatgacatactcatatttgggaccaatattaatgtggtgtctgaattaaaatcatttttgtcccaaaaatttgacatgaaggatttggaagaagctgatgttatttcaaacattaaattgatcaaaggcgaggatgggattatgctttcgcaagcccattatgtggagaaagtcctaactcgtttcgggttgatggactgtaaaatagctccaacgccttatgacccaagtcttaagcttcgaaagaacaaaggactaggaaaggatcaattgagatactctcaaatcattggctctctcatgtatttggcgtgtgctaccagacccgacatctcatatgctgttagcaagctgagccggtttacttctaacccggagatgatcattggcaagcactagaacgcatattaagatacttgagaggcacaatgtcatatgggattcactataccgggtaccccgctgtgcttgaggggtatagtgactcaaattggatctcggatgccgatgagatcaaggccacgagtggatatttgtttactcttggtggtgctgcagtttcatggagatcttgcaaacaaacagttttgacaagatcaactatggaggctgaacttgtagcacttgacacagccactgttgaggcggagtggctgcgtgagctcttgatggacttaccggtaggtgaaaaacctatcccggcgatccttatgtactgtgataaccaaacagttctcataaaggttaagagcacaaaggataatatgaagtcctcaagacatgtgaaaagg

SEQ ID NO: 13887 - DNA, 1085 bp, Oryza sativa
cttgacaactaggaccatgctcacaacctaggaggtcgccgacacatataacagtagcggctcttgcggatgtggcgaggccaaaactggtggagtggtgataagtttcttgaagtcttcaaaggctttttgtgcttcggatccccactggaaattgtcagtcttcttcagcagcttgaaaaagggcatcccccgctcgccgagtcgtgagatgaaccggctgagcgccgtcatgcaaccagtcagcttttggacgtctttttgggagcttggcgatttcatgttgaggatggcgttgattttctccgggttggcctgtatgcctctttgagataccataaatccgagcaacttccctgacggtactctgaagatgcacttttcagggtttagtatcatcctgaaagcacgaatgcttgcaaaagtttcttctaaatccgcgatcaggtcatccttctgcttggtcttgacgactacatcatcaacataagcttcaacattgcgaccgatctgagttgaaaaacatctttgaatcatgcgttgataggttgctcctgcgttcttcaatccaaagggcatggtgatgtagcagtaggccccaaatggcgtaataaacgaggtcttcaagcagtcggactctcttagtcggatctgatgatatcccgagtagcagtccaaaaaactgagtaactcgcagccggctattgagtcaaccacctggtcaatgcaaggtaacccaaaagggtctttagggcaagacttgttgaggttggtgtaatcgacacacatgcgccattgccccgtctttttccgaaccaagactgggttagccagccagtcgggatgaaggacctccttgatgaagcccgctgctaacagcttggttaattcctccttgatcgcatccttcctgtcctgtgcaaaacggcggagtcgttgcttgatgggtttggcgtcttccttaacatgtaaagagtgctcaatcacctctctaggaatacccggcatatcggatggtttccatgcaaagatatctttattattttgaagaaaggtgatgagcgcgctttccaatttacaatcta

SEQ ID NO: 13888 - DNA, 531 bp, Oryza sativa
cgcttgttgtttgctttgtgtgtaggtatggttgcattcccatcattggagtagttcattgatgagtgtgtaactatactaggttgcttgcttaatcaacttgaacaatataatggtctacacacatcagatcagtgttaacctggttaaggtcttgtctttagtgtaacccctctccttctaccttttctaatctgcatcagaatggtgggatcatttccggatgaacagagcagaaggacaaccaatcacttgggaagagtttatcgaaggattcaagaagacacacatacctgcaggtgttgttgctttgaagaagcgtgagttccgggcacttaagcaaaaggatcgtaccgtgacggaatatcttcatgagttcaatcgtctagctcgctatgctctagaagatgtgcgtactgacgaggaaaggcaggagaagtttttggaaggcttaaaggatgaactgacagttatgttgatctctcatgactatgaggattttcaggagttggttgacaaagcaattcgact

SEQ ID NO: 13889 - DNA, 568 bp, Oryza sativa
tatagggcgaattcgagctcggtacccctactccaagaatttgacttagaaattaaagataaaaagggagtagaaaattccgtagcagatcatttgtccaggctgcagatcactaacatgcaggaacaaccgatcaatgattttttaagagatgacatgctgatgacggttcacgactccaacccgtggtatgccaacatagtgaactacatggtatccaagtacataccacgaggggaaaatcaatgaaaattgaagtatgaaagtcgctgtcacatatgggatgagccatacctatatcgggtctactccaatggcctattacgaagatgtgtgccaactgaagaaggaccaaagatcatagaacgatgccatgcctcaccttatggtggccattacggtgcattccgcacccaggccaagatttggcaaagtggtttcttttggccaacaatgtacgaagactcaagagaattcgtcagaagatgcaccagctgccagaggcaaggagaaatcactgctcgcgatgcaatgcccctcacatacaatttgcaagtcgagatattcg

SEQ ID NO: 13890 - DNA, 561 bp, Oryza sativa
tatagggcgaattcgagctcggtacccgatacaaacgaaatgcctaagcataaaatcgacgaagatgttcaatattccaagaattattgatgagagtaccatcttcgcgcttgaggcgataagaacctggccgagtgacttcagcaattatgaacggtccttcccataagggagataatttatgccgatcctgtgtggtttgaattttcctcagaaccaggtcgccgactaaaaaggctcgcgatcgaacattccgattatgataacggtccaacccttgcaaataccgagtcgactaaattaaagctgcttcacgggcttcttctagtcgattgatgtcgtctactcggccctcttcataacactcctcgttgaagttccgaaatcgtagtgattcaaattccacttcacttggcaacattgcttctgcaccataaaccaaaaagaacggcgactggccggtagcccgactgggagtagtgcgtaaagaccaaagtacggatggcagctgatctacccacttgccagcatagggacgtagtcggtcgaaaactcgtgctt

SEQ ID NO: 13891 - DNA, 729 bp, Oryza sativa
ctagttagaccgccgaatccgataaaacacaaatcgacgaactctcaaagtatatgacaactttattgcttctctctgtgtttacaaagtgcaacagccgcactccttacaaaaatcttgactaaacttgaaaccctaactaaactatcaactcaattgctctaaaaagcactaccgggaagcctcacgctccctctctatttatacatgaggtaggcagcctaaagccacaaaccaaactcatactagaagtcctaatccgcataggaaacctcatcgtacaagaaacaaactttacataaccaatcataccaaatttggactccttccaaattcgactccgcatcccatacacacacaatacctccatcgtattgcatatggaatcttcaccaaccacgtgcattgaactctagcctaagtatcccgcatgatatctgaccgtcgcggacattgccctcagacggagatcaaagcatgtcaaagaagaaagatgatgacgatgatgtcccgactggttttcaagaccatcgcaaggaactcaatcacatctttggcagacccctagcttatgaatctaagagaaagcaaaagctgaccgaacgggagattaacactgttcagcccgatacgccccaatatcttcggtggtcggagacaacaattaagtttgaccactcggatcatcctgaccgagtggtccacccggggcggtaccccctggtatta

SEQ ID NO: 13892 - DNA, 582 bp, Oryza sativa
cgggtgagaaacccactctttatagggcgaattcgagctcggtacccgttgaggggtgcgaaaaaccgcagctccctcgacgtcttgctgcccgataagctctcgtgctcgtcgcccggcgtccaaggcccgttgtcgtcggtcctcagcctcctttgcagcccgttcgcgttcctgttgttcacgctgcagccgttctcgctcttgtgcttggcgctcctcttctagtcggtgtcgttcggcttcctgttgtacgcgtagctcttctgtttctcgggctttgcgctattcttccatctcgttgtcagccatgaagatgccgaagtagagaggcgtgtagttgtcttcaaagccttcgtcgaagtcgttgaggttgcggtagtcatagcggtagccgaagtcgtcgtactccacgatctccgttggtcgcgagtcgacgccgggggagctgaggtagccgtccagttgtttcgtcgaaaccgtgccgagtggctggagtatgacgccgacttccctggagctaggccgaaccggggctgaagccggatcccgcctaggcctacggggagaagacgcccttgt

SEQ ID NO: 13893 - DNA, 743 bp, Oryza sativa
atgccacctccaggagtatgaactcgcattggtatcttaagcttcactaaagataacccatgtgcaccagcaaaaagcttggaaatgaaggaatgggttgcaccagaatcaaacaatattactgctggtgtcgagttgacggggaatgtgcccaatataacctctggtgctgactgcgcctcctctgcagatgcatgattgacccgggcctgaacgaacttgggtccagcacgtcttggcttcgagcactttccaaccgtgtgtccgggtttgttacaattgaagcagagttcgggcttttctcccaacctcttgggctgttctggcagagctggctgaactgattgagctggaatctttagtgaactcagagtagggttgaggctgtgctgctcactgttgttgtgactatcactatggtggttcttgttgaagctacccgggtggtagggacggtactgccggataatcatggtggaaggtccaccgtgatgtcccattgtgaaacgaggcttctgactcttcccctggggagtcctgaactgagctgccttcctcttacggtttattttgttacagtgctcctcctgacggatagccttatccaccagcttctcaaagtcctcataatctctagagatcaactggttagtcaattcatcatcaagaccagacaaaaacttctcctgcctctcggcatcggtacgcacgtcctcaggggcgtaacgcgcgaggaggttgaa

SEQ ID NO: 13894 - DNA, 776 bp, Oryza sativa
aatccgtgaccgtctaaaagtggcacaatcacgacaaaagagttacgctgacacccggagaagagatctagaatttaaggaaggggattatgtatatctgaaggtttctccgatgagaggtacaaaaatgtttaaggttaaggaaactagcaccaagatatgtgggaccttttccaatcatcgctagacaaggagaagttgcatatcatgtacagctccaaaaaaatatcgctgatgtgcacccagttttcctgtgtctaattaaaaaaagtgctacaagtgccggaggaccaagctccgttggaaaaaattcatataccattgatctcacttttccaaaccacccagtccggatttgggatgaaccaaaaaaaaggactaggaccaaagtgtggcgtatgtccaaggtacattggagtattcttcctgaggatgaacccacttgggaaagcaaaaaattcttggagacagattacccgcatctaagcgaaatccaataaaaaatctcgggatgagatttattaaaggggggtaggtttgtaccaccctgaaaattcgaccaataaaaacaaaactctaaaaatgcggaccttcgaaaactttttaaattaactacatcatgccgattctattcgcctattttatttggatttgatttcgaaattcattagtcgtgagtaaagaatagttaattacgaataaaccctaaaaataaattggcaaaataaatataatttaaaataaagattagtgaggatagaaattaataaaatttt

SEQ ID NO: 13895 - DNA, 2922 bp, Oryza sativa
taatgtttcacaaccgaaactcgtgaaccggtccttaattatcatgagcacgactctcaaaaccatgtgctcacaacccaccattatcaagttttagttggcaagtaattaattaaccaatcacgattgaccatcgtgaactatcattaagccaacattaaataatagtgagtcataagttatcccaatagtgtgctaatgtttctaagcatggctaagcaatcatatataatatctagatgaaccaatatatatagcccaactagtcaagttataataacccaatgtatcaaggaataaagtaatcaagaacaaaagggctataacaaacaataggttaattccatccaatgacattcgaaaataaatccaatagttgaatagaaacaatagctttaaacgggatcaacatgctcaaagggttgtttagaatctgtgtgacttgccttgctggccttggaactcttcaaattcttctcctgtaaaaacggactctccggaaacgtcggaatctaaacagaaaggagcaaaatcaccaaaacagcacataaacaagcatgaacaatacatgtggatatttttaacatgtagatctcaattttagaaaaatttagagacttgaaccaactaaatccgagctaagatgaattagttatgaattttcaaagattaaatcggattaaatcatttatttagattttaattgaattatgacgcaataatgaattatttttgaaaaggaaaagggaattattgcgtcagcggctagggttcgcggtgaaccgggtgcacggcggcggctcacgaaaacgaacggccgagatctttccatccaaaacgaacggccgagatcgaccggtccacggccggaccacgggagacgacgacgatgacgtcagcggtgacttaaaaacctttttcaatttaaattattcatgaaatgcaattccatttattaaaaatacttccttagctcaaataaatcccagaaaaatctagaaattatagaattaagcaaagtatttaatgaaattttatctggccccattttatattggaatttattatttaaaattagatcttcttttctagactttaaaataaattctattaattacaattaaacaacaatttatatatttaggatttttagggtgtgacaaacctaccccccttaaacagaatctcgtcctcgagattcggaagaactggcgaacagatgcggatgagctgacttcaattcatcttctcgttcccaagttgattcttcttccgagtgattactccattgaactttacaaaaacggataactcgatttctggttcttctctcatctatttccaagatacggattggtttctcaacataggtcagatcctcttggacttctatctgttcaagattagcttcttcggtaggtacccttaaacactttttcaattgcgacacatggaacacattatggactcctgccaaagattgaggtaactccaactgataagcaacctctcctcttctactgacaatcttataaggtcccacaaaacgcggtgccaatttcctttggtgtgaaaacgatgaactcctcgaagaggcgtgacacgaaggtacacataatctccttcgtcaaaatttagatctctacgacgattgtcggcataactcttatgacgagactgggccatacgcaatctttcttgaatgattttcaccttttcttctgcttccctcaggatatccatcccgaaaacctgacgttctcccgtttgatcccacaaaagcggagtgtggcacttccgaccatacagtgcttcgtaaggagccatctgaagactagcttgataactgttgttggacgagaattcggcgtaaggcaaatttttatcccaacttccaccgaagtttaaagcacaagatttcaacatgttttccaaaatttggtttaccctttcaggttggccggtcgtttgcggaagattaacaggaattaaggttaggttaagacccatttttttctggaagttctttaaaactttgaagtaaactgactacctcgatcagacattattttcttagggacgccgtgcaaacacacaatccttgccatatacaattccgccaaccgacttccggaataggttgtctttactgggatgaaatgagccactttggtaagtctgtcgactatcacccaaatagagtcatggcctaatgacgttctaggtagaccagtgatgaaatccataccgatttcctcccacttccattcaggaatcttcaaaggctgcagcaaacctgcgggtttctgatgttctgccttgactcgctgacaaacatcacatactgctacgtattctgcgatttcacgcttcatacttgcccaccaaaatctttccttgagatcctggtacatcttggtactacccgggtgaatggagtataaagtatcatgagcttctttcagaattgcatcttttaaatctttgttgtcggggacgcagattctctcgcccaaccatacagttccttgctcatcttccaagaaaccgatagcttttcctcttctcatattcttcttgatttcttgaatatcaggatcattaatttgggcttctctaacttgatcaattagagtgggctttgcttctaaggctgcaacgaaacctctactgacaattcccaaatttaatctttcaaattccttacataactccaatggcaactgtcgtccttccgtagcattgcaatagcctttcctgctaagagcatctgctacaacattagcctttcccgggtgataatgaattcccatgtcataatccttaattaattccaaccatttccgttgtctcatgttcagatctggctgagtaaagatgtactttaaactcttgtgatcggtgtatacctctgtacgagta

SEQ ID NO: 13896 - DNA, 6186 bp, Oryza sativa
aactaaccaacccacaggcataccgactaggggtagacccctatttagaatcatcctaaagaatcaacgaaacccacaatacttagctatctgcagcaaaatctaaacaacatataaataaagcaagagttagtacattaaacaaattaatgtactagcaagaccacaatcaattcttaatacattgaggctctaccatgatgccttcacaaacattttcaatgtatttaaagaaaacattttgcaatatgtatagcataaagaacatggcatggtgtcaacataaataaataagaatcatttcctactaccgaaccggtagcaagaacataataccatgtatatcattctcatcatcatttcaaaagattcgaattctaaaagcatttataaaacataaacctaaacccatgacaattcactatgccgctcatgatcaattgcacgactaatttattagttttagactctgcagaatttgtacagtttgacccacatgacataaatccctctagtttgtctgccacctgtcgataccaccacactctacacattgagtgtggtctagcgattatgattaagcctttacattatctattgtttattccttgcatgagcacaatggtggagaatccgcaccaagtctagagcttaagtgtcatcagaatggttagcctaccgattctgacgccgtggcgaagcaacccttcccacgaggcactcactgttgcattggatagcattggacatatttagacgctcattctatgatgtggaacagtacaatcgtcccctcacagaaaaacatacacattggaacagtgcactcaacgtatcataatcacaatcatgggtagtttctatagatatgtcacaccctaaaaatcctaaatatataaattgttgtttaattggaattattagaatttattttaaaagtctagaaaagaagatctaattttaaataataaattccaatataaaatggggccagataaaatttcattaaatactttgcttaattctataattcctagatttttctgggatttatttgagctaaggaagtatttttaataaatggaattgcatttcatgaattatttaaattgaaaaaggtttttaaaatcctcttttggctttgggccgaaagtcggcccaaaaccttctctctctctctccctcggcccagtcggcccagtcagcccgcagccgcccgcgcgagcgccctcggccgctgacaggtgggtcccacctgtcggactcgtcttcctcctcgcgccgtcgcccggccagaaccctagccgagccgcgccgccgtctccttccaaattcgctcgcgcctttccttctccggtgaaatcaattgaggggaaatgtttcccgagatctcctctaccttttctcttttggaatcgtcggctaaatcgtttggaaatccgtggattcgagttcgattcggatcgatctctctcctccgaaccctaaactttccttcgcgtcgccggtcgccgtgggccttcgctgccgcctccttgcccctataaaaggacccccaagcccgccgctaccgccgccaccctcgacttcgcctctcgccgcccgtagcgccctagccccgtgtagcctagcgccgccgtcgtcgccgttcgtccagccgtgcgccgccgccgatcctgtcgtcgtcgtcgctcgggaaagtcaccgtcgtggtcgccgtcgcgtcgccgtcctcgtccgcccctccatcgctgctgtagaccgccggagcaccgccgttgtcgtcaagccgaaggttgccgccgcttcttcctcatcgctgtcgccgtccgttgatcttccgccgccgctttggtcaccggtgagttcgccatgccgtccgctacccgtaggtgctctccgttcgcgctgtcgtgtcgtcgttcgccggcgagcatgcacgcccgagccgccgccggtggtgacgtcaccgctaacgtcatcgtcgtcgtctcccgtggtctggccgtggaccggtcgatctcggccgttcgttttggatggaaagatctcggctgttcgttttcgtgagccgccgccgtgcacccggttcaccgtgaacactagccgctgacgcaataattcccttttccttttcaaaaataattcattattgcgtcataattcaattaaaatctaaataaatgatttaatccgatttaatctttgaaaattcatcttagctcggatttagttggttcatgcttgtttatgtgctgttttggtgattttgctccgttctgtttagattccgacgtttccggagagtccgtttttacaggagaagaatttgaagagttccaaggccagcaaggcaagtcacacagatcccaaacaaccctttgagcatgttgatcccatttaaagctattgtttctattcaactattgcatttattttcgaatgtcattgggtggaattaacctattgtttgttatagcccttttgttcttgattactttattccttgataccttgggttattataacttgactagttgggctatatatattggttcagctagatattagatatgattgcttagccatgcttagaaacattagcacactattgggataacttatgactcactattatttaatgttggcttaatgatagttcacgatggtcaatcgtgattggttaattaattacttgccaactaaaacttgataatggtgggttgtgagcacatggttttgagagtcgtgctcatgacaattaaggaccggttcacgagtttcggttgtgaaacattaaccgtgccaaccacaagccagcgtgggcaacggctttaccttttgtatagcatggttcattgcggagcaccagactgagaagtggcggagataagcccacgggggtcgctggggagtccatgccttgtttataagggggtgattatgatccaggaaaggtgcgctgtggtggattgtgttgtgcgaggggtactatcacagctcctttccgtggtaccgtggtggtattgaggcacatggtgacatgttgtggggctgtgtcttgtgggtacagtggtacacctctggctagagtaaaactattcgaatagctgtgcccgcggttatgggcgagtctaacaatgtctttcgtaattagtttcacacttctcatcataataaaagatgctataactggtaataatttgattagctcctggtttggaatggtatattcctggtttggagatagatctgtacagccgggtatggttgttcgagatggttgggcctgagcagaatgggtgtgctttttagtgttgattaaaattgatgattaattactctactgttttataattctcaaatgtttgctaaatgctgcttttgcaaatgagccctatattatgccattctttggtatccttgtgcacttgcatatttgctgcgtggcttgctgagtatgtcgtatactcaccttgcaatcattcatcagaggaagggttcttcagtgatgctgatggtgtggaggattaggtgtagccctggtcaagctgcctgtggagtggagtcgtctgcgccgtttatcttatttttttccgctgcttagatctttattgattgagaggaactatctacctctgtaatgacattttattcgcttattaattagagtaataattgtactctattatcaatttgttattgtgtgcctcggctgattcctggacgagggttcacacacatgtaagtgtttggaattttggatagaaattccgggcgtgacaagttggtatcagagcctccttgaccctaggttatgccaaatggttacccatagaagccctctaaaaatattggaaaagtagaactgttctcctccctttctcttttaattaaaccaaactaatagcacatgcacttcataatctcttttagtggttctcattcaaaatttattccagtgttgttagtactgtacatctaatactgtactaatggctcatttaccagcaaatgttttacaacattgttttattttgctgcaatgaaataaatttagcatgttgattttataactttcttttatttcttttggaacctgttgttcaaaagtacaaaatttgtgaccttgtttccaactgtttcaacttatcttgcaagcttggtttactttatttacttaccttttactttgattttctaactttattcaaattaatccaaaaacttgtgctattaattggataaatgtcttaactccctcctttcacttgtctttagatgccgcgctacaagcctgagtacttgtttggtgttgagggatttgtccaggagttgcgtacgatgtcctttgccataagatttgggactgcccctttgtatgcctagattcctcatgatcgtcacgaagagaagtgccgagtcaaagtcaccttgaacagtaatagtgaagatatcccatcagtgatgttcgaagctggaggaggaaactacatccatgcatgtcaggaggtggcaaggattgccataggagagctccgcgatcgctacagtgattagttggccgacactgagtatcgctaccatcctcgccaaccccagggaagtgaccgtggcagctaccttgagactgaggggattgagaatgatgctaccacaaggcatttggttgagatgctgtgggctatggatgaaacccacgcagaggttgtgctagcagctcaagatcgtgaagaccggaatcgtggtaagatttgcaggctagatgacaaggtggatcgtttggagaaggaactagccgcgttgaagggagaagcaccaccgcagatggccaggattcgtcttaccgcaaggaagagagctctatttgttcctcgctaccaattggcgccaaaggtccgtgtggtggagaaagaagttaccccagccctagcggatcctccggtcgtcaatgtaagtgatgatgaaggagaagaatcgaagcgcacccattcaaaggttgagtggggtgctactcaagatgatggagacgagccgaacgagccttcaatcaacttcgatgcccggaagacctagagtgccttgttaagccgttgtcttagattgttgtgttagtttgttcgtttaaatttggttgtgtgtgtctcacatgtgatttacatcagtggtgggatgtaagtgcatgcgtttgtttacttttgagtgttaggaagttggtgagtttagtggtgtgagagtcttcagttttgtaataatgaaactcagttaagatcagtaaaagttaagttagtagaaaaattaattctctgtcctaagtagttttccccggtttctcttcttgtgatcctgcccatgccagatggtgctcactcgcagcaacgggaatggccccaacaacaacaataacaacaacaacaatagagagaatcccacacttgcccaagtcctggctcaacaggcacagcttatgaacatgatgatgcagcaactccagaaccagcagaaccagggaaataaccatgcacctccccagaacaagttagcagaatttcttcgtgtgaggccgcccactttctctagcaccactaatcctgttgaagctggcgattggctgcatgccatagagaagaagttggatttgcttcagtgcactgattaggagaaggtctcatttgcatcacatcagctgcatggccctgcctctgagtggtgggatcacttccgccttaacagaactactgctgaacctatcacttggcttgaattcaccgctgctttccggaagacgcatataccatcgggagtggtgtctctcaagaagaaggaattcaggtcgctcacccagggatctcgcacggtcaccgagtatctgcacgagttcaaccgtctggctcgttatgctccggaagatgtgcgcactgatgaagagcgctaggagaggttcttggaaggacttaatgatgagctttcttacccactcatgactggggattatcatgatttccagaagttagtggataaggctattcgccaggaggacaagtacaaccgcatggagcagaagaaacgccggattgctcacttcaaggcacaacaggggaatagtcagaggccgcgtcttactttaggaccccagtccatgccacagggaggttctttgtctgttgttcgtccgcagcgtcagtt

SEQ ID NO: 13897 - DNA, 598 bp, Oryza sativa
tttagcaggatccactacaactccaccggctgagattacgtggcctacaaaggcgacttcttttaaccagaactcacattaactaaactgtgcatataatttatgcttccgaagttactcgagtaccaaccgcaagtgctccacatgctcttgctcgtctttggagtagattaaaatatcatcgatgaatactaccacaaatttgtccaagtaatccatgaacactttgttcataagattcataaagtatgccggggtgttggttaatccaaacgacattactgtgaactcatataatccatagcgtgttgagaacgcagtcttgggtacatccccggtcctaattttcaattggtggtatcctgatcgaaggtcaatcttagagaacaccttagctcctttaagttgatcgaaaagatcatcaatccgtggaagtggatacttgttcttgatagttacttcgttcagtgagcggtagtccacacacattctcatgctaccatccttcttcttaacgaataacactggggctccccaaggtgacgaattgggacgtacaaatcccttctcttgcaactctctgatttgctttttaagt

SEQ ID NO: 13898 - DNA, 522 bp, Oryza sativa
cgaagaaattctagcagtttggactgaggaggtggagaaccaaactgcaggttctgctgctgcagctgtgcttgctgctgcacctgttgcaacacctgatggtactgttgctgcatctgttgcatcatcattgtcatcatctgagtctgattgtccaacacctgagcaattgttgggttctcgggcggtggggacggactgttgtcagatgcactgttggcacgtgctccattgatcggcttttcgctgccactggcgttgttcgagtcgcgtgaaccattccttgtctccatctgaaggggataggtagaaatatgagaaaaggaagaaaaacagggggctcagaaactaatctttcttatgaatttaagtgcaattatcttaatcttgattaaaacactgaaaaagaggcacgcaactcctaattgaggcagtcataccactgacacatgatatcgaccgccgactagcccacaagcatcaaacctaaacacgaaaactagcaagcaaacagactaagaa

SEQ ID NO: 13899 - DNA, 518 bp, Oryza sativa
agtccaaagtccatggcctagggtaaaaccaaaaaaagaagggggaaataagttataattcacatggcaaatgatgatttactttcttctgatacatttaagagatgaaagttacttcagatgaagacatgaaacgatccctctctgtccactgttgtaccatatccaaggtttgcccagtaaaagcagcaaacatcttatcaactttctgcatccagatttttcagaagctttaatcgcttagagagcagaatcaagagaaattccttaccctcatcaaacatctaattcaaatgtacactgaagaaaatatagaacttgttatctatcacaaaacacttacatcacgagcataaatggtttccccaacctgtcgcctcacctcctccacattaccctgcaaatcatccaatttttagaataaaaaacaaacttcaagtacaacaaacacaaaggcaagcaagtatgtcctagcaagactgtatattgtaagtttcatgtggccagctaaaatgatg

SEQ ID NO: 13900 - DNA, 688 bp, Oryza sativa
cggtgtccgtggactcccactagttggcatagtggagttcattttacaagggacatgcaggtattttagggatcggttccaggcagttcttccctctatgccgaacaacagcattttattcggaactttcatgcagaaaaagctagaggagttgcgtaaaaaggccatgaaacatcgagctctagtgcaaggtacccaacagcacaggtttgagatactttgtcaagataaggcaggcaggggtatctaccgtaagagagtgaagcaggaatgtgttctcaaagccgacggcacatgtcattgctcttgtgcaaagccgaagctgctccacaggccatgcacccatgtcattgctgccgcaacggagtgtggcataccatatgcagtatatgtgtcacagtacttcagtaagcaagcagtatatcatacatggagtggcgagatttatgggttcggcatagctggggagttcacagagactaacaatgaagtactaaatattcctgacccatcgaagctccgaggcaaagctggaaggaggaagactcgtcgcatccgcaatgatatggacgagtcggaggctggcagggtgaagcgttgcagcaaatgcaatgaatgtgggcacacctacaagcattgtcctaaagacaaggagaaaccaaatgcggcgggaggcaggactatcagg

SEQ ID NO: 13901 - DNA, 6361 bp, Oryza sativa
ccaaggggtctgaaccagtataatccttgtcttttgtttgcgtgatgtcgtattacgtagatccttgttccaacgtaccccaataccctctatatctgatttacgggtatctcccgtcgacataaacacttaaaacattttgtataccaaataaataccacaacatgtcttataacttgtaaaagtcgaaataaattcatgctatctgatctaaaaattattgactaaacttttttgaattcaggataatgtactattttctgcagtaacccaaaatgttacagaacttaggcctaaattacataatgatacaacgaaaattccttaaccataaatcatgttaagtctgtacctatccactgtaaagaaatcattcattttagaccatgctgattttttttgcatatattggtgtttgtttgctatcagtgaggaaattgaagaattaaatttgaaaatatactattgatttgttttttctcaaaaatattcgggatgtaaaagttttgacagaaatataccgccggtctcgcgtaaccattgcgtgagaatgacgtgggcatgacaacgcacacggtttcgcgcgacaaaagcgtgagaccgcgcgtactaaagcacgagaccgaacggtctcgcggtaccagctagcgattctgaatggctggccagattcaaaatgtttaattaccctgactagtaatatgcccatactaaacgctacggggtaattctattggtctttaatatttttttaaaaaagattcaggttagcaaaaaatatatttatatgatctgtgcatttgaactttaatattttataaagaaatgggtggaagtacaaaatagtacacatccacgacatttgaagaaacattagttatatctctgaaggcaaagcgccctccattggaggaagtattttgatccatatgtaaatgacaaattataaccaaacgtgagttgaaaccaatttacaatgcgattttatatttcaaagttttaaaatatcatacatcaatttgatttctcagtagcagcatgaaagcataatacaactccactaatttataacctcgatacacgccaaacatgaccatttcaacaccatctttaagtgttgggattaattgcaaataagaaatacacaagttatatgggctccaaactgggtacatcccgtcaatcaattggtatgttatgtacaaccaaccgttcaaatcttgccaaactcttttgttgagcagaagtataacttctggcagagcaatgaagatactctaacgaatcaaaacgctctcgcatcacctgaaaaggatagtcaaaggaattctgctcaaggccaagaagatcatcaactaatactgaagcaattcttgtattgaagatcatcaactaatcttatgacattagttatcgcccatcaacaaaagaaataaacgccaagtacttaatggcagtacctatctcatgacatcaatatagcaaaacaaatttacagataaattcccagtgcgatttgatgtgtggcaataaaatataggccatgactcaggttactgacagatcaaaggcccctagcataattgaacatgatacacaatatacctgaaccatggaatctaatcacatatgcatgacactgttcactgacataccacctctcagctttcttacacgggccgtgatatataccgcttgatttatttttttcttctaaatacatttatatcatttcccttctacatacatgtgtcaaatgtataaaatcaaagatggttgtttcttgtgaggatgtatattgtacctgtttggaatcggcctatgacactcctaataatttgttcgtcaaagcagaagtataaatcttgctctgtagatcgctctatagttaaagaagaaaacagtgattttagactaccagtcgcttgtcaatctgctaaaatataataatgaattaacctataggttcaatcaaccctcgcattttggcagtctgaagcaatgggctaaaaagtaatatttataagcacacttcttatgtcactaacatataataatgaattaacctataggttcaatcaaccctcgcattttggtagtctgaagcaatgggctaaaaagtaatatttataaacacacttcttatgtctctgagacaaattaacatagataaagattcatatcacaaaccaagccatggttccaggcaagaacagggagagtaaaaaaaattatggatttttactgccgaccgagtgagaaggtacaggaaccccacctgagagaagaggtcggtgacggtgatgatggcagcagcggtgacaccattggtcagcacaagccgcctcggcactgaccctgaacccaccattcgctcgctctatgacgatggcgacgcttgcttgaacgacggttgtgtgtggcgaaggtactatacagtcttaaatgaagcttcatccatgccttgttactatctcgttatcagtttatcacctgctaactactccctcttgtaaaaaatatgtgttcaaaaaagatatatgcctagagcatcagatatacagtctacggatgcggagaagtgtggatgttggatttattagctcggttcataagacaacaaggaagaaaggattcactttatgtctggtgagtttgatttatctatttggtgatgacgtcagttatctggccatggattagatcaagtcaaatttaagacagaagatgaagttgaacatggtcttcgggagtctatgatgtgacagctaggaagaaatccaatttcgcttggcaagacgactgtggtgatatgagagaaggtggagcactgttgcaggtggagtcaagaggaagaacttgcagggatagcgggagtctcttgttacggtgagcctggtgaaggttcgtcggggcagctcggcgtgagcggcgaaaaaggatcaactcaagtcctggtacacgaaggttcgcgcatggaacaaatttaggttggcatggcatattcgccaaggtggagtttgttagagtttgtgtcgaatatgtgtacgtagtcggttacagtttaggacttgcagttgtaataggtattaggattagagtaagagtcgaactctatcctaggatctctcataaatagaggggcgtgcctgttgtaatcacatggcgacttagcatagcgagaggaagcggctgccggcggcgaccggccgtgagtcgttgtaactctgatacgctgtatatgctggatcggggaggagcgcccgtaatcagtgccccggagatgtaagcctcggctgaactccattatcaaatatcgtgcctcggtgtcgtcatcattttggatctcctatggcgttttcttccgtgtttagctaccgatgttgatttcggggctggttttataacatgcataatagagtgtaaagtacatattgtaacttagcatttgcataataggagtgtaaagtacatcagtacatatttacctaatagtatgatacattaccaatgtgcagttagtgccattaaacaaggcctttttttttttgctttttacattctagataaatagccgctaaacaattatgtaagaggtgtttagctgagatcaatggtgattattagctgcaagattaatcaaatcatcaaacttaggaaacatatatctgacagcaatttgaaactttccatgttcctagtcaatatataatgtatacacagagtcaagtgcaaaagatgagacttacaattaaggttcttgtattgatcagttgaaaactcaagattatacgtatcaataatcaaaagttggattgtactgcactgatatgaaaggttaagttgcatgagcataaggattaaaatattgcagatgcaaaagccatcaaattttagtgagcctgagtacacagtaatgattgttcattgtgagcatgacttcatcgtagcagattacttacagcttacctagaaaatgattagacaaatatagagagtggaatttgccacacatatacctctgatgaactcagcatagcagctctgagtcctttttgttcagattaaaggaaggaatccacaaagaagaactgcaatgtcaaacaacccgacggaacagatcccaaagtaagaatgcacgatttcttaataaaggaaatatctgatcaaagcccaaaacgtgactcatgttatatacactctgtcatcaatttaaataaaaaaaattatccttcgcattggtacaatggtacccctaggatgtgttaaaaaatttcacatgccaagattacgaaggtaacatcagaagtgaatcgtagaagggagaaacctgggcaattgcctccttgctgattgccgtggtcattagcattccataaattttcctaaaagatgcaaagggggataacatcagacaccgaaattaggtcatccgtatgaaattcacgagtccgacgcatcaaaaaaattaccaaatcgcaatcgtcagtcgcagatcgttccgcggtggccgtggataggagcgcgacctgcgggatccagcgcgagatgctccaaggcgaggaggcagggcatcgcggcatcgatctggcgagggcacagggtgaggcggcggcgacgaccggttgaggtagcgcggttagggttgaggggaccggggggatggatggcgatggggcggctgacgaaggggacaatggcgacgcggtggagagcgatgggcggcggacggcgttgttttcttcgagagggatgggatgttttttctgcgagagaggataggagcggggaggggaggggatgcgctgttttcggcgagagagggatgggagggagccgtcggatcttaagtcataagtaggatttggagcgttggatgtgtgatatgataaatgatgaatgagtaaagattaattaattactaattaatcacgaatcagataattaattattaattattattaattaattcctaattaagtaattagtccctaactgagcgccggcgctctcgctcattccttgtgcgagaccgtccgcttttgtcccatgataccgcgtagtctcgcaacgttattgtgcgagacccgtccacgtcgtcacgcccacgttattctcgcgcaacggttacgcgagaccgacggtatatttctgtcaaaacttttacatcccgaatatttttaagaaaaaaagcaaatcaacagtatatttttaaatttaattcggaaattgaatatattactgatccaagtaaggatcttaattaaggcatgtgcccctcttcctttgaacatattgaaacccatgtttttggaaacgtgttgttttatgaaacttgcacgtgtaattctaactatctattacttttaaattgggaaaatagtagctatatcctatttgctgcataaacaccctcaaatctttgataccctgctatttgtaatcataggaatattcagagcactttccttgtgctcaaatgagtatatttatgcttttataaatacctaatgcttacccagcttaaaataaacttaccatggttatggatcacttatatatgctatttgaaccattttaaacattatggacagaggtgattttcagtgtatttgtgagctaaaatgagagaaaatgtgaattttagagagagtgttagttacatatggtgctagtgacatatctatagagagagtgtttgcttgggtcaattaagaaccgaactctatgccattaactattgtttaccgtgcaaccacatgtgctagttatgagataaccttagctaactaagttattaattgttcattcgggaggccattgtggtagaggtagtggctacgagtatactgtgggatatcttgtcacgctcggaatttttatccaaaattccaaacgcttacatgtgtgtgaaccctcgtccaggaatcagccgagacacacaataacaaattgataatagagtacaattattactctaattaataagcgaataaaatgtcattacagaggtagatagttcctctcaatcaataaagatctaagcagcggaaaaaaataagataaacggcgcagacgactccactccgcaggcagcttgaccagggctacacctaatcctccacaccatcagcatcactgaagaactcttcctctgatgaatgattgcaaggtgagtatacgacatactcagcaagccacgcagcaaatatgcaagtgcacaaggataccaaagaatggcataatatatggctcatttgcaaaagcagcatttagcaaacatttgagaattataaaacagtagagtaattaatcatccattttaatcaactctaaacagcacccccatgctgctcaggcc

SEQ ID NO: 13902 - DNA, 17562 bp, Oryza sativa
ccctctctactatatcccaatctctccctccctctctctcttctcaccagcacggcggcggcgtgcgaggacgggagcaggcatagcttgctcgggcgctgccggcggcgcaagcggcgggcggccggcagcgggaggtggagttctcccgggcaaccagtggtggaggcggagcggaaggtgctcttcgacctcctccttatcgaccgacgacgcggtcgccgcgggtgggccggcgacgccaattcctctcctcggacgtccatgtccagaccacgccgccacgctcctactcgtcgtcgtaccgtaaaggcgacggctttgtgccggcgctcggcggccaatcgatctgttgtatgtacttcaaggctttggaggtggcgcggcgtggctcgacggcgcgccgccgtcgacgacaacgcgaggcgcgcgggtggaggcgggtggtggcgttcccgctcccctgcaccgcgccagcgctcaccatgtcggcgtagaggcggtcggcgatgacctggttggcggcgtcggaggtgtggtaggcgtcccagaacacgaacgccgtgcggtcgtcgcagagctgcgccgtcggcaggcacagcccgcccaccgtcgtgtccacgtcacaacacgacgtgtgcgatgttggattaagtcttgtgcttagcattttattttctgttagcttgcatgtgagtcacggtggtgaggtcaagtcagtacatggcaaagtgcaagaagacaagaagttcttcagtcctgaactcctgatcaaaagcaaggatgtgatttcctgccgcgaggaataggagtggagtcttgcatggcatctaaacgttgtgcatgctgcgagaagtggcgtaagactcgcttaccatggctgttagttaagcatgtgattagtttacttgcatgataactaacttgagcccgtacttctgcgggtgctcgatgagctccatgacgatggagtagcagtcggtgagggacatgctcgcgctggggagcttcgcgttgagccgctcgaggaggttcttggcggcggcgttgaactgtaccgcgtacgcgttcatgtcgtcctggcacccgcactcggtggcggtgacagcgaccgaggacgccgtggaggagggcgtcggcggcggcgacgcaggtgcaagcgtgtgtggccggcggccgcctccgtcccgccgccctccaccgccggcagcgcccgggcaagctctgcctgctcccgccctagctcgcacgactgccgctgtactggtaagaagagagagagagggagagattgggatagagtagagagagatagaggggtggagaacttataggtggggcccactatttttttaaaaaagaaatgctgactgaactgccacatggacccaaaaccactccggattgagtcggggggttatttatccggtttcaatagttaagggtgtaaaatatctggttttcgagttcgggggcgtaattcggtcgacctctatagttttggaggggggcaattcataatatgaacaatacagggaaaggatggggagcagccgaacaggtggtgctgttgtggctctaggaagtaggaacactggattgcatccagactgttgcacaagctgctctccgctctgacaatagacgtaaatatcattctcttctcttcactttgcatttcatcagaagaacatttgtatggatccaaatattcttactgaccaaaaactatgcacaatgaaagtgatgcatgatatgcacactgtgatttgccaaaccacaacctatgtgacagcaaaaaggtagaaggccctttccctcttcagtgaaattgcataattcttccatgtcaaaaaaaaattgcataattcaaccacttggaatgtataattgatttcgacatataaatattacctgtcactgccgaaatttgtgttgcagggcttcctgcattatcatttatccatccatcgaagtaaacagaggagaaatagattacagcgagtgtggcggtgcaggattttgctagagatctgcaggacactcaaaagcatcaacgtcgctcaactggcaactacaaatctaaaaggcaccattaagttgaacaacaaaatcgaaattaggactaatggggaatcataattgtcacttttagcggaattaggtctcaccagcagaatagaacccgtgcgcggctgggaggataccggcgccacaccctaggcatatggttgcggagtagctaaacctgccgaaggccgaaccagcaagacttgtggaggcagcggcgccggtggaaaggctggaacacagctgcgctgattgtggtggcgagaagtgatccttcatagtagccttgttgagtttttatagtcaatacatatcctccatctccatgacggttcgttgtggaatcaactcattgttcgagttttcaacgaccatcatgcctccctttttaggcactacttgaacagggctaacccattcactatatggcacgggatagataatcccggtatgtatgagttttaagacttcttttttgacgacctccctcatggcattacttagcctcctcctgaggttccctagatggtgtgcaagacaggtctaagggaatgcgatgagtgcaaagggttggactgatgcattttaagtcttggagggaatagccaaaaacaacatgatgcttttctaaaatagcaataagtcgggccgtctccctctcagagagtgtcacttataatgactagagactccgcatcgccatttagaaagtcataacgtaggcctgaacgtaagggctttagctcaattggggttcctgacggctgatccctttttgacagatcaatcgcttctccatattcatcctccccttcattgaattcttcaatggattcattgagtgtagactctaggggcatgaatggagaaaacgaccatcactttctcaattagctcgggaacaggaagaagctccatcaaagaattgattgatggtagcacagggacagaggtggcgattcttcctattttcaggttgagtacaccgatttcggacacatcaaagagtttctctatgggatggccaataagtatgtcgaaatcagatatgtcgaacacatggaaatctaagatggcctcaatgccgttatgccgcatatgcactccagagataatccctaaaccttcggtcgtagagtttgtggaaatttagaaggttttgatggttggttccaacggtctatcccctaagcaatcaaatgcaaaggttgtggatataatattagcaccaacagagggattatagcaagcacgaaccaaatttcctctagtgagacacgtaacggttgaggagaggcaaccgatcagaattgcttcagaagagagctctccttccctcgaccatttattactcatgatgttgatcaatctcttcaccatctctttaagcatagctttattgagaggttcatcagaattgaccttggttggtggtctcttcttgcaggaataattcgaggtgtttccataatcttcgaaaagatcctcctcgaactgaaattgtatttccggagaatgaatttcttcttcctccggttcttgcgactaggatgaggattcaacagaggttcctcatggatacgggacaacttcgcttgagctgaaagaattgttctctcatatcagatctaagagttatcttccttcggcggttgtcttgtgtgcgaacgatcttccggcggaaatatcgagatcttcagcagacgccttgtctaacccataccgaaaatattgtaacaacacatggtcgtgtaaagacaagtctgtgccatactgagttaacaatgaaaacctggtccaggttgcaccgagagattccttctcgttctgtcagaaagaaaggatgtctaatcgaagattaatcacacggattaatggaaagaaagtaaggcagaacttacacttaagcccctcccattcaccgtggaatttcttgactgaaagaatgtaccattgcttcgcttcatctctaaaagaaaaaggaaacaactttcactttaaagtttgtaggcatgaacgcactagctcaaagtcccgaagacagaggtatgggttttcactaataccaccatagaaggtttgctctcaaaccatggctataaaggcatgactgatttcgtagccatccgaaaggattggttttgaagaacagtacggctcacaaagatcaacccgaggagctgaaaggttttgaattgtgggttgctccatcaaggaaatgaatgaaagaagatgaaataaaaataaagatacaagaataacctagattcggataaattagcaaccgtccacagcaatggcgccataaatgcttgttggtatttcttacgaccatacataaatctgcaagcgcacggaataccgcggtaacactttaccttcgagtgaccagaaaaggatatcgaacttagggaacatgtgtatgctacctaaggagactatccaaggacaacaattattggtaggctacctaggctagagaggattttctatgcgttttaattatctaaactaagtaaaggtaatttttgttttgggcaccgacccctgttggtctgccaacgtgtttaaacacatgcataaagtattaaatataggctataaaataactaattgcacaaattgtgactaatttacgagatgaatcttttaagcctaattgctccatgatttgacaatgtggtgctacgttaagcatttgctaatgacgaattaattaggcttaataaatttatctcgcggtttatggatggattctgtaattagtttttttattagtacccgaacaccatatataatatccgatgtgacacgcccgaaactttatacctgtatatcaagcaccccctcggccatggaagtttttcaagatgtggcggtcaagatcgttctggttggagaggtgacgataccaccacgagcactcgctggcacccacccaccacacaacaccactcaccaccccacgcacgcgccttcactccgattactcaccgccggaacggcgaatggcaggtgagccgccaccaatggcggcacctcagccggcgcgtttaccctccctcaccggagctttcttttcatttcttcttttttttttttgtctgcagccccgcggcggccggcggcggcgaaggcgaggaatggaggaggggcggggaggacgagccggtggatggcggctgacgggagcaagcggtggggggagacgttcttcctgctctacacgcccttctggctcacgctctgcctcggcgtcgtcgtccccttcaagctctacgaggtagccacccatccatccatccgttctttccttctcttctcgctcgatacgtctgaatcttgggcgagtttggggacgccttgttggatcttccgcatccggttctttgaggggagatcggatctcggcgatttcaaaatggatattaggtcgggtgataaaaataatatatattttttgttgctatgtgcagaggttcacggagctggagtacctagttgttgggttggtgtccacagtgcctgccttcgtcatcccgctcttcctcgtaggcaaggtacttttggctccatctctcctcaaaatacatcgactctgaattgggatctaactgatgtgatcgtataattaactgttggttctttagaggtagggtaattagaggcttgctttattttcttttagttaaaagaacaatgttgggagagtagtgttttgctatattgttcatagaaatgactgattgacagtttgacacatattgtgggcaagacagaaaccagaattattagctatacgcacgtcgaccataaatggtcaaagtactttctgactttctggtgcttgacagttgacatagcagcagtgatccaatgacgtatacacatgagcctgtttgatgtattaatcgcaagaacaccaaaatttggagggtaaactattaaatactcctgggacagccacaggctggtaagttttagatggagggagagagtagtgggagctgagtgtaagagctgagaggatattggaaaggactgggatcatgtgcggtcctagttgtgattgtcttctcatggcttaaattggggctactgcttattttgtggtcacaactatgactgcacccaaatcaagtacgggagagacataatactagtttttgttgctttcccaactgaggaaggaatacctgttgtctggctaagtagtttagtgacaaatgagggaaattggctacatggcacctcaatttgatggtgttttctctgagacatgaaaattcctagctttgctaaaaacacaatattttctggttaagagctacttcctccatcccaaaatgtaagcattttagaggttggcacgtgtattaagagagtaggtgggaatgattgaaggaaggtcgtgattggtggagaagataaattaggtgaaggagaatggttgtgattggttgagaggaggtatgtggagaaatagcttcattttgggacaaggtacggtgctagaaatagctatattttgggagggaggtagtagatggcacctgggaggtggggacattaaaatattctcatgtacttctgtaccagcaccagaccatttctaccatgatcctctcatactgttctttggcttacaaagtgtattcttttgttaaacttcgtccatgaaattgtatttcttatcttgaattcagtaaccatgacttagaagctaattttgctaatgttttaatttttcaggcagatagtgttagaagtttgaaagatcggtattgggttaaggtaagtgttttatacgatcttctgaaagacaaactgagttctaaaagaaaatgtagcgaaagaaggccaaagctgtatcttttcaataaatttgatcctgtaacgtgttttcgctacagcttataaactttactttattgagtaaacactttcattttctcaggcaaaatttactgtggaaagaatagctgatacattgaaatatcatcaatttggttacatttgatcttggtgaaataacactattaactaccttatatggttgttttactacgctactgtacaaaaacatttactactgttgtaaattatttactgctacagttatacttaattttgtacacctgctaatacaattaaatacaacagtacttctcagttgtgtatgggcaaattggtagcaaaaatcatattctctttactttatctctttgaacagttttgctaaatctcacatctttctgttgcaggctaatatttggattataattttcagctatgttggtaattacttttggacgcattacttcttcacagttcttggtgcatcatacactttcccatcatggaggatgaacaacgtaagactgtcctcatgttattgttgaccaaatgggatgcatgcaaacgataatctgcacaactgctagcattgcaatatgcgctgatgttttcaaacacggattcaacagtatttctgttcttttttttttcttgcaactcttccatgcaactgtcatggacattcagccaggggggcgagcccacccaacaccctctcggtactgtagcgcggtactgtatcagtctgttaggtggtattagattgagtcctttcttaggggttaagtcgtcccatctaaggatggattgtatccctttaccattaagtaataaatcagattagtttaatccaatacctctcaatgcccttcccaacctaaatctacctctcacccctagtagccgctgctgcccggctatcctcccagcggtgtttatcccataatggccttgggtcgtgaaaacaaattttaaaaagtaacttctatacaaacaccggccactgtaatgcattggactatgatctgaaagtttacctaatggcacttaggctgtgttcttttggaggggttgggaacccctcctctccacatgcaaaacggagcgatagattaacgcattattaattaagtattaagtataaaaaacttgaaaaatggattaatatgattttttaaagcaactttcctatagaaactttttgcaaaacaccaccgtttagcagtttgaaaagcgtgcgcacggaaaacgagggagatgggttgagaactcagggcaaagaacacagcctaaggctgtgtttgggaggaggggttaggaaaaaatggattaatatgatttttcaaaacaactttcatatagaaattttttacataaatcaccgtttagcggtttgaaaagcatgcgcgcggaaaacgagagaggtgggttgggaaaatggggggaagaaatgcatatgctcacaaaaatgaaatgcatatgctccttttaatggctgaaccatatggctcacttgaacattgcctacaacaaaatttccttttgttgaagctcggtcagtgttactgttgacttttatctgtcataaccttctagaattttattaatttattatgttagggacttctgtatgtaaaagagggctgccattatctatcaatgcgaacaagatataaatcaattaatcctctctatctttcctatgctcctgtttctttcatatatgttcctctatcatgtgcccagtcatttccttctacctctcaaacattctgctaataatctcaaaaaacttgtaccatactgttgtttctcctctcagctatttgcttgtatcctctgttatttgtcgcagaagtacagaacaagaatatgggaaagtcctgtctccactctccactgccgttttgatttggagatgatttgaccatgcattttgatagataatggaagaaaattttgacttgacatttgcttgctttcttatctttcgttagtttccatttagtgttgcaacttgcaagtaatgatggggtctgagaatttcacatgtactagtgctctttaagaatgttttagttaccttcagattaaagattgtttttattattttttttaaatgctatgcttaagaacacttcatacattccctcctgttctcctatattaaaatctgaggtcactacaagccaaaatagattctattctgcaactgtttcgtgaaggatattgctcatagtgtaaatatggaaaagtggccaatagttcaagtccattcacttttactagtgattgctgtgtactacattacttgcaagttgaactaacaaatgtgttcttgtttctttgttcttattgcttgttaaatttctttcatgtttcaggtaccccatacaacatttctcctgacccacgcttgctttcttttctatcacatgacatcaaatatgagccttcgcaaattacatcattctacagctcatttgccccagtttcttcgatggtcatttgaagctgcatgggttttagcactctcatacttcatagcttacctggaaaccttagccattgcaaatgtatgttctctcttgcatagagtattaataatacacagatttcttctgcctagtgctatttaattatcatgttctttcaatttccatttagtggtacggacgtagggttcagtaaatctgtgttctgttttatgaaatgaactactctgttggatccaatttactacattacgtatagcttgctgtgaattgcacaacagaaaatctgtggtaatgccttccagtcaggtcagataccattagacagaccctctgggtacactacttttgaacactgggagaaggttttctacaatctgtaattgtgattgttttctacaaatctgttgttgtgaatattggaccaattattcttgagatgatactagcaaacttatgtgctcactcttgctgttctagggtcaatatttaatgcgtactatattttcttttggtcaaagtggccaagttacataggatggagaagtgttttacaatgtcctattatgataacatatgatagtgaagttgttcccaccttttttactttgtttttcacaatactattatttccctttgtgcctgatgttttctgtgacctttgcagtttccgtattatgaattcatcgacagggatataatgtacaaagtaggctcactgttttatgcaatatacttcatcgtcagcttcccaatgttttcaaggtgaaattagtcagaattatcgttatagttatttactcctatttcaatgttggctattcatctgtttggtttgaaatatgtttgtttccctgtttctgttatgcagttaaacatcaagttgtctagctgtaatggttaatagctttgtcaaattccttactccaataccatctatttacaccaactgggtacatggccactaagtgaataaaattctagaataatgcattagcacacttgtcccttgaaacaaatcatctatcaagagcatagctacagccatgcacccatatccatactgtaatcaccatgaatagacctgcacagcatgaattctgctgctgttatgacactggatagttctgaatatgtccgtagctttgtataactacatgtgattttccattcaggatcgatgaaaatgaagagaagtggagcctttccagagtggccgtcgacgccttgggtgcagctatgcttgtaacaataatcctcgacctgtggcgcatattcttggggccaattgtacccatccctgaatcaagacgctgcggtcaaccggggcttgcatggttccaggtgcagaacgagagcgtctaacccagcaatgccgcgaattcgacagcaaaccatcatcagctacgcctaccattctccagccagtcctcccctctactggaagttctagtgtggcgtcagcatgtgcgcctcttgctgtcagcttgatttgtttcttgtatgcgatgtcccatgggtaacaactagtaaggatgctgatatggttttcttgatctagaatactaggatttatgagccgacagccggacagatactccaataagctataacaataaagattctttgatgtgatcagaagttgagttgtgttggatttgctatgttcgttgcgccctgttttagggagtttccagtagctgtacatactcccaaaattcatcctaactagtgtttgaagtcacattcgtgtgactatgaccatcctactataaatggtgcaagaaaatctatcaataatattatattattcaacgatatatgagaaaaggaatataaaatatttcatatatagaaatattttttgcgcgtttgctacacagatgagagtgttttgtcgtgccctttttttttctttatgttgatcatcataattacaaacttgaaaaataaaattattcttagaacacaaacttgaaaattcagcttttctcttgcagctctagaggattaaggaattgaagaacggaatcgatagatagatagatctatctgcagcttttccttgaaatctctatatacggtttcggggatggaaatgaggcagatgattgggccacgtggcttattgagaatttaggttagctcatttgaaaatcagccacgtgtccctatgcaatctctgattctgctatgattatgctacatcattaatcgtgcattttaccgtgcaatctacagtgaactttcagataaatatattttagttaggtagaaaaaaatctgagctaaactataaaacaccagcatgcagttgtagattatagaggcttctggaaaatcttttttccttcatcatcaaaataaaaaaaaaggcaagagattccagaggttacaaaagaaaattggatctgtccctttgcaaccaaagaaattccttctccttcgattatgaaaaataagaaaataataaggatcaaagagggaaaagtagaaagaaaaatgccgtaagctacttcacctactcggcacaatagccatcttctgcttcctggtggttgttactctgtagccacgtggacgagccatttgagctcgtctcaacgccgtatcccacagtcacataagagctcaatcgtcgctgcagtaggatatcatatactcatagctccattcggaccttttacgacagataaatcgaagctctagccattgccactgaatagagttgattggtaaccgacagactggagagcatcagcgcatgcggttgctggagtcgacaccaggggacagtgagccctgctggagagaaacgagaagtcaatagcatagcgagggatggaagagaagagaatgccaaaaatatctcaagacagagagcgaacgagagaaataggatggagagagagagacgagcggagggtacggtgaaacctgatatgccgatgaagaggaccagatttaccgcgggagagagagtcaaccttcttgataactttgcatttacacccctagaaatactaattattatatgatctactgaataaaaatattcacaaaagtaccactagattgatcatttcaacaatcaaatgttttacgataatagaccttgggaggcttggatttctaagactggtgatgaccggagcctgtacagcctggttgtctaacgcctgtaaattggggagccagcattgtacgttgggatatcagttttatttacctcgcacagagcccatcccaaattggagtaattttgaatttgttaaatattttctgtaatgtggtaaatttcttaaatcttataaattctaaaatcttatgtatcttccaataatagttttatatttgcaattttgtaaattaaaacggaagttgaataaggtgaaaagtattaggccacgtttggttgtttgccagctagacaaactagattgctaaagttgccgatcttgctttaccaagctgtttaggctccgttctatacagagtctaggatgaagattaagtgcgcatgtgaaacgagataaatcattagcttatgattaattaagttttaatcatttaaaacttaaaaaatagatctatttgatattttaaagcaacttatatataaattgtttcgtacgaaatacatcgtttagcaattcgaaaaacgtgctaatggaaaacaagttaaaatctgcatcttaattattagttgtttagttttttgactggcagttcctgcaaagaaacgtttgtggttaaaggaaatccaatttggctctccaccacgatagctttttctcacccgtttgagctatcttgtctcaaaagttataattactttatggttccgaacggtgggcctcgccaggtcaggctaggcttaagctagccttagatccaaacatacccttagtgtttcttttttttttttttgccatacaacaattttgcaaactctaaatattataccaccaacatttcattcatccttgatcgctatttgtttaaaagaaaatataaatattaataccaacatttcattcatccttgatcgctatttgtttaaaagaaaatataaatattaaagaacatgatgtaccatcgaaatactttgcacgataaatatatcaatacttatcaaaacatcattaaaaatgattacttctcaaatagaaaatctcactggctaaaaaaataagtaaaagctaacgaataaagcttcggtccttttgaatttatatcttttgttttaaatataaactaaataattctatagaaaacccaataatatttatatgctatagaggagcaatgaatatcaatcttctgggcgcgtccattttctagtaggtagcgaattcagggtgctttggcatgatattgcgctcagatcgctgcaaaaggtcatcaatcttctgctgcactgtccagtacaatccatagtcttcggcaagggccttggctggaggagagtctccatctcctgtagtcatggtgggagtagcagcggaggaggtaggggttgtttccatgggaaaggcagcggcggcaccacgggaaagcacaagccctaatggatcacctctctttgcaattaaaaagtagaggcagaggatgaagtcggacaatgtgcaactatttaaaagtaaattttgtaaaaccgagttattgtagttcaagttacaacatcatcaggtatgaaaaaaaaatggtgtgtaaactttatatttgcatataaattttaaaaaatatactatatcacatttggaccatgaacacatgttaacagaccaagccctaaaaaaaaaggaaaagaggaaacggactaaacccatgaagaaaaagggccacgtgtttatttagctgaaaatagaaattattaccacatagaccgaaagagatccaaccaccttagccgaaagaggaatgggtagatctgaccacgcggattgggtcacgcacgaccgtgcacccattagaattttcggttcccttcccatgcgaacttctcgggatcgcctgccatctgcccccacacaatcgctcccctcccacatgaacttccagggataagcagaatgtgcgccctgcgcacaggaaattctagggattagcggaatgggaaccttgtcatcctgattgaggttctagattggagatatcctgttagagatatagttttgtatctcttgccgtttttctctaattccctcccgattttgtttttataagttgattgtaaagataacgaagtaccatgtcgatatgtactcgtggtccgtaattaatcgagttgtcgcgttgactcaattacgctttcatgctatctgatgttttcctagcttccgcctaaaaccctagccgcgcattgcccctctctctctctctctctctctgcgtgtcacctctccctcaccacacacatgtccagcctccccttctcctccaccgaggccattgataccacgtcttctatcgtcgccgatgcagttcacgcacgccttacaatctactgttgatttcgacgttaagtccaccttagcgacccacgctgccgactctgcggcaactatcctatttcttgccagttttccctgattctctcatggttctatttctataagtcgattatagagataatgaagtgttctgcctatctgtactcgtggtccacacttaatcgaattatcacattgactcagttacgctttcatggtatcaaatgtttttcctagcttctgcctaaaaccctagccgtccgccgcttctctccaccatgtgccatatccaacctctccctctccctctccccccacaaatgtcgttgacacctcatcttagggcatatacaaaggtagaatctaatatgagctctctatattaattaatgtcactagagattatcctcgtataatagtagagacaataagatttctaaaccattaatgcactaaataatttttttttgttatacttctttccttttctccaccctcatgcaacaaattttccgttaataaatgctaagagtagactctgaaccgttgtcatgcgtagcaacgatgtttctcctttcttccctctctttcttccacgtcaccaaatttacttgcatgacaatgaagagagcccgttattaaacaccagtatttgcatgcccttatgttgtcacccatgcagttcgcgcggccttccaatctaccgtcgattccaaggccgagtctacctcagcgacccacggcaccgactctgtggctaccacggtgtgtaccgcgaccaacggtgagggcctctcctatggcgcgccatcttcttacgtctcgccgccgccactcagcttcggccccaatgatctaaattttttttgagaaaaactatgggacggtgtaccgtctcaacggtatagtttataatttatacttaccaatcactcaccgattctttttctctctgaaagcgtgtcgtgtgttgtcctttcacattaaggctgctgactagtgacgactgacgagagttctcttttctcctagagtacaaaacagctatgaaatactctagtacagcactatttctacacctctttaggtccatatgggtctaacacctccttcaactagcaaagttagaattaagcactagagctagtagcatgagcctaaacaaagcatgttagcggcacgtgagcaagtttggttgtacggcatggtccatctttttatttgattgttgaatagaagtatataacccataaatatcagaattagtggtatcacatctgaagtctcgtgccatcacaccctatatttggtatcagatccgctactaagatgtatcaacccggtatctaggtattggatccggtactcaggtatcaaacccaacctaggtatcgaatccgttacttataggtatcagacccaatacctacgtattagacttagtattcataggtatcatactcggtacctgggtatccgacccagtacatacaggtatcggaactgatactcataggtattagatcagacacccgatacccgggtatccaatccaatactcataggtatcatacgcgataccggattcggtactcataggtatcaaacctgacctaggtatcaaatccaatactcataggtatcagacccgatacttaggtatcagacttggtattcataagtatcatactcggtacctgggtatccgacccgttacgcacaggtactggaataaatactcataggtatcagataagatacccgatacccaggtatccgatcggtactcataggtatcagacgcgatacctagttatcggatccagtacttataggtatcagagccgatagctcggcatcagatcttgtatttataggtttcatacttggtacctaggtatttgacccagtacatggatatcagatatgataatctagcatctatgtatcacatactagagtttctaagatgtggtataaccaagagcccaacatgacatatctaattagaatccattgtatccatatataatctaggtaattatttgtctggtctaatccgtgcatggcataggacacatgcaaatagatgcaaccaatcttaaacacatagctaggctactgtaacaccctgaaaattcggccaataaaaacaaaaccctaaaaataaggattttcaaaaactttttcaataaattgcatcatgccaactttattcgcctatttcattggattttgaattcggagtttgttgatcgcaaataaagaataaataattaggaataaaccctaaaaatcaagttggctaaataaataattaaaatataaattaaaataaagattaggtgaggttagaaataaataaaatattatcacgaccatattagcaataattaaattttagtacgatggaataagaattaaccctaattaaaaattcaaataaattatataaataaaatacgagtagtattaatttagggtgaatttttagttagaataacacaaatatggagtaaacttcatttatgcaaaaattagaatctatagggctatatttaaatagaaaatgggctaaaatcgggataaataggaaaagtcactgtacattacggcataggtgttcgatgtggtaccctagccct

SEQ ID NO: 13903 - DNA, 5221 bp, Oryza sativa
ttttcccccttccgttcccctctctcaaccgccgctccgccgtgcctatggccgccgccggcgaccataggggcgcgggcgccgcctcccgccggctgcgccatcgtggccgcctccgggcgcgccgtgtggccgccgcgtggggcccggccgttagccgcccgtgccctcgggtgcggctgacgcgtggggcccacagcgccggccggtgtgagcccgggtgcgcccggtccaccgaggaccatgaggctgccgcgtgggccccactcccgtggacccggtccacgcgccccctcccctcggctgacgcaataaacctttttaaattaaaatttaaatgaagaaattcgcaaatattcacttaaagaacatataaacttcaaatggccataacttggccatttgaacttggaattggaccgttcaaatctttaatttttccttaagaagtcaagaacccatttttgtactttgttcctgcttgttatatggagtttattagagtaaaagcctttttcctttccgttggtcgtgtagacgctgcagcttcggaagatccgctctacgtggaggttgaagccgacatttgggaaagcgagcaaggcaagtcacatcatccttgagcatattaaatccccgtttgtaaaattattttgatttaaattaatgcattatcgctttatttaaattcccgcgttatcactattttatttagtcatgtctatttacctttgttatgaccttattattattgttattgttattattaccttgttcaccctagaataaacaaaaccccgactagtgggtactctaatcatggtaccactagtatgaatttaggtagatgcttcgctgtttaattaggcaacattaggtggttttataactctagactttgggaatattcatatcacttggacattttggaatggttggattattgtggaattggatacacaccttcccctctattcaaaaccctcaaaatggttttaggccgggctcggggtgcatggttttgatagtagcacctcggccacataaggaccggtcttcgggcctctattgcaaagcactaccgtacttccacatgtctagtgggtaaggcttagtttgtggctcagcctggttataaacaaaagtatacggatggagatggatgaagtcgggggtcgatggacatctctaggacaaatgaaggctacacgagctgcggcccggcagtcgagatgtcatggcacagggctagtgtcctgctactaggggctcagtcctgcctacctgtcccggaggttccggccgtaggtggggctgggtcggtactcttgtctatggctaggatgggttgggaactatgtcacgtctttcgtccgtataccgtggtggtatgtggcacgtggttacacgtgagaaaggtgtgtcttgtgggtaaagatgtacacctctgatcaaagtataatctattcgaatagccgcgccctcggttatgggcaagcctagcaatgtacccaagttagtgttttaaattcttaaaacctgcttaacaactaaaatgtggaatggttggcctgggttgacttgggacgagctgggacccagggtcgggttgccagttcggtctgaatcatcgtaggccttgggttaaggcaggttcgtgtgggttcacggccttgattaataatattgtatagctctaggatcgtgtttacaaggtagctttgagcaactaagtgtcttttaatgctgtttactacaaaccctaaccccctatattataactcccttgtactcccttgcatttattctgcacttgtgggtgtgtcttgttgagtacggtggttgtacttagtcttgctcaatttttcccaaacccagaagaggagttcctggaagatgaaggctttggtgtctagctcgtgcctgccatcaagcgcctgtggtcatcgccctagtcttctgttgtttttcgtttgtcttcatgtgtgctgggccttcgccgcccatgtaataaattaactatttacgcttccgcttgttaaactctgtattgtatcaacttttggtgtaccttgcctcctgggacaaggaataatacacgcacgtaaggaacgcccgttgggttatttccggtcgtgacacttatctccttatttgcctagttgtgctatcatgtctcccattgtatgatcacttgtgatatcttgtgtattttcatgtgtattactcttgtttgagacatgttgtacctctctatggtttaggcttccttgtgatttaatttacttgttgtgaggtgcttgaaatagcaattcacaactgcccggaagttcctaggaagaactccggaagttccgggcagctttctctgcttgtgagaaaaagctgccaggaagttccggaccttttgccaggaagttccgggccctgattttaagcgctgcgatttgaagtaaattttaggaacgcctattcatccccccctctaggcgacatcacggcccattcaagccgatcttatctggtttaactatatttgctctatatgcctcgttgacatgttaaatctgccctttatattaagatcttattgcatctaagtatattaaatctgccctttatcttattctgcatccaggattatgtattgttaatatctgtagccgatcaagtagatttagttctttgttatctatttataactgccgatcgatttacatatgacaccgatcggctatcatttatggatttaaccacggtttctttgtctttatttcttgttgattgcaggatcaaatcaactggcacgcttgcacacccgaaggcgagttttggacctgcactggagttaagcagatctcccaggcctcgtgttttatgtcaacagcatactatcttcttagcctcgtacgttgtctcgggcaatttgtttccctccggaagaatgttcttgacaagtttcaataaatcaccaaatgccttgtcactaacaccattttttgccttccattgcaagaactccaaagtggtatccaactttttgtgcccctgctcgcaacctgggtacaacgacgctctgtggtcctataacatccgctccaatttatgggcctccttttcactttcacagtcctcctttgcgtcctgcaacatctgaccaagatcatccgcagcgtcgttatcgccagcatccctgtccacctcacccgtttgatttccttcaaatccagcgtattgagcccagtcaggaatgttctcgtcctccgcttcatcttcttccatttcaaccccttgctcaccgtgggatgtccaataattatagcttggcatgaaccccgactcaaacaagcggaaatgaatagtcctggatgcagaatactccttctggttcttacacttattgcatggacaacaaataaaaccgttccacttgttagcttcggcctctcaaaaaataatgcacgccgtcgataaactctttggaccgccggtcagcgtacatccattgtcgatccatctatatgaaatgaaaaaaaatcgtacataaataaattttcaaacaataatgacagtcaaacaataatgataaagtaattaaaaactctttcgacaagcatacaataatgacatatcattactcatacaattaataattataaaataatccaacaaacaattcttattaacaatttttgaagttctaaactaatattaatgttgtacttctcttaattttcaatttagtttgttttctattttttaagattaattttcatcatattttaatataagaataaaacttttttaagtaaacaaacaaaatttctatatattcttcttccccacacaaattttctctctcgtcaacttacaacaaagttttggagacaaaaaaaatgtgtgaaacatagctccaaaagtaatataacaacaaaaaacattggaggatgaagttactaacattttagacacctccgatttgtatttaatcactaaaaaaatttcacaagaaattttggcatgacctcccctctttctttgagaaattttgaagcttgctcagactagaggaggaataagacatatataaaggggggatttttagtcccggttggtgtacaaaccgggactaaagatcggttggtaacaccaacgggactaaagatctcggggagcctgacaacgtttgacatctttagaaccgggactaaatatcatctttagtcccggtttttaatagaactggaactattgtggatttcggccgaccgaccaaagatggtttctccaccagtgagattccgcctgtaaactgcgagacgaatttattaagcctaattaatccgtcattagcaaatgtttagtgtagcatcacattgtcaaatcatagcgtaattagcctcaaaagattcgtctcgcaatttatatgcaaactatttaattggttttttcgtccacatttaatgctccatgcatgtatctaaatatttgttgtgacagaatttttagaagtttgaagggaaataaacactgcctaagcaaatacacatgccgcaagttgctactgcagtattgccacgtgcatctgtacatgggccctaattgaactcctaagaccaatagcacatgcaagcatgcacaccatgtacttcctcctttctataatgtaactattttttaggttgtcactggtattaaaaaagtatgtgagaatgattggaggaagtatgtgattggttgaaaagagaaagtaggtgaagaagaatggttgtgattggtgagaggagaagctaggtagatgaagaaatagctttattttggaataaggtaatgtgctagaaatagctatattttagaacggaggaagacatggattcataaatggtcactctgaattgacgcttgccaatttctacatcaaggttcttcccatggatagctatagtgcacacctcagggtgacaagatgcattgacggtgatggaaccagatttcgtagacacgaatgcacatatgccccacatcttcaggataaaaggtactagtagcctcaactattgaaaccagacaaataacccctcgactcaatccggagtggttttggatccacgtggcagtgcagtcagcttttttttaaaaaaaaatcagtagaccccacatgccagttctccacccctctctctactggaaaaggatcctctgatttaactgttgtgcagtt

SEQ ID NO: 13904 - DNA, 7071 bp, Oryza sativa
tcttatcggatggcttgtcatggatcgatccaggtccctccttataaacttgtttatgggcatgagactgttttgccatgggaagttcgaatcggctccaggagaacggaattacaaaatgatttaacagccgatgagtattataaccttatggccgatgagagggaagatctagttcagtcacgttttgtgagcccttgcaaaggttactaaagataaagaacgagttgctcggcattacaacaagaagctaatacccaaagattttttggaaggcgaacttgtgtggaaattgattttgccgattggaactcgagatagcaaattcggcaagtggtcgccgaattgggaaggaccgttccaaatttataaagttgtatccaaaggagcttacatgttgcaaggacttgatggagaagtttatggcagagcactaaatggcaaatatttgaagaaatattacccatgtgttcgggttaacgcatgatcggctaatgttgccgatacatgatagcccatgtgtttacatcgccttgagatggtcgatatggttatatcgcccttagatatttttatattgtaatcaattgtgatttgccgatgtacaatagccgatatggttatatcgcccttagatgttttcatattgtaatcggttgtgatttgccgatgtacaatggccgatatggttatatcgtccttagatgttttcatattgtagtcggttgtggtttgtcgacatacaaatggtcgatattgttatatcgcccttagtcgttttgtataattttatcaatgttttttgacattgtaaaattaggggggcacatacatggaaaattgcaaaatttttagcgaatttagaagttatattaattggtcagatcagcaacattcttgatagccgatttgagtctcgctttctgctcttcgatagactttgggagatcggccagctttctatgttccatatccagctcggcattgcattcttcaagttgtgccaagagctcaatcttgcgagtttcgggccgatcaatattggacttaatcggaccctcagatagctgatcaagtttggccttctcttcatgaaaaagctgccgattggcttagattgtggcttcaatatccttgcgctcccgacgttcggctagtcttagcttggccttctccagcttgaattgatgttattcaagatagactgttggagttagaatatcggctagctcatctgggattagagcttggatctcatgtagccgagtcctaattggcccacagtttaccaccaagttgttcagtgacgatgcttccagccgatgagatatgtcttcaagtgttttctttacgtcatcggacaagggaacctattaacgaccaaatttggtaatatcagtatcggagatgaagattagattgaagcgggatcgaagatgaagattgtcgcggaaacagagtaagaatcggctgaagtccggatcggctacgattggatcggccgagttggagttagacttggttaggtgatgcagccgattccaataatacgacttggtgtacgacatcgggttggattgaggtgcttcaagatgattgccacgcatggatagagtcctgggaaggcaattgtatctattaattaggacattttatgtaatatccttagagatatgcttgagcaaaagtctgccgtaaagacttgtggtatcttagagtttgttagagaaaatagtcgtgtccggtatggacatatcttgtaattctcgggtataaatagaccccaagccctatgtaattaaaaaacaacacacacgttcaatacaattttggcgcatcgccacctttttgctttagttttatttcgacgagttctcgctatcgggttgagctgcatcggtttcgatcttcaacaagaggtaaaacttgttatgatggcttgtgttctcgggattagtgcttccatctttatgatactctaatcttgtttacgtaattcgtcgagttatcatatatcgtacataatctctggcaatatcactatctaacctacaatcggctaacatctgttagtagagggcagctgattaggttagattttgatgttgatttagattatataagatatccaccactatatgaaacttccaacggcttgattgtctagatattgttcttcttttcatacttaatgctgcatcagttgagtttgatatattaagtcgtgcttagaatatcaatctctagcatgccttctgattaccgattagggtagtatcggagtttcagccgatcttatctgatttaaccatattcgctctatatgctttagtgacagggtaatatctacagccgatcgagtagtttagttctttattatctatttatagtcaccgatcgattcacatatgacatcggctcaaagataaatgatatatcatcggcacttagccgatcgactatcatttatagatttaaccgcgatctctttgtttctatttcttgttgattgcaggatcaaatcaactggcacgctaacatacccgaaggcgagttttggacctgcattggagttaagcagatctcccaggcctcgtgttttacatcaacacgcttttggcacgcctggtgggactgataagaagtcagcaagcaattcttcctcatggccgagaaaccaccgctgtcgccatcctcggttagtctaggcattgttaaggaaaagatccagaagttgggattgactgacgtcaatgaaggaaatgtcgtgcccattgatccagaaaaattcacacctgatcagaagaaagatttcgacgcgatgatgcagcaggcacgggatcagttcttgaactcattcatgcagactcgcaagggaacattggttcagaagtataaagtaaaggtagttgccgatgatactgggaccagttcttctaaaggtgaagacgggaaacaagctctggacggctcggcgctacagacggttctctaggaggtcaaggtgacaattctcagggagtccatggggttcaaggtgatggggcgcatggagttcaaagtgatggtgctcaggggttgcagggaggaaattttaatcaggatagcaatgcatcacaggaattttttaataacttccaggatcggatcgactatgttgtgcaccatgctttgatcaatcagtctagggtgttagtcaataccttatcaaacatgatgaagtcaatagccgatggttcaatagctgagcatcaggctgcaggcccagtttatttgcaagcaggtgtcttcccaaattatcggcctttgatcaccgatgctcagccatctattcaggcagttccccccattgttccatcagctcagccgacagcgcctgcatcgactcccctatctactccgtcagcgttggcaccaggccagctggtgaaccctcggttattaataagagaacagccacaacatagtgggcaggttgcgaatcggctaatgcaagatgaggttgctgccacgtttctgccacctcaacctactattgatccaatacagcagcagccgattcaatagacacccccgattcaacagattgtacaaccaattcagcagcaggttgtgcaaccagttcagcaaacgccaccaaggcagcagcctccgcggccgattcagcagacaccgttaagacagcaaatcgttcagccgattcagcaccaaggctcaatgagcgcatcggccgggtttgcgacgcctggtggacagcctgtacaacaatatttaaatcaagttgtcccagaacacttggttcaccacgtatagccggatggcacagtaatgcctcaagttgttcccgaacacttggcatgtaatattcagccaaaccttcataattaccagggggacaacttgaattatcaatatcagcctccttccccgcaagcccagtatcagccagggggactggctcaaccccagtttgcgtctcaatacagtctgttcgaacccatgcaacaacattcacaggcagcagttcagcaacgaccgtgggccgatgtcattgccgacgtaatgagggaacaatttgggcttaaaccaaaagagactataagcttgtatcggcagccttaccctgagtgctttgagagagttcctcttcccaatcggttcaaagttccagatttctccaaattttcaggacaagatggtgtgtcaacttatgagcacattagccgacttttagctcagtgttgtaaagcatcggttgtggacgctctgagggttaggttgttccggttatctttgtctggatcggctttgtcttggttttcctctttgccgtatgggtcgatcaatagttgggccgatttggagaagcaattccacagctatttctatagtggggttcatgagatgaaattatctgacttgacggtgattaagcagcggcatgatgaacctatgcacgagtatattcagagattcagggagatgaggaacaaatgcttcagcttgagtttaactgacgcccagttagccaatctggcctttcagggtatgattgctccgattagggagaaattctcgtctaaagactttgatagcttgtcatatctgatacagaaggtaaccttgcacgagcataggtctgtggaagctaggaaatgctctaagaaggttaatcatgtttgtccttacatatatgggtcggatgatgatgaggatgactctgaaatagctacagccgaatgggtgaggagtaagaatgtcatatcgtgccaatgggtaaagagatctggaaaagaagagaggtatgactttgatataaacaaggctgataagatttttgacttgctacttcgagagaagcagattcaacttcctgccggtcacataattccatcggctgaagaattgggcaagaaaaggtattgcaagtggcacaactctgggtctcatatgactaatgattgcaaggtcttcaggcggcagatccaagcggctattgaagggggcaaaattaagtttgacgactctaagaggccgatgaaggttgatggcaatccttttcctgttaatatggtgcatacagctggccgaacagccgatgggggccgtgtaaggggttttcggatgaattcggctaagattatcaacaaatatcagaggaagtataacaagcagtaggagaagcattatgaagcagatgatgatggttttgatcctcattggagttgcgagttctttagattttgttggaatgaaggtatgaggctgccctctcttaaagactgtcctgggtgcagtgatgttgccgagaattcaagccgatcatatggtatgggtagtcggctaaggcagacaagagttcctattcatcaaagatcgggtccagtgaatcaagatcatgaccaagaggacaatgaaatcaggaaaaatcagtggtgtccttctggtattttcacgaagaattagaaaagaagggttcaaagattgaggaacagtgagcgctttcaggaggttgaacaggaaattaaccatcggctgaagaaagcaaagccgaggcaggagtggcgtgttaagaatcaggttcctgtagccgatgaggctgcagccgatgaggcaagaaagttagctaaggggaaaagtgtcgtaactacttcaatcaacatggttttcacatgtcgatgtcgatgaagttgaagaagaatcgggtaaattgattttgtcgccagagcaagcggtttttgagaaactagaggggacagagaatcggcatcttaagccattgtatataaatggttatgtcaatgggaagccgatgtccaagatgatggtcgatagtggggctgcagtgaacttgatgccttacgctacattcagaaagttgggtagaaacgctgaagatctcatcaagacaaacatggtgctcaaagactttggtggcaatccgtcagaaaccaaaggagttttgaatgtggaactgacagtcggcagcaaaactatccctacaacattctttgtcatcgatgggaagggttcctacagcttgttgcttggaagggattgtattcatgccaattgttgtcttccttcgaccatgcatcaatgcttgattcaatggcaaggcgacaggattgagatcgtgccagccgataggtcagtcaacgttgccagtgccgatttagctctttgggagatggatggtcttgattgcttatctggaaaagtttgggatagagattttctaaaagtgtccgattgtgatatacagccaattgaagatggagagcccaaattgttattttgagggcatcgtggagggctcaggagtctacgtcaaggacacggtggatgatctcgatgacaaggaaggacaaggttttatgtcggccggtgatttggaacaagttgatataggtccaggtgatcgaccaaggccgacgtttattagtaagaatttatctgcataatttagaaccaagttgatagagctgttgaaaaattcaaagattgcttcgcttggaaatattatgagatgcctggactcaaccgatcgattgtagaacatcggctacctatcaaaccggggttaggccacaccagcaacctctgaggagatgtaaggccgatatgcttgaacctgtcaaagctgaaattgaacgattgtatgatgctggttttattcgtccttgccgatacgctgaatgggtttctagtatagttcctgttattaagaagactggcaaggtcaaggtgtgcattgatttccgagatttgaataaaactacaccaaaggatgaatacccaatgccagtggccgatcagctagttgacgccgcgtcaggaaacaaaattttgagttttatggatggaaataatcaaatctttatggctgaagaagatatccataagacagcttttagatgtcctggtggaatcggcttatttgaatgggttgttatgactttcggtttgaagagtgctggagctacatatcaaagagccattaattacatatatcatgatctaatcggctggttggttgaagtctacattgatgatgtggttgtgaaatct

SEQ ID NO: 13905 - DNA, 13102 bp, Oryza sativa
cggttgaaatggtgccatggactttattctttgatggatcggtatgtactcatggttgtggtatcggcctagttataatttcccctaggggggcatgtttcgagtttgcttatactattaagccttacgcgactaataatcaagctgagtatgaagcagtgctcaaagggttgcagttactcaaggaagttgaagccgatgctattgaaatcatgggggattctttgctagtaatcagtcagttggcaggagaatacgaatgcaagaatgatacgttaatggtttataatgagaagtgccaagaattgatgaaggaatttcagctggttactttgaagcatgtatctcgagaacaaaatattaaagctaatgatttggcccaaggggcatcggggtataagccgatgatcaaagatgttaaggttgaaattgcagctatgacagccgatgattggaggtatgatgtgcaccagtatttacggaatccatctcaatcggcttctaggaaattgcgatataaggcgttgaagtacactctattggatgatgagctttactatcggacgattgatggggtgttgctcaagtgtttgagtgccgattaggctaaagttgcaatcggcgaagtccatgagggaatttgtggcactcatcaatcggctcttaagatgaagtggttgcttcggcgtgcggggtatttttggccgacaatgctggaggattgtttcagatattacaaaggatgtcaggattgccaaaaatttcgagcaatacaaagggcaccagcatcggctatgaatcctatcattaaaccatggccgttagaggttgggagattgatatgatcagtatgataaatccgccatcgagtaaaggacataagtttatattggtggcgactgattatttcaccaaatgggtagaggcgattcctttgaagaaagttgattctggggacgctatacaatttgttcaagaacatataatttatcgatttggtattcctcaaaccattacaaccgatcaaggttcgattttcgtgtccgatgaatttgttcagtttgtcgatagcgtgggtatcaaatttttgaattcttcaccatattatgcacaagctaatgggtatgctgaggcatctaacaagagcttgataaaattgattaagaggaaaatttctgattatcctcggcagtggcatactcgtttagctgaagcgttgtggtcttatcggatggcttgtcatggttcaattcaagttcctccttataagcttgtttatggacatgaagccgttttgccatgggaagttagaatcggctccagaaggatagaattgcaagacgatttgacggccgatgagtattataaccttatggctgatgaaagggaggacttggttcaatcgcgtttacgagcccttgctaaggttaccaaagataaggaatgtgttgctaggcattataacaagaaagtggtgtccaaaactttttcggaaggtgaatttgtatggaagttgattttgccgattggaacttgggataacaagttcggcaagtggtcaccaaattgggaagaaccgtttcaaatctataaggttgtgtctaaaggggcatatatattgcaagggcttgatggtgaagtctatggacgagcgctcaatggcaaatacttgaagaaatatttcccaagtgtttgggttaacgcatgatcggctagtgttggcgatgcatgatagccgatgtgtttgcatcgccttgagatggccgatattgctatatcgcctttagttgtttttgtaatcggttgtgagttaccgatgtacaatggccgatattgctatatcgcccttagttgtttttgtattgtaatcggttgtgagttaccgatgtacagtggccgatattgttatatcgcccttagttcacaatataattttatcaatgcctatgacactgtaaaattaggggggcatatatatccacaacaagttgcaaaatttttgagcaaatttggaagttttattaattggcgcaaaggattgtcaagataaacattagaagtatctttaccgatcacaaaattcctaaggtctattacatagaaagttattgagatagatagctctggatagccaatatagcttttcgcctaatttgttctacttcttcaatggcttgagcatcttgagcgtcggttccagggataactttcagagacttggtcagatcagcgacattcttgatagccgattttagtcttgccttctgtccttcgacaacttgtgagagatcggctagcttcttgtgctccagatccagctcggcgttgcattcttgaagttgtgccaagagctcaatcttgcgagattcgagccgatcaatattggctttgatcgggccgtcagataacagatcaagcttggccttctcttcatgaacaagctgccgatttgcctggattgtggctaatctctgcttggccttctccagcttgaatcggtgttgttcaaggtagacagctggagtgagggcatcggctagctcatctgagagtagagcttggatatctgcaaaccttgcgctgatagaaccacagttagtcaccaagttgtctaatgatgcctctagccgatgggagatatcctcaagagtttttttcacatcatcggacaagggagctagagctttgctagtggtatcagtttctgtttcttcatcaagatagtctttgatatcaaatgagaacagatcggctaatacctgtagaagagaaaactgaagacaattatagatcagattgcatggtacagccgattgaaaaccttttgaaggtgatacttactgggatgttaggaacagcaggttgttcttcttcctcaacattgtgactatctgcagccgatggagtacaatcacttgatattcgttgcacaggagatgaagagggaggaggtggctgcaaaagaataaagtattatggaaggttgtccataagaaaaggatttatatgataatcttactggaggctggtttaaaggttgttgcagccaatttcttcctcacagcggtcttctttttttgcaaatgcaagatcaatgagtgatcggctaggaaggaacatgactgctagaggggatcaatgtaagtggtttaccctagaaaagtgagctggatcagaaggagtcggaggagttcgcttgggagaagccgatagagttcttgctatgtcactcacctcggctgcagcttgatcaacatcttcttcgatctgtttttcatccagagcttgatcaatggatggatctagggcaggcagatcatcagctagcttggttttcttcggcttggtttttcttctttggtgcctgagccgatggatttatagccgatgacctagtttttctcttcttgccgacgtcggctggttttctgatgagcccttgaaggagagttgaagtcctgggggcattatagccaataacaggaggagatggtccacccccgtttggaatcagccccagggcatactcaatatttctgccactattgctctggcgaggaggagagaactctgttgtctacaaattaaaaggaaaattagtcaagattagtcggctaaacaattattcagatgaaattaagtaaatcaagacatgcctgagggacaacatctggaaagaggtccgtcatgtacatagaagccaattgatggaataggtgcaatttccattcaccccaccatctgtcaaatgctttgctcctaaaggttgccagctctatgttgtcaatgttgcctagagggggtccttggagatttagcagccgatccatcattaaggttgatgaaatttcccctcggcactggatcttatcggcaaagaataagccgattgggagttggcccattcctagttgtctgcctgagctcattgggtgataaaactcataagaaacctggatgtttcttccttgattaatgccaacagggaggatacatggactgattgcagctgagaagatttctctgggtttctgatatttttcgtgattgatatcttcgaacctaaagtccaatggattctccagaagtgttgaatcttcgtagtggaaccaaactcgagtgtctttttggaaaccctcataaaaactacagaactagtccttgagcagctcagccgatagctttgctcctacatcggctggtgtggaggcatattctccgtatgatgcgcacctacgatgagtgtgttcttctccatcatcatctacagttggttccagtcttgggaatttggcttctgttatagatggccgattgataaacttcataactactagattcagccaagactgcaatagccaccatggtccacctgctccgactactgagccgacggccagcttagctgatatattgtgtagcatttggtacaaatagccgaggaggattttgcctaaaggaaattgtctctttgtctccaaggcttcggctacgaactgctagttggttgtagggccacagcttgatccacaaaagaggaatttttctagccacattagcagaaaagctacatgttctcgaggagtgacagaaccttggcccatatatgctgctacatagcctgaccagccacctatgctcttggtcctgaagtcatattgcttcttcgtgttcaagctcatagggttagccgatgaggtgacgtccagacccgtaatcattatgatatctatgagagttggagtcatcggcgcttgattgaacaagaaggcattgatggtgttggaccaaaaataggaggcagctgccattaggggctcgtctttagctgagttggctatggtgagatcaactgcttggccgattctgatttcatcccaatgaactcttttgctagccgacatgcgtttgaaccatgtgatccaacttttctcgggtgaggttttcttgagagatggccaggatttgaaagtgtttctccagtgacctaaatctgggttggtcagtctgaaaggaatcctattggttttgccaataacgaactcggtgggatcagggttgccaactgggcagagaaagtagtaatttgcgtgcgacaggttgggaattgcaactaggtatgagagatgctgcgaatccaaaagaaccaagaaggggaaaacaagataaggtgttggaagatcggtctgatgctgagaaaggggatctagccgatgggaacttacctcagcgtactcagctgacggcacggcaggcgggctagtggaagaagacatcgtcgcgggtggagatatggccggagatgaagtcgcctggggatcgccttgtgcgtcagagaaatcgccggagaagaagactacaaggttggcttcagcggtgaaaatggaagtaacgggataaatatttttcaggacagcagttagtatttaaagcactgaggataacggtcggaaaacggcggagtgcgaaacttgctcggagtcgatatgcggcaaatccgaaacattaccgaatattccggacttggggggcatgtgttaacgaccaaatttggtaatatcagtatcggagatgaagattagattgaagcgggatcgaagatgaagattgtcacggaaacagagtaagaatcggctgaagtccggatcggctacgattggatcggctgagttggagtcagacttggttaggtgatgcagccgattccaacaatacaacttggtgtacgacatcgggttgggttgaggtgcttcaagatgattgccacgcatggatagagtcctgggaaggcaattgtatctattaattaggacattttatgtaatttccttagagatatgctcgggcaaaagtctgccgtaaagacttgtggtatcttagagtttgttagagataatagtcgtgtccggtatggacacatcttgtaattcttgggtataaatagaccccaagccctatgtaaaaaaaacacacacgttcaatacaatttcggcgcatcaccacctttttgctttagttttattttgacgagttcttgctttcgggttgagctgcatcggtttcaatcttcaacaagaggtaaaacttgttatgatggcttgtgttctcgggattagtgcttccatctttatgatattctaatcttgtttacgtaattcgtcgagttatcatatatcgtacgtaatctctggcaatatcactatctaacctacaatcggctaacatctgttagtagagggcagccgattaggttagattttgatgttgatttagattatataagatatctaccactctatgaaacttccagcggcttgattgtctagatattgttcttcttttcatacttaatgctgcatcagttgagtttgatctattaagtcgttcttagaatatcaatctctagcctgccttctggttgccgattagggtagtatcggagtttcagccgatattatctgatttaaccatattcgctctatatgcttcagtgacatgttaaatccgccctttatgtcaggatcttattgcatttaagcatattaagcttttgtttgatatattatacttgttttagtatcctgatatagagtagtatcggagtattagccgatacatgctagatctatatgatcggctatgctataaacatatatagtcctgttattaatatatatttcgatccaagtgatttatactgtctcggcatggtaaccgatctatcccaattacttgatttaaatatatatatcgatatgagaactatatattggtaatatctacagccgatcgagtaggtttagttctttattatctatttatagtcgtcgatcgattcacatatgacatcagctcaaagataaatgatatatcatcggcacttagtcaatcggccatcatttatagatttaaccacgatctctttgtttctatttattgttgattgcaggatcaaatcaactggcacgctaacatacccaaagacgagttttggacctgcactggagttaagctgatctcccaggcctcgtgttttacatcaacagaaccaaagatttgttggtagtgtcttcttctgtttcttcatcaagataatctctaatgtcaaaagagaagagatcagctaaaacctgcagaaacaatttatggaagattgagagctaagtagatatagtcgatctaatcttttgcatcaggaggaaacttactgggatagcaggagcagttggttgtacttcttcctcaatatgatgactccccacagccgatggagttcggtcactcgacgattgttgtacaggggaagaaggaggaagttgtaaaagagacaagtgttatacaaaatcggctgaaatcaactagtaaatttaagaataacttactggtggagctggattgaaaattggtgctgccgatttcttctttacagcaattttcttcttctgcagctacaaagtatatgagtaatcggccgaaaagtgaaataattacaaaagagattgaagggagctgcttactcttaagagatgagtgggggcagaaggagttgaaggtgtttgcttgggtgaagccgatggtgttctttctgtgtcactcacttcggctcaacctgatcaacatcatcctcaatgtcttcttcatccagagcttgctcaatagatggatccaggacaagcagatcatcggttggtttaggtttcttgagtttggccttcttctttgaggctagagttaatgtatctgcagccgatgacctagttcttctcttcttacctgtatcggctggttctctgatgagcccttgaagaagagttgaggtcttgggggcattatagccaatgacaggaggggatggtccacctccattaggaattaaacctggggcatattggatatttataccactattgctttgatgtggaggggaagattctgttgtctgcaaaacaggaacaaaagattagtcaagtaatgaatcggctgacagttatgcagtttagtaatgacaaagtttacctggggtatgacattagggaatagatctgtcatgtacattgaggccgattgatgaaatagatgcagcttccattcaccccaccatctgtcaaagtttctgctcttgaatcctgccaattcgatattttcaatacaacccagaggaggtccttggaggttaagcagccaatccatcatcagagttgatgagatttctcctcggcactggatcttgtcggcaaagaataagccgattgggagttggcctaatccaagttgtttggttgaactcattgggtgatagaattcgtaggagacttggatatttctcccttggtggatgccgacgggtaagatgcatgggctgattgcagttgagagaacttccctggccttttggtatctttcatgattaatatcctcaaacctaaagtctgatggaagctcaagatctgctgagtcttcataagggaaccaaacccaggcatctttttgaaaaccttcataaaagctgcaaaaccagtccttgagcagctcagccgacagctttgctccagcatcggttggtgtggatgcatattctccatatgacatgcatctgcgatgagtgcgttcttctccatcatcttccacaatcggctctggcatcggaaattcagcttctgtcaccgatggcccgattgacaactttcatgaccatcagacttaaccaggtctgcagcagccaccatggtccacctgccctaactactgagccgacggctatcttggctgatgcattattcaacatttggtatagatagccgaggagattttgcccaagggaaattgtatctttgattctaaggcttcggctacaaattgccagttggtcataaggccgcaactggatccacagaaaagaaatgtttccagccacatgagtaaaaaggccacatgttctcgaggagtaacagatccttggcccatatatgctgccacatagccagaccaaccacctatgctttttgtccagaagtcgaattgattcttagtgttcatactcataggattagccgatgaagttacatctaaatcggtgatcatggtaatgtcgatcaaagttggagtcatcggcccttggctgaacaacaaggcattgatggtgttggaccagaaataggtggcggcagccatcagaggttcgtcattagcagaattggctatggtgagggcaagcgcttggccgatcccaatctcatcccagtgaactttcttactagccgatacgcgctggtaccatatggtccaactcttctcaggggtgattttctcaagagatggccaagacttgaaagtattctccagtgacccagattagagttggctaatctaaaggggattctgttggtttcacccatgataaaattagtgggggtcaagattgccgattggaccaagaaagtagtggttttcatgtgacgggctgggaatagcaactaagttggaaaggtgctgcaaatccaaaggaatcgggaagatgagaaaaggggaaatcgatttcatgcgaggaaaagggatctagccggtgagaacttacctcagcgtactcggccgatggcgcggtagacgggctagcggaagacaacatcgccacgggcggaggtctaactggagatgaaatcgcttggggatcgcctcgagcgtcggagaaatcgccggggagagaaaggagaaggttggcttcgacggtgaaaacagaagtaacggggtgaagatttttcagggccgcggttagtatttaaagcgctggggataacggtcggaaaacggcaaagtgcgaaactcgctcggagacgatttacagcaaatccgaaacattaccaaatattccgaacatggggggcatgtgttaacgaccaaatttggtaatatcagcatcggaaaagaggattagatcaaagtggagtcgaaggcggagattgattcgagaatagaacaagaatcggctggagtccagatcggctacgatcaggatcggctgggtcgagttagattgggtaagccgatacagccgattccgacaatacgacttggtgtacgacatcgggttgagttgatatgcttcaagatgattgccgcacatggatagagtcctgagaagacaattgtatctattaattaggatgttttatgtaatttccttagagatatgtttagggcaaaagtctgccgtaaagacttatggtatcttaaagtttgttagagataagagttcgacatggacatagtttgtaattttcgggtataaatagaccccgaaccccatgtaatcaattaacacacacattcaatacaatttcggcgcatcgccacccttttgctttagttttatttcaacgagttcttgctttcaggttgagctgcatcggtttcgatcttcaacaagaggtaaaacttgttatgatggcttgcattctcgggattagtgcttacatctttatgatactctaatcttgtttatgtaattcgtcgagttatcatatatcttacataatctctggcaatatcgttatctaacctgcaatcggccaacatctatcggtagagggcagccgattaggttagacatggacgttgatttagattatataagatatctaccactctatgaaacttccagtggcttgattgtctagatattgttcttcttttcatacttaatgctgcatcagttgagtttgatctattaagtcgtgcttagaatatcaagctctagcctgcctcctggttgccgattacggtagtatcggagtttcagccgtgaaagatctatgtagtagagttgccttgtaaggggagattggaatatctatgatcctaagagtgcggtgattgttttggtgattaatgacaacccagtgttggaactaactatttccatgagttggtgagattaggttaagttccggcatcaagttaaaagattgaagctagaagatggacattataccttgatgacgagcaagtgaagacattgatgatgcggggtatgaagtggctatctatggcaaaacggtgaagggcaagcaaggctcggctacagtggaccatggggggtgaagagcaagaaagaggcttggcgccgatggaccaaatccggtggtgaagggcgagtaaaggctttgtcgtgatggaccgtccgaggccatttgaagctatgagtaatccgtatcaattattagaagaccacaagatggaatgccgaagatcaagaggatgtggttctccaatgaacatcaagtcaaaagccaaagtgggtattgatcaaggcaaaggtataattgatttgggactaatatgcttaatgagtgtaggttgcttaggagtgggctaggatgcttggagaccccccaaaacatcaaaatcaaagcggcgagaagactcggagccgagttagactagtttactttttcgctttgagtttaggaaaaaaccatactattaagaggggttccaagtgtggttctgagataacacaagtgctcttggtggtgtccaagtgttgaaatatttttaggagctgcttttgaaaatggctctactcgggacagagagtcccacccggaggttttgtccggaacttcctggcaccgaggtgaggttgaaaaatttcctaagtgctgcccggaagttcctggcacttttacccggaacctcctggcaggtttccagttcaaacttgtgagtaacggctagatgacgtcacctagccgttatatatatggatctcgtccccagatccccctttggccattccactttagttcttgtgttccctagcttcttctagcctctcccaatgtgattttgcttccaccacccaaatcttgtgtatttcttgagtgagagagtgattttgagggtggtggtcaggattggagaaggttttgaaggctaggatgacttgagcacttggggtatctcgttgggctgtcatttggagcttgttactcttggagggtgacctcctagacggttaggtgtcgcccgcgagtttccaacaaggttgtggattgactcgggcaagtttgtgagggcgttattccacctccgaaaggaaacggaatacacggtgagtgaattccgagctgaggtttaggaggtcgtcttggtagagcaagcctcacttgtgctgttctcttggtgttcaagttggggatcttagtggtcacttgaaaccaaagagaagtacctaagggtgttggcttgaataccggagacctcttcctaggcctttgcttggtgaggcaaagggttaatcaagacctggctctttggagctcctcaacagagacgtaggattctcggtggagaatacgaacttcgggaaacaaatcttttgactcctctcactctctttacctttgtgattgtgatgcttattgtcacgtcccaaaatgaccctaaaatatatcctttaaaattatgcctagaataattaaaatccttgtgaaagcctccaaaaattaaaatgtgcactgttaaaagtcaaataaggcttggaggatttttgtataattcctaaaagcctaacatgtgtaaataaattttagtggaattttcagagcacaaataataattattaagaaataaacaaagttgaaaaggttttataaaaagaaaaaccctaaaaacccctctcccctctaatgggccggctcggcccatctcccttcccctctctctcctctaccccgcggcccactcggcctctccccgcgcgcgcgccgctgatgggcgggcccgcccgccaccctcgctgacgggtggggcccacccgtcatccccgtcctcccgctgctcccgacgccccgcccgcgccaagcgccgccgccgccgccgaatccgccgcatcccgccgcccccgcgtgcaattaagtggggggaattattccccgtgatcccctccccctttccccccatttttccctctctctctcgctttcaaacggccggatttgctcccgcaaatctcgccggcgccattgatggcggccggacctcccgcgccggtttcctttcccgccggccgccctttttcccttccaaccctatttaaaccctt

SEQ ID NO: 13906 - DNA, 658 bp, Oryza sativa
  unsure (1)..(658): unsure at all n locations
acagggattatactagttcaggcccttggtaggtaatagccctaatccagttgatatgggattatatgatggaaatcacagattacaaagggaacagtggaactcgatgataccgacgagaccgtagtcgagttggttcgactagatcacccggcgacttggctcctgtaggctcgcttcgtaagctatggtgggtgtctcggcggtgaaaatcgatgccttaagtcctcccgggggtcccttttataccgcaggtcaggtggtttcaaagtaggacccagagacatcggaccatcggacctatacgatacagtgacgacccagtcctatccggataggaatctttccatctgtggactccgtgatgaatttccttagcgtatacagagaacgtcggtatacgcgcagatataccatatcgatgtatagcgtataaaagtagggtttgaatttagataaatttaggtccaagtttcactagaatcagatctacggtttaggagatatgggcttctaaagattggaatttgaattaaatctagaaaagacgaaaatgtactgttcatgggcccacctgtcagcctttctttctctttttctttntcttttctccttcttcttccttcttctcgtcttccttttctcggttccagagaga

SEQ ID NO: 13907 - DNA, 736 bp, Oryza sativa
attcctgcagcccagaattactagccaagtgctatgcttactgctcatgtcactaaacgggttgatgccatacgtgctcagcccaaatctaatgcttcttggatcctttgtaaattcagaaaatatccgatcgatatttctctattgtacaacatctgcaggatgtcttagcataccatcattagtgcggtcctctttgtgccgcctaaaaagcttagcctctcttggattagcaaacaaccgcttcaaacgagcttttataggcaaatagtatacaacctttgccatatcacctttctttgacttctagtcttttgtgctactattttctctcttgtatcgagatgccttgcatgaaggacatgcttctaaattgacatttttcttgtagtacaatatgtaatcgtttggacaagcgtgaatctttgcacctccaaccctagtggacatagtaccttctttgcttcataagttgactttgctagcatgttcccctctggaagcatgtcacttagcatgtcaagtagcttagtaaaacttgtatctgtccatccattacttgtcttgagcttcataagttccagcacagctgataatcttgtgtacttcggtttacaatatgtacagagaagtctcctgatctgtaaccaaccgggtaaatctctcataatcttttcctttgtaactagagtcctctgctcacgtaacatttcttcgaggcaattatcaacatcaa

SEQ ID NO: 13908 - DNA, 6507 bp, Oryza sativa
tagatcaaataagtaatttaggagaagaaattgttcaaagtttgctttgcggatgtctgctccatgcatgcagaggcagaggcagtggtattgtttgttcaaagtttgtttgcgatcgaaatttgtttttggctgctgctgtatggatgcacaggtagtgccctggtttttggcatttcatcggcgcaacatgtttcgtccggaatatattcgttcgcagttctgcacgcattgatccaaaatagaagactctcacatacggaaaatatgaccatatgcatttccactgggttggctggagatcttattcaatttcctagtttacatgtgtacattgcttttgatcatgcccacgcgctatctagttattgacccatgcacctgcataggcaagtggtctatatttgttgtagttctacaaaatatgttgatattattaaatctatggatgtttttgaaaacatacacaattttatttaatgatccattattttttatttatatatagtattcccttccaaaacatcattctacgttgcccccataaaaatatttagttatatttattcatcattttcacaactccaaaataattgtctgtgactcactatatatattgtcatgcagttgataattttttagtgcttcggggcaaacaaaatgtttcaacaaaacattaattaataatgcgtgaatttatttgttagttttatgccctaacttccatgtatattatacacacacacatacacacctgcctgtctactggtaaagttaaaccttcggatagaataatacctcaagatgctttacatagttctttttttttcttgagaaacagatttgcagttttgttggttcatgtagatgctagtaataagttggattacatcatttaactatttaattagagagagctatagaaagcattaatattgtcttatgctatctagattgaaacaaaattatcttaattcatctaagccattccagattgaatttctttttaagagcaatattataaaagagctgtatttattgtagtttaactagcttctagtcttgtttgtagaacttttgacagctacaacttatggctactctagaatctctatagctattctaaatagtttagattctcacccgtacgtattcttagagtttgttttggcgagctttagattatgagaagaagtaatctagagaagccgacaaaccagcttttggcttctcattcattattttgtggattctacaacaacagcttctcagaaccaagacaaaagttggatggttgagcgctccacgccccacaccacatctccgcccgcgccacactcgtggagagcgcgggattcggttttcgaatcccagtccccctgtctctctctcctctcccatgtcggagagaaatccggccacctcccggccatgtccgcccctcccgagcccctataaatctaccccgcattctcctccacctttttccttctttcgccgtcctctcccactctccctaccgccaccgcaccgctctcccctaccgccgcctccggccaccactagtgccactgctgcgtcgcaccgtcaccgccgttggcctcgcgaggttgagggttgccttgtccaccccttcccgaaggccggaacctgctgtagccatcttccccgcgcgcgccgttgagctccgtgttgacggtccttacatcataaatatctgaccgttaatgcttgcatataatgaaataaaatatggtatctaacttagtggtagggattattactaatcatttccactagtgttggtgaaatatgtgtatgcaggtattttaaggataaaatacacccgtcatgcgaggaaacacactttcggccaatcaggcgcaagtacacggattgaagggcccacaagtcaggtgacaccgccatggaatgggtcataatcgccatcagggcccaccggtcagcctcctggccaaaggagagggcaggaggtggggcccagggttcatccgaaccaccaccggcgcctctgatcttggccttccacgtgtgcgttcttgatgacttctcaatgatggttggagggcagtttggacatttcccatagccataaccatcatatggagcctaaaaggaggtctccatccacacttcaacacacacaactttgagctgaattacaagaggctctattgtatcttttgtacattagaaaataagtagagagtgaggggaaactgtggagtagtgcccagaaggttggcctctatccgacttctacctcgatgagtgtagttttctaggaggaattctagaggagtaccagatctgtcggtacactctactctgggttcggagaaacttgttctgtaatataagcattcggaatccttttttttacataaaacagcaggggaggcttctactgcgcatattaaataatataatatagaatatttataggttacaaggatttacaaaaggcaaattaattaaaaatgtctagccatgattgccagctaggtttgtccatctcttttgctctgtccatatgcatgttaaactccctcagaaaatgagtcttccatttatcaaaactgagagcaacattgttaaaaatgaggtcattccttcgtaccagatgtgccagcagctgattaccaaaacttcaaagaagaaagtgtgctgaaaagagatctgagctaaagtgatcatgttcataaattccaaggccaaattccagtaataccaatgtgttgccagcattgttgagcaaatggacgggagaaaaacaaatgtgccatgctttctgtggtcatggagttgcacatcaaacagtttgtgccaccttgtatgttgaattgctttttatgtaacatttcctttgtgttgagtcgattcattagcatgagccaaagaaaaactttaagcttcattgtgcatttgcttttccagagtattgatagaggcctggcaacttgaagatgttcaaaaaacaatgagtaaactttcttgggttggtattgatctgagttccataaatactagttaggtgcccatgcgttgcaatgggaaatatttatataaattcatatatactctatcacttgtctctctctcgccccctctctctcgggccgacggcgcaggtcgagcggcggcggcggcgggtggtcgacgtccgtggccagacagcgtgggtcggctccagcaaaatgctcagcgaggtgtactatgccatcaccaacaaaacctcccgccttaggttccccagaagtgtcggcccgacgttcggcatcggcgggtacctcaacggcggcggcttcgacctgatgctgcggaagcacacagcctcgcctccgaccacgtcctcgacgccaccatggtggacgccaaggggaggctcctcgacagggccaccatggaggaggacctcttctgggccatccgaggcggaggcggcagaaacttcgggatcgtcttgtcctggaagctccggcttgtccccattccggccaccgtcacggtgttcaccgtccaccgctcaagaaaccagtccgccaccaacctcctcatcaagtggcagcatgtggcgtcgtcccttcccaacgacgccttccttcgcgtcgtcgtgcccctgtaccgtgtgccggcctcgtcgccaccatggccgacaccttcctggagctcaacgtgatggcaagcgactgcaccgagataacgtggatccagtccgtgctctacttcgcgttctacagcacggggaagccatcggagatgctcctggacaagggcaacggcatcggagatccatcggggtcatggatgcgactggcgaggtcgtcgtagtggtcgaccgggccgttgtcaatgaaaaagtcgacgccgtcgccgccgccgcctcacttcctccgcagccacgctcttccgctgtcgcctcgcctcctctatcgtgcttgcagagccaacctcaccgccgtagcctcgcctcatcccgagctctgcctccagccgcctccgccaccagccaccaccctcatcccgagcgccatcccgaccagtggcggaggcggagttcgccgctgccgcctctgcttcccgtgtggtcgctgcatctgtgtcccttgccgccgctgctccctcccggaccgcagcaccgaacgccttcctgccgccgcaccgtgcatgccgtcttgagtgccgacgtccgcaccgtcgtcctcgccgaccgcccgtccctacgccatcctcgccgaccgcccacgcccaccgcccgtccttgccgtgcgcgctgcaagagagagaggaagagctagagaggagagagagaggaagaggggaagaagagtatgataggtgggtcccatatttttttattaaataaatgctgaataggtactaagtacatagacttttctataaacttaattaaacttttaagaagtttgactgcagaaaatcaaaacgacttctaatatgaaacgaagagagtattaatttaaatccatagctaactgtagtttttttttctagagcaccatatttacaatctcaattcacaattaaattttacaagcgtgtataaaatatagacaacaaattctccccgggtttccacacatgacaaagaagttcaaccgattgcatcacattgtgccagtaatcaaatcacaaaaatctaacagttcacacatcacactcatattgtacaggacaaaaaatgtgaaccgattccatcacacatccaatcaataccattcaaaatcatagttagtcagtggccaagttcagttggtggaagtccacataaagattcaaagtgcagacctagaaggtgtattaatcagtgaacaactgctatagttacatcacaatatatcccagaaaggtacagaaaattattggacaagagattatatgaatagatgcaaacatattaattccatgagaacaactgtattgccaatacagattactgaaacaccaatagtagcaggaagttccacatcctatctaatttaaaaatatggtataaaataatatttgcagatttaaacagaatttctgcccagaacatgaatcccagggatataaatctgattgttctaattggtcctctgtgccgttatacatgtgaacgcatctttttttgctttcatcccaaatcctagctaagatctgtatctaaagaacaagatacacgggcatattactacgtcgttgaccaggggatcatcctccaagtatatgacttcaatagtccaagatttttaatttgtcacttctaaacctttgagagaaaaatagcccagcagacaacggcacatttttgtgctaatgcactgttatttgaatgcaattttttaaaaaggaactaaagcatggcttgcttaaaataggtcacattttatgagcaaaatgatcacattttaaaaaagaataaataatcgggcgtttgttaatagtaaatcgttaaatttctcaaaaaaaattatatatttgcaagagggcataagaaaggaagacatgggcgaaattagcatgcaaaaagtgcatcattcgagtcaataacatgcacatggctaacctgattttgtacttgatggtgtggagcccccaacaatcttaaccatttctgaaaataaatgagatgatagatcaaatattatgaatttgtgaaacaaccaacagaaatatgcagtgcacacatttcattgatgacgaggctagcatcttattatgcatctgtttgatagatcaaaaatagagagaaaatagtgaacaaaaaagaatattaaactactccccaggtttcctcacgtgacaaaatagttcaaacgattgaatggcatctcattgttctaattgctcctctatttaagtatcttaaaaacaagatgcaatggagtgagacactcaacttttgagtcctgatagtacatctcaagaattttagaacaatagtaaaagctcgaaaattcagcagtgaactttcaagtgtacagggcatctttagaaattcatagtgatgataaaaactcagcataggagcttcatgtattctgggcttcagatgcacaagacttcaaagctcctatttctgtatacatgacaggagatcgacaggcttcctacagcttaaatgctaaattattagtgtgtaattggtgccctcatagacccattgagaaacccttcaaagatgcctgcatgttgccaatgcagattcagaatgttgacctaaaaagagaggtgttctccacttgagttcagagttgtaatcgcaccaagagtcttaagactgaagctaagttcattcaaatgctatatatatgacattccctaatcactcaaggccgatcgaggacttattgttcatgtttagaaggagtttgaagagatcaatttgctaaaggcactttcttacgtatgtttgctgattgcaagaagtggcagatccaacaaagaagtagtagatcctcccaatcaccctcctagtctcct

SEQ ID NO: 13909 - DNA, 7808 bp, Oryza sativa
  unsure (1)..(7808): unsure at all n locations
ctgcacccctttgaaatgaaggagccgcttgcccctactctgttaattaatggtaacggtgttaaatgtgtggtgaatagacaaatatacccctggacatgttttggtatacacactggatatgtttcaagttattttgtgcgaatttcatataaacgatgacagaacacagtttataaagtagtacatacttattacatatgattgcaacattgcacaagatcaaggtcctttatattgggtagctacagaaacaagattgaatcacaagcatggcgtagcaaatcaagaaccccaacttcattatctagaaaagaaaaaaaaatcaagaaccccaacctgcgttcggttctgggtccgcggatgtggatgaactaaggtggcgggctccggcttggaggaggaggaggcctccaccgctgcctgtatggcgccgacggtgacatctctgagccacctgacgttgcctcggagggtgaagccgtggagctccggtcgacgaacgccggaagccacaggagaaggcccgcgcccgcggctccgtcggctggacgacgtgctccccggcggtgttgtcgatgagggagggagtagcggtcgcgacgtcgtcaagcttcctttaacagcgccatcccgccgccaagcttcctgctcgctgcttgctggctcgctggccgacggagccgccgctcctctccgccgtgcgctggccgcggggccgccggccgccgcgcctccctgcgcgtggcagccgcgtcgcgcatccctgcgcgctggccgcggggggcgccacgcctccctgccccgcgcgcccgccgatccgccgccgcgcctccctgcccgcgcccgactccaccgactccgccgcgcgctggcccgcggcagctgccccgcgctgccgccgccgcttgtcgcgtgcgccgccgccaccgcttgcaacttagctatagcgtttggagtggaaatcgggagttcgggacagggattggggatttgcctctttcattgaagggtagaatggtcattcacaaatgataataacattttgtttcatcatttaattctaaaatttcgggcccaccatacttctgtcaaaaccaggggcagacgactgcttcatttcaaaaaagcaggggcaaaatcacaaaccctaaaaaacaagggtaaaatcacaattgaattgtaaagcaagggcagaaacacaattgcccctaattttatttatctgcgtgaacaaaatatctgaattgctaaaagagagttcaaacagtttttctcctctcgagacttttactccggcgcccctaatgactcatttactcctcgagacaaaacaatcaagagaattgcttagactctgtttagttcgtgaaataaaaattattgggtatcataccggacgtttgactagaagtcggaggggttttcggacacgaatgaaaaaactaagttcataactcgcctggaaaccacgagacgaatcttttgatcctaattaatccgtcattagcacatgtgggttactgtagcacttatagctaatcatggactaattaggctcagaagattcgtctcgcggtttcacccctaactgtgcaattagtttttatttttatctatatttaatgctccatatatatgtcaaaagatttgatgtgacgtttttgggaaaaaaaattaggaactaatcatagtgaatatgtttaaatgcataatatttatataaattatattaatgtatgatatccacaaaagttatcaatatatgtctagatttattaacatctatatgaatatgagcaatactagaaagtcttacattatgaaacggagggagtatttattactccctccatttcaaattgatttcctaaatgatctacatatttgtgttcatttattaggtctattcgttatttatgcattggagtaaatggacattgatacatgcatccgtgaacacatgtatttataacccatatgcaatattttgatttgctattggctaggaaatagtggggatggtgcatgtattgagtttgttgctagagtaaatatagtatgagagagttattagcttttcttggtcttggtataactatgaaatatgtagatcaatttgaaatggagggagtaacatggtaaccgcctcagccatgttgtacttgtacatgcctagagtgggcttttcaagttactccataggaagcttccaatgaaaacatacagtattgactgtactatcacagcgttcatagtattacttgacatactctacatgtattttaaattttagtggttgacattattatctattaaaatatgctatagttttacgtggtaaaataataattatgctatagtttcaaaagtatcggtaaaaaaataattatgctatagtttaaaaactatcattagatattgggaattaacgtggcaggagaaacatagtttcaccacttaatttttcaaacaataaatacatagcaatttttatagctgcccattcgcattatcattacaaggcactacgtttgcgcaaagattattgcatgcatgctatgaattatggagagtacaatttttcatcaactttggtggagaaatccactgaattaatagataatatcccaaccaaaaagtcatgttcctaggacatgtcatccacccccactatctccataaaaaactgaaaagaatgggaaaaattgtacggtaaagtcaatgcagtttgtttgcttgtctgaagtatgaacacaagaatgattcttcaacaaaaacataagaatctctccgcaaagctggcatgtggacctatacaatatagataaatcagataaggattgtatcttttggcacattcctaaccagcaatgtatattaataaaacacctaaaacacataaaaataagagaattaaggagtagtatatattttcagaggagaatacgcatacgtataaaattccctaaaacacatgcacaaattaaatgaggctaaaaacatactccatggagttagcatgcccacagcacgaacacacgtacatttccctggacatttttgtgcaatttggatatgcataagtcatcctaattaaggtagattaattagatacattatattacattctacatatatagaaatgttccttcttagctagttcactttgaattcaacgatgaaaggcactaaagatgtcaatgttgaaaggaacggatcaaagggctggaaagtctcggtcatcggcttccacgctctaccaccaactaacaagatgacaaacaaaaatgtcacagtacacatcagctaatttacgtgctgtcaatacttgtgagtttgtccacgtttcaatttactcatgcaaccctattcgagtacagttattgctaatatcttaattagtaacaaaaagaagttacgtcgcctaatcaagatgaacatataaaaccatccaagattaaccacatgctgcatgtggaagtggataatgacttggataattactctacacccatggagttaattagacaagagtagtatagtactaggaatttccactagttttacttcattaaagagagctagcagcacaattaatcggtcttatagtaaatggccaaagtggcgcagcacaaatggtacgtgacatgttaatactacagtagaatgaacacgtagtatgaacggcctttttgactttctaccctaacacacggctttaccttcatctctgtgactctgtcctcttgcacggttctgtttttgaaaggaaaaaaaaaccaaaacccatacatatcgtccagaacattcgtcccactgacatgtgggacccagacactgaccctctcccctctccgacagtatctggactggatcgtcatcctacggccacgattcacgcagccgccgccgcttccgtcaccatccccacgttggcgcggggcccgcacccccacccactgacgtcagcggcgccagagcagcggcgtgcagtggcaggcggctgaaaataacggtgaactcgcggttccagacacgtcttttcttaaaccgtggttaagctgctaattgtgggcgggtttaggcgaccgccctaaaccacacggcttacggtttaaccccgcacgcgcccctcgatgacagcgtggccccaccgtgatgcgaccccacttgtcagcgacggtcgcgtgggagggggctggaggcggcgcgctcaccgcggatggcgcggcggcaggccactcctgtcacgacacgtgggatggtacccaccggtggcccacctgtcagtgaggggagggggcagtgacaccagtgagagacgaggagtaattctataaaacggatttggcgcacgcggcacgcccacccgctcgcgcaattcgcacgctctcctcgcctcgcctcgccttctcttctctcctcacctcgcccgcgtcgtcgtcgtcgtcgtctccgcggcggcgggggaagcagcgggaggcggaggcggagcancaacagcaccaccaccccggggcggggccgcggcgcggtgctcgcgcgcgtcgactccgtgtggtgcgccgatggtcctccccgcttcactccggggttcgtcatttcggtgggcggatgcgggtgggttggattcggtgtggttcgtggggggtggggattcggatcgggggtgattttgagagggggggatcgggttcttgattcgaggtgcgattcgggaatcgggagttggagcgggggagggggaggaatatttcgtgtggggtttgtgcgcgattctccccgtcgcttttggggtaccatccaggggacgagggagtcgtttgatatggtcgcgttcatgcttctatttttgggtggcgatctcctgtaaaatttggacccggatcggggtggttctgtttgtggtcgagttttcctcgatttgattgctgagcggaatattttgttgggtgttcttgaatttttttttttgcgtcttatgtggttgattggtttgcgattcttcattagtttatcttcgccgcgtttgtgtaaatgtgggtaatgtaaagaacaaaaaaaaaattcagggactaaaattagtgtgttctgttatggcttcagcgttgctggtctgcagctgctgcggaagtagtaatagatgaggaaatgcccaccgatttttccagattgtttgatttcttcttgccctgttgttgtggccttgataagatccggttatggctacttattttattcttttatgccgtttaaatcaattagttcatgtatctttgctgtacaaattgtgtgttatcattttgagttgtggcattttgtcagtccaagattccctgagacaacgaaccttactaatgatggcggtgagcagctactgagctctgcgtttgctttacctgatagtgcttaatttggcaattgttagctctgcatagtgctactgtacacgtggtagtgttcagttttggtaggaagagcactaaatttaagtactgctatgtatcagttatttctttcagattgtttgaccacagaacagatacgttttcatgttatcaatgcacatccttttagaaatatgccttggtatttgtatgtcaactaaagaagcttgtcgtttacaattggttctatttttttcaggacaatcatgtgttctaaaggtattgggttagcatcatttaacaccagcataagcaaattttggagcgatgaggagcttgtccgattcttagcagagaggaaagaagcacactctctgccagagaatgtatttgtgggaatgaacatttctctcattgatccacgtaactcaggtttgcatccaatctatacacaggataattaatggtattttccaacaagattatggcatatgtggaatttgtggtctgactttcataattcagtcattatggaccctgaaggcttctttgttttgtcctttttgatttgttatatacttactttacagcattgtattgtatggttgagcagtattgcaacattttaattctcaatagacaactaaagaaaatgaattctgcatagaattgataactatttagggttgaaaggcataaacaatattttatgcaatgccagaaagaaatattttgagctctgatgaaagtgccatgttaagtgcaggaacacatacttctgccccattgattatggcacaaattgccagcatgaagtgctcataaactatagcaggatgttatatgagaaatagtttggcacttcacattaaattgagcattttgtttttcatttttcttagcttgtgcaccaattgcttgcctgcttttgctggaaaagtatgaagtacactctttgatgattaaattctgttcactgtgttgcttggctagaacttactctgccatccttactagattctccaattatgcaaaatcattgtttccaagtgaaaattaagttttcgaagatgtcagaattcagtatatgcaattaattatcaacttttgtttttagttggagtcactatacaagcagatcatgtgcttagattttggggcttcagttcactttccacactaaaatgtgcacctaagttgttgatatgtgtctctgcactcttcagtatcccacatcataacacatagtacataaatctactggaatcatatattaataacattcttgcatgttttaaattggtaactggtgcctggtttcaataaagatttgattgcaaattttctgaggtatcagaactaaagtttactcttttttgcatagcacaagtccacagttcactgtgaccagcggtgctatatcctagagttaagctattcctacaatgaaaaccacaatggtgcttaatggcttattatcttgttaaacctcaataaaagataatctgacagagataacttttcttgcagaggacatatggtacatgaatttttcagatgatccacaatcccctaagaatggagaaaatgctattataaagtcaaaaaccggatactggaaagttgttggcactgttagaataccgacaagtactgttattgtgggtatgaaagtttctctggaccattataaggcgaagcaccatctggtaagagaactgggtgggtgatggatgaatatctgattgaacagaatgacgaagctaatctaccacaggtaacccatggtggttgattgatatcatttttttttctatagcatataagctttttttccagggttgttgattgatatcttttgtatttttgacaggactacaagaatttgtgtacaatattctttcagggagacgacatattaaatgctggagataagcagatatgtctgaatgcaaatgttcctaatgaacgcaaggaattttaccttcaatatcttgctgaactagaagagcaaaatgctgcatggagcaaccaggtttgtattgttttctttattatgtaaggcatccttagcaataccctggatcttttagttttgcacatattttttctcattttagtgtaaagtataccttgatccatgattgtctgtcatgtaaaattaagaaatactccagcaatcctgtcattgtaattcacttttttattttgattttgaagtatttaaggttttctccttcataaccatacaaaatctgttgtttgtgagagcatgctcctatccgatcatcatttactacttattgctttcttctgcattacaaactgtgaatatttagatgtgtgataatactaatgaatatccaatctacatatgccaggctgtatctgtaaacgagcaagatgtctcttccagca

SEQ ID NO: 13910 - DNA, 10484 bp, Oryza sativa
  unsure (1)..(10484): unsure at all n locations
tggtgttctaagtcatccttgtagtttttttcttttaattggtggaatcacggtggctgcctgtggggaatctgagatcggtggacagaaggcgaagcgccatgcgtgcagagcgtggtggtatggagattttcccttattttcaagcatggcatggtgctcctgaaaatagctgctcttgccttgacacgcttccggtggtaatggttttctggggctcctgaaagacaaccaccaggatatgtcacctgagatatctttagcggtaaacacaaagcaaacaacaacaaatttgtttgaaactagagagatgttcatcatgccgaaagtaaaaaaatgttatgtgacgcagaccattgtgttgttttttttctcccttcgtttggtggggctatgatacggtaaatacggaaacgatcggtataacagcaaaaccatttccattttcatttccatattttttaccatttttatttttgtttcggtcgattaccatttccatatagctcggccggtagaaagtcgaaaacgaacgccggtcggccggtaattatcgttaccgttttcacccctagggctatcactatgtctattggaatccactatctctactacttaaaaaaataagaggtgcttccatcgtccgtcaaaaaaaccgggcgaaaaaaccaaatttgtccgatcaaaaaaactaggtgaaaaaacgtgcggaagaaaagaaaagaaaaaccaaatctgcccaatccagaaaaaagaggcgaaaaaaccggcaaaaaaacccaaaattgtccgatctaaaaaaaccggtgaaagaaaacgtccagaaaaaataggcgaaaaaaaaccaaaattgtctggtccataaaaaccgggcgaaaaaaacgtgcgaataaaagaaaagaaaaaccaaatctgcaaatatgtccgatccgaaaaaagggcggaaaaagaccggacgaaaaaaaaccaaaattatccgatccaaaaaaaccgagcgaaagaaaacgtgtgaaaaaaagaaaagaaaaaccaaatctgacgcggtaaaagaaaaatcgggggaaaaaacgaatatgtcttattcccaaaaataattgtccgatctctactattataaaaattaaagatgcttccgccattcgtcattcgtgtttgagtaggttataaaaattaaagatatttccacgatttgtcatccatgtttgagtctgttttgcaaaaaaaaaaaagcaaaaaaaagtctgtctcccctacgaaagcggcgaaaaaaaagaaaaataataaacgtagattcaattccaaaaggggaaaaactagacaacgaaaagtcgggaaaaaaaagcacggcctttactaccagtccaaataaaaaacaacctagaaaaaaagagagtccgattaaaaagtcagaaaaaagagcacggcaaaaagaaccaattttaatttgttttagtagtatgtatatatctattctctatctctaatataaacaaaaaaaaagaacgagaacaaaaaagggtttccttcatccgtaaaaaagcaaaaaaaaaaacctgcaggggaaaaactatcagaaaaacacaccatttcataaaaaatagtttgaaaaaatcatgcaaaaaaaataccatttataaaaatacaatccgctctgagaaaacggtcattaaaaaaaagctgaattgatggatgcttgggtcggataggatccatcggttttttccatctcctctatgacttttgtttcgtcatttattctcatgtattagagaccctgtgtatctctgtaggcaattatcaacctatttttgttaagtatagctactattcttgataacatattatatgaaaataatattaaaaaataaacatatttttaattgttatttagagaagagtgctcaatgactctattttgtgtagacttggtcatgcgagacagggtaagatttaattggtcctattattggttgcaggaatgagattgaaagagtattttagattatatgcatgttgtcacatgaataatccaattattttagataaagtaaacatcggtaaggttgccatcgtcgaggttggtctattatattgaagatgttccaattttctgattgttttagctacaaacgatccatacaaacattgccattgacatggttatgcatgaaaaatatatattatcattagaaatttttcacccgttgtaatgcacggacatttttctagtcaattaataaaacaaaaaagtttcttttaaagatgtatcatttcaaagatctaatccattgtgagcgaggcacagcagcagcagtagattgaggctctggtggatgcgattgagaagcagcagagatagattcgtcgttcggaaaatgaagtataaaaactagattcctcgaaccagaggcgcatggaggactcaccgtttgacggaggagcgtgaatccatggcgctggctggaaaaccaagcaggcaacccagaaggcgacggttggatggattggaatacgcggtgggtcgagactcgagagagatacgtaccgaggcaggcggctggtggggctatatgggcattgcgtggggaaacttggaaatcggaatcggattccgacgagcggcgccgattccgagactccgccgagagccccagtgagaaagaggggaacgtttcctccgtttaatttttatttatttttggtagaagaggctcacggcgcgaaggttcgatggcgtaaattttcgttcataatattcactctcaactaactataaaagagacgctgctttgccgcgtaatgggccatcgtgtatatactctctctgtcctataaaaaatcaacatagtactaaatgtgacacatcttagtactacgaagaatctggatatatgattcgtttttttggatggagagagtactgtataacatatgtaatggtaatattttatctaataaataggctatttgctcaacgagctttatcgaaagctttggtctttttagttgttgaataacgtacatatattattgagatgttgcttgcatttggtattggtggaaattcctggaacccgaaaataggacaagatcgagtggggtgactaaggaaaccatataaattttagtagtgaatttttaaaagagagatgagagcaacataatcattagttaggggacattttggagaatagctggtgcccggtatcgttcttatcccttctccagtagctattctcttccggtagaataataacaatagaccaaaatatctctaattaatagataagttatattggtggatagataggtaagggtagtgaatgattaaaatttctcgatttgcatattaatggtaggtaagaagttagaaattggtttttaggacaaatttaaactctagaagttgatttattttaaaacaaagaaaatacaactctacgctccacggtagcgcactttggatatacaacaaaaataaaagataattaggtatattttttaaataggatgaatagatccgatatgagtcttggtgtagtatgaggtctgctattgtcaattgtgataggggcttgaggaggaagaagaggggatctcaaaaaaaaaaaaattggatctccttatttatagggaacagggcatgtgacggtttttttttatccactggtgttacttctttatcttctgaaagggtcgggtacgttattctagcacaaaattttataagtactataccatccaaactgacataaatgcttcttagctaccaattccaacgcgtagcactattgcacatggtatcctcttgttttcgtgaaagcatcatacacacttaaaaataatatttcggcatcttgctgggagcgagcaactcagtaactataaacctttgttaacgaaagatggcacaaactgcaattcactctctgaattgaattgacttattatgatcacgttacattggcaaagcagacactgtgccccacacatagtacagggcttagacctggaacttattattaatttaagttactagcatgctgatgcacgcagagacaacactggtcgatggagctataggcagctacctcgatgatcatggcgccgctgcgccaatgccgcagcccctccgctcggcggtgagcatgtgcggtgcctcgtcaatggccagccactgatccaccgcccaccggtgcgtcatcgacgggaggctcccctgcccgagctgcgtcaccatcacgtagctcacgtaccacccgggcttgttgccggacccgtcggaggtgagcaccatgttgcagggctccgacggcatgcaggcgccggcgcccctgaaccggtcgaggttccccttctcgaagtagtcgtggccggcggccatctggccccacgactccaggttggtgatcgtcagcgtcggcccgctggcggcgcgcacctgcagcgagacgcgggcgtcggtgccggcgttcctccggccgtcggtcttgacgaggatctcgaacgtgcactgcgcggaggcggtggtcgccgccgcgaggaagaagaggaagcaggccagggcgatggaaagcttcatggtaagcttcatctttgttgggtgtgtgtgcagtgtggtggtgtatgagtggaggagtggagtgatttgctgtggtattgcatgctcccccaaggcaccgttttatagccggcagagagctaggaaggccaatggcacttgccattttcttaaatgataatgccgtgacctgtggggatgcaaatactatgagctgtgactgggtgtctattctgtgaggaatatatgatggaaaatgctcactgtcatgcgcccaatctcgtcaagaaaaaaaaaatcagacatacccccgctctcagctaactaacacaccacccactaatttctacccatctcctctctctcccatcgagatttccctctcttctgtcttcatggtagtataggagtgcaagtagctagctaagagaagctccacttaacacacttcaaatgacttttttagtctaaatgatgtagctgatatataattaagccggctgtatcattgtattcatggtaattaagctttttcgaaagatctctcgtgattctaactgaaattcgactatattgcatattctttttttttgtttttgcaaatgaagtttttcttataatgtgcccatgcacagtattatttggatatttttccgacgtttcgttacttagtttattgttaaatgttgcacaggctatcttttatattttaacatatatttatgatgtttcaacaattataactagatattttatgtatcataaatatttcaattttggatataatcatttatatttttgtgataaatataatcatgtaatattttaatttaaagattcaatttcaatgaatacagtggttaagtcggatcgtaaatcagataagtaatttaggagaggagagaggtgctgctccatcctccattcatgcagaggcagtggtattgtcttgttcaaagttttgctaaatttgtttggggaagagatagaaggatagaggtgctgatccatcctccatgcatgcagaggcagtggtattgtcttgttgaattgttcactaaatttggtttttggctgctgctgcatggatgcagatgtagctgccctggtttttggcatttcatcggcgcaacatgcatagtttcatccggaatatattcgttcgcaattctgcacgcattgatccaaaatagaagactcccccggcccatacggaaaatatgaccatatgcattccacacactaggttggctggaaatcttattcaaaatttcctagtttatttacatgtacacattgcttttgaattttgatcatgcccacgcgctgatctagttggccactagttatcgacccatgttcttttgctttgcttttttcttcttcttttttttttgcccttttttccttttttcctctccgtttttttttcggttttgctataattatatcgccataaatcttgttagattacagtcagatttgtatccctgggatctcctattagattcatgccggagtacttccgtgtctctaccataatgtgtgttcacacgctagttcataagaatatgattaacaccaaattattacatcaaaataaggtaatcatagaaaaggagacgctatattgttccttgtaaatacatacgtaactttagaactcacattataaatacactaaaattacacatgtaattttgggacttacatatgtaattttgagacttacaatataaatacacgctgactatttttttgataaaaaatatgacggtataaatatagttagacctttttttcgttttgtctttttcccgcgcgccttttttcttagtttttttcagttttttccatccgttgtttcttttactttcttttttattcccttgccttttttccggttttttttccatccggctttttcgctatttttttaccactagtaaaaaaccctcatggagattagctttataggtgccagttcatttaaaaccgacacctataagttttttcccacctccacatgatgaaaaaaaaataagaaccggcgcctttaagatgcataggtgtcggttcttattataggtgttggttttttaaaaataaaaaacaggtaccaatattatagatgtcagtttaatgtattataagggccggttcttttaaacaaccagcacctatacccaatcgagccgaaaggggtgagctgagccggccgcctatatccactcgcacgcgcacacgagaagcgcttatccactcgcctctactcttctcacttctctgtcgcacccctcccccctcgccttctcctctaccgccctccctgtcgccgcccccctcccagccgtcctccccttcctccatctaatcctccctccctccgtccgtcctcctctccgttcattgtcgggagcggcgggcggcgatagagccctccccttccattggatccggcatcccctccgctggatctggtgggaggggaggcggcacccgatgggaggcggcagacggcggcgacgccctcccctctgccagatgtggcgggagggggggagggggcggggggcggtaggctgcggtgcacgagggaaggcggcaggcggcaagtggcggcgcctgaggggaggaggcgggcggcaggtggcggcgctctcccctcccctacgtcaaggaagaaggtggagcagagaaacccagtggccagccctgccctcccctcccctcctctccccagtctccattgtagttttctttagatgtttttgtgaatttctaaatgattttgatgttgactgttcattcgatctgtgatgtcgatgcggggatttaaatttgatttggggatgtcgatctgtgatgtcgatgtggggatttcaatttgatttgggaatgtcaggagaaattaatgtggggcagacgtggtgacgtcgttggtgagttcggcttgattcgagccggctcttttttttttggctcgtgcaaacctatagatgccggttctattttttttcatatatgttggttttcgctattggtgctgactaattggtgccggattaatggacacttacaaaccggcacctatggcatattctgagtgtaccctgcagtttttcacacgcggtaaagatttgtttttttatcttccatatttttttcatcgccgagccgaactctagcgccgccgccacgtcaaactacctccccatgtgttccctcctcaaattgattgaaaaaatcattcaccactattttctcatcattttccccatgattttcccttacaattctagttcaattcaccgaatttaatctcgatttaaaagtcactgttttatcccgaattttgtggattcactctgattttgataataaggaaagaggagatcgggtatatcaaaagagatgagaaagatttcaactggatttgatggagaggatcggttttggcatcgtacagatatgagactgtttttcgaaggttgaagacggtagtcggctatgcaagctagacctagagctctacttctgacttgggtcaaagagaggcatgcaaacaaaggaagggagcaggctgagactaaaaaaagaatgaaggaatgagcttttggtgcaaaaccaactagtaaatgtatagccatccaaaaatatttttacctattacaacgcacgagtattttttttctagtatataggaggaattaacgatcatatatagacaaccaccttactattgatttccgaaaaagaaaaaaagcatactactgttcatgctcccagtttctagtccacgagcacatgtgcatgcattcacccatgactattacgtaccgctccatcaacttgtgcatattttggcagccttgttctcagtgttcggtgcaataacaatgattagacggctattatccatccatcatatctagacaatatattggtcacacgcgcatgtaggttctccattggtctatggcaagttttgctcatttacagcatgcaatttacactccacttataaattaagtcattattacattctatctaaacataattaattagtgcgcgaattgaaagaggaatagttaacacttacaattatttagaaaagggtgaagtatttgatcactattaatttattattacatagtggaggtgcaaacatataatttcaattctatgaacttgagataatatactcccaccgctcattttatattacgtcctagaatccatgacacaccatcctctagaaactttgactaatgcatgtttacgttcaaacctatatcgatcgtgaccgagacatatgaaaaataatttgagttttgttagctttgcctatgaaactacttccacaatacattgtacaattttatatatatacacggcatctctcattatatcacgttataacaagttatcaaaggcaaatctcttaaaaaaaacatcgcataaaaatacggagagaatatataacaatttctaatattgaaattaattaaacgatgttccgtagttatatattcgtgcttacacgtgtgaattactgtatatattttttcacgaagcacaatacaaatgcattactttgggcggtttattcgtaaactacatcaccaataattacatgtaattaagtgctaaaaaatcatgggcttattatcttacaaaaatttgaaccaactttagtatagcaaaatgtaggacgaagctgggcggcaaagcgagtccgtcaagataatcaacgatgttgacgagtctttgaagcgtgcgcataggattattcccgtggtccgggcgtttgactgtagatatatgtagctatagctagttagctagctacgagagataatataccacagctcattttgatcgatgcaaaccatgagctgtgcacggtcactaggacacagagaactgctcatttgtgagggggtgctaatgggcgggtgatcgctccccctctcccctctatactctactctttcnttcctcctcacttttttctcttcccagtacaccataaattttaaaaaaaaataaaaaaacaaagttgaaaaattttatgcatagaaaatactatatataaaaatatttgaatttaaatttaaatttcaaacgggtatgtaaacgggtctataaactaatatttgaattcaaattcaaatttgaatcgggtatgtaaacttttgacaaaaaatatttgggtctataaatttgaattgatataatttaaattcaaatttgaatctggtatataaacttttgaattataaactttgggtctataaactttaggtgtataaactttagatgtatataaatactatatataaaaaatatttgaattcaaattcaaatttgaatcggatatataaacttttgacttataaactttgggtctctaaactttaggtgtataaactttagatgtgaaaacttgaggtgtacaacaaaaaaaaagaacccacgtggaggagtggggagggggatcggatcatctgatcgctggcatttccgcatttgtgatggcctgtccgtgtcggggtttacacgaaccgtcgcaccgtccaattttcatttcaacaggttgtttatattctactaaagattccatttgatgaatagattatacaaaatgatgaggactaggtcccgatcgatcttcctgtgaggtcacgatcgatcttcctgtgaggtatgttgatatgttccactgttctttattttcttatgctgcatgattttactaggttgtatgctccagtggtagaattgcaatttcctggggaggggcatccttgtcctcactttcatgaaaaccaaactctaacggtgttagtctatgctgtgagtttgatggtaggtatgctgggttccaatcgtttttggtggcaaatatgtaattatgttt

SEQ ID NO: 13911 - DNA, 8182 bp, Oryza sativa
ttcctgcagccccttgagtgaagatatgtgttgaatatgtccaagtagaaaacttgaaaattggagcaccactttttggtgtagtttagtgcggcgtcgaatctcgtggcaaatgtcgagatgttgaagttcttgtagacgtcgtggttggtgaagtaacaaactggtagcgaagacgcgtaattgtgaagattaaaacaccagtcatcggcggcataaccagtcggcgatggaagaagcagaatgatgacgaaaacgaagacgtccttgaacggcagcataataggcctgttgtgaaagcgaacacaacataggtggcggaggaggcaagccagcggtgaagacgatgtcgcccattgacggcggtgtgaccaaccagccgaggagacaaagccaccagtcgacggcgacgaaggcaagccgatggtgaagacgtaaatgcccatcaacggcggtgtgaccaactagccatgtaggcgaaaacaccagtcagcggcgacgaaggcaagccagcggtgaaaatgtagacgcccaacaacggtggtgtgaccaaccaactatgtaggcgcggcgatggcaagccagtggtgatgttctgaatgatccattcctgaagagtaggaaataagcttaaagccatgaatccctactatgcacatctggatttggatcctgtagaacaaacatgtaggatatgagtagtatctgatgtaaatatagtacttgaggaaaattcaagtatttaaaatgtttataaatatgtatttctcctcttgtcaattttaatttccctgagcagatgactccctacgtttaaacactctactcgactagtcatagcccccaagcaccgggaatcggccaaggcacttcccaaacatgcatatgagtggcatgagttcgtcattaatggaacaaagtttcacgggtctgaatttactacttgggtacttttgcaattgttaagagcagaaaataaattatcttatctctatacttttgatttcttccgagtaatatttagcacattgcgttatacactccatccaacgatcccccaggtgctagcaatcggcccaaaggcaactatccatcgacaaaccaaatggaaagcatagggaaaaagagctccataactcgataggcactttatttttactcggattattttgcaagcaatcaagataaatattatgaaaattattgaaaaaatatgatataacatctgtaacccccgactcactactcaatggagaaccaattgatatagtgaggcagaggaaaagaaaaatatcatataaggaataaatgatgacttagcttttagtattccccttggtaatgccagatgaagccgatgtgaggagaaagtcgtccatcaatgccaatgaaaacaccagtcggcggcgttgtcacgaccggaaataaccaacgggcgttccttacgtgcgtgtattattccttgtccaaggaggcaaggtacaccaaaagttgatacatttcagagtttatcaagcggaagcgtaaatagttactttattacatgggcggcgaaggcccagcacacacaaagacaaacgggaaacagcggaagactagggcgacgaccacaggcgcttgacggtaggcacgagctagacaccaaagacttcatcatccagtggctcctcttctgggtttgggaaaaattgagcaagactgagtacaaccaccgtactcaacaagacacacccataagtgcagaataaatgcaagggagtacaagggggttataatataaggggttagggtttgcagtaaacagcattaaaagacacttagttgctcaaagctattttgtaaatacggtcctagagctatacaatattattaatcaaggccgtgaacccacatgaacctgccttaacccaaggcctatgatgattcagatcgaactgcaacccgaccctgggtcccagcccgtcccaagccaacccaggccaaccattccacattttagttgttaagcaggttttaagaattaaaacactaacttgggtacattgctcggcttgtccataaccgagggcgcggctattcgaataggttatactctgatcagaggtgtacatctttacccacaagacacatcttcctcacgtgtaaccacgtgccacataccaccacggcatacggacggaagacatgacatagtttccaacccatcctagccatagacaagagtaccgacccaaccccacctacggccggaacccccgggacaggtaggcaggactgagcccctagcagcaggacaccggccctgtgccgtgacatctcgactaccgggccgcagctcgtgtagccttcatttgccctagagatgtccatcgacccccgacttcgtccatctccatccgtgtacttttgtttataaccagactgagccacaaactaagccttacccactagacatgtggaagtacggtagttctttgcaatagaggcccgaagaccggtccttatatggccgagatgctactatcaaaaccatacaccccgagcccagcctaaaaccattttgaggattttgaatagagggggaggtgtgaatccaattccacaataatccatccattccatagtgtccaggtgatatgaatattcccaaattctagagttgtaaaaccacctaatgttacctaattaaccagcgaagcatctacctaaattcatactagtggtaccatgagtagagtgtccactagttggggttttgtttaatctagggtgaacaaggtaatattaacagtaacaatcataaggtcataacaaaggtaaataggcatggctagataaaacagtgataacgcgggaatttaagtaaagcgataatgcaataatttaaatcaaaataattttataaactgggattcaatatgttcaaggatgatgtgacttgccttgctcgctttcccaaacgtcggcttcaacctccacgaagagcggatcttccaaagctgcagcgtctacacgaccaacggaaaagaaaaggcttttactctaataaactccatataaaaagcaggaacaaagcacaaaaatgggttcttgacttcttaagaaaaaattagagacttgaacggtccaattccgagttcaaatggccaagttatggccatttgaagtttatatgctctttaaataaatatttgcgaatttcttcatttaaattttaatttaaaacgggtttattgcgtcagtcgagggggaggggcgcgcggaccgggtccacgggagtggggcccacgcggcagcctcacggtccacggtggaccgggtgcacccgggctcacaccggccggcgccgtgggtcccacgcgtcagccgcacccgagggcacgggcggctgacggccgggccccacgcggcagccactcggcgcgcccgagggcggccatgccggcacggtcggcgggagacggcgcgcccgcgccccgatggtcgccgccggcgaccaccggcgcggcggagcagcggccgagagaggggagggaagggggaaaggaggcgacggtccacggctcaccccggggcgacggcggcgacggaggaggcggccgaagcggagggaggcggtggcgcggctcgggtcgacggggacgacggcgctccggcggtcggcgaccgaaacggagaggtggacgaagtcggcgaggatgcggcgaagccgaaggaggcggcgcctaagtgggaagcggtcccgggcgaccgcggcggccgaccggaactcggcggcgactgcggaaaaagaaccacctggccaacttcaattccgcgaagaagaaaggccgctaaaagccgaacccgaccgaagagtgccgggagggtttaaataaggtttgaaaggggaaagaaccgcctgggaggaagaaaaccggcgcgggaggtcggccgccattaattgtcccggccagatttgcgggggccaatcttgccatttgaactcgagagagagagggaaaaaatgggggaaaagggagaggggatcacggggaatatttccccccactttattgcatgcggggacgacgggaggcggcgggattcgcggcggcggcggcgctagggcacgggcgaggcggcgggagcggcgggaggtcggggatgacgggtgggccccacccgtcagcgagggtggcgggcgggcccgcccgtcagcagcgcgcgcagggagaggctgagtgggccgcggggagaggagagagagagggggggtgggaggagagatgggccgggctggcccaagggagggaagggggacttttagggtttttctttttataaaactttttcaactttgtttatttcttaataattattatttgtgctctgaaaattccactaaaatttatttacacattttaggtttttaggaaatatacaaaaatcctctaagccttatttgacttttaactttgcacattttaattgttggaggctttcacatggattttaattattctaggcataatttaaaggatatattttagagtcgttttgggacgtgacaggcgttgacgacagccgatagtgaggacatggtcaccatcagcaatggcggcggaatacaccaaccgtgtggaggcgaagaaaccggtcggcggtgatgacggcgggcggcggtaaaggtgtagatgcccaacaatggtggtgtgacgaactaaccatgtaagcgaggaaactggttggcggcggtgaaggcagtcgatggtcaaagcgtagacgcccatcaatggcggtgtgactaaccaaccgtataggcgaggacaccaatcgacggcgacaaaggcaagccggcagtgaaagcaaatacgtccatcaacggtggtgtgaccatccaacggtatagacgaggacactagtcggcggtggcgaggcatgccggcggtgatgatgaagatgcctatcaatggtgctgtgaccaaccaaccatataggcgaggacagcagtcggcggcggtgaagaccaaccatgagtgcaaaggcaccagtcggcaataatagtgccgcggcattacattgaacaatagaaaatgccaagagattaatcttatatttagatatcaatatgataaatgatgctagattggaaggtaaaaactctggtgatgtcggcgttctaactcccgcgagcaaccagaaactccgtagaactcgggtgaccatgtgcacgacgatcgaaacgcggccgacgacagcgacaaacacggccgacgcggggatgagatcgccgcctagcatcatggaggcggccgccggccggtgagcacgtcgcccctggtggtacatgcaaaacaaacaacagaataatctaatttattagcaccgtagaaaacagatgcatatatagagatgggaaaatgctaagcatatgatttttttcttccgatttttgtacgatcaaacataacgacgcggacggtaggggaacctaacgcgagcgcacggcgcacgcacacgcggaaggagcgcttatgggcccgaaagcccaattaacctctttgcagcatctgacttgagattatatctatacttgagattatattagaataatctaccatgtagtattcaatctaactaaatttactgtctaatctgaagggaaaagaagatattttgggccttctgtctcatgactaaaagagtgcaatatgtttgaaagaagttctgcttcgtcaccatgtgacatcaattaatatgttgagcagcactatactttggctttaagtttgtctctaggaagtctctctgtatctaaacatatgcaaaccttgtttaacattggttcatatatatatatgaactttttctgcatccaattctgattgtggccattagattctacttccaactatggttgatgctatccaggaatcctaattggcgcgtacgcgccggcggcgcgcacgcgccagcccacacggcccaataggcggcaagacacggttagtttttcttttttccgaatttttctatatatgtgtaaacattcaacccagatttgaatactttcaacaccgacttgaaaactttcaactcatatttgaaaactttcaactcagatttaaaaattttcaactcaagattcaaaaactttcaactcaagatttgaaaactttcaaatcggatttgaaaactttcaagtacggatttaaaattttttaagttaagatttgaaaaatatgaaaactttcgactcagatttaaaaactttcatcccatatttgaaaactttcgactccgattcgaaaactttcgactcgagatttgaaaacttttaactcagatttaaaaattttcaactcaaaacatttttttaaaaaataagcgtgctaaagattaaaaaaagtaataaaaaagcgaaaaaaaagcgaaaaagaaaaacgaaaaaaaaatcgtgaaaaaaagaaaaagagggctgatgggcttatgggccgggagcagctggcgcgcgcgcgccagctagcaacccctgatgttatccatgtccaaggtgtaaggaacatatatgtatgagtaatttgcttcacctgccacataacaaatgagcgctaagtacaattactatataagatataattagaacgaaaattgcttaatatataattagaaagaagattgctttggttggctacgcaagcatgccaacgagagagcagactagcacgatagagcttgggctttggatatgggctcaacagggagcgatccgtttcatcgctaaaaaacattagaagttaggagagaaacgtttcatcgtacaaacgtcgtacaaaaacaatcgtatatatagcagtgctgataaacatgttagcagtatcaaagcacgaaggtgtatagatgagcatttatatatccgcagccatcacgcgggtgaatcgatctaatctgcttgcacacgaacggacttgctcctgcatcataaccagaagatctgaggaccatgcgagagcacaagtactgctagcacatggctgaacggccttgcggcggagatgacatcatgaagctgaacaggctgcccacggtggtccgtcagtgaaagctccaatctgcaccgatccgagaagcccgggtccgaccggcccccacgggtgaagattccggggtggattgcccccgcaggaaaatcgcagggagacaccggtgatgatcggcatggagatcgcgggcggcgcagcgtggttgatggctgttgcgttgccttttttctcctggtaggctgtgaccagcgatggccaccacaaatccgtcgtctcccgcgatattgcaaattggtttcatcgcacttctggataggaaactcgacgcactcctacctagcacgctaactgtcaaaactgtttggggatttgaatccgccggatgtagtattgatctgacgatctagttgtgaatcctttgccctagagggcctcctgcccacaatagagggcaggattataagataaaaaccttaaccaataggtatcggtttcttaaatctactttacaatattatcaaatcaggactttaggccgttctgttatatacaaggaaacgtaatacccaagtcatgatccatacatattccatagatataagttatcccctataactagttggataaccatgccgtgtgggtatggggtacccataatctccataatgtgacctagcaaagatcatttctccagtagtactagttaattagtacccaacgggcatgggcatgggcacgaggttttgcctaatagactttgcggacatgggttagacacgggtgcgtgggtctggggccgagcatggattcgctctgcccgtgcccgatccggtccattgtcatcctagtaaatacgttgctagctaagaaaggaggaaaaatacgtgggcttattggatgtatgtaggagtaaaaatgggatgggtacttcccgaggctcgcgagaggaatatgagagaaaaaattagatacccgattatccgagttcgaatctaaattcgttaaaaaatataggttaggatacaggaagacatgtatctgctcatatatcccatattataaaatatgtatgaaaatttattataaatccatctaaaaacatgataaaagattggttaatcattattttaagtgctcataggtaatattgtatattt

SEQ ID NO: 13912 - DNA, 6863 bp, Oryza sativa
atgggataggatacgggataagtgatatgttatttggtactacttatacccggctctaaatttaaatttaaaagataatatgagttaggatatagaaatgtcataatccgatcaccataccctacccgtttttaccactagatgtatgaacctagaattcttatgtcgattgttgacatgtgttcattggacacgcggcttctttttcttacatgggctgtcacaaactattcgcgtgggccagagacgtccgtccgcctgctcgttagaccgatctcttccaatctgcagccctgtttggcactggcacagcttcagctccagctccatctcttctagagctagagctcagccaaacaatttcagctacacctataatgagagcggagctggttggagctctctcacaaaataaactaaaaatgtggagcagggtttaggcagtttcacaactctactccagaaccagctcctgaagctaaatttaggagttggaactctactaaataggtcttgcatgtcacacgaataataacgaataataaccacattaagagcgggtcgatgactggatgtgttccggattagtaggttcagaggctaaggcattgtttagttcctaactttttcttcaaacttcaacttttctatgacatcaaaatttttctacacacataaatttttaactttttttttcaaactttcaattttagtcaaacttccaattttaacgtggaactaaacacaccctaactacgtaccgatttacattcatgattatacgtacattacggtccatatatatatatatatatatatagcacgtcacgcttaatatcattctggttataaaactggtaaattgatgagcgcgtctaacggcggtcgatcgatcgaatggataagcccaaatatatacaacattccggttatatattcaacaagaacaactactagtagatagccaaagcgttccatgcagtttaggagagttttccgccggaaaagagataaattaggagagtttcaacagtgacagcccaggcgccagagccggatgatcgtgcatgcctatcgtgattagttagcccagtcagctcgatcagattatttcatataaaggcaaggacgcaaggtgaggtgagagacacatcgatattatccaaacaccatataaacctttctcaccttccggattccggccatcttcgtttctcgtcttcgccggcggccgccgcatttctgatcggccgatatatatcggatcttcagactggtcgcagcaggttcgtgtccattctgtcagtttgatctcttttttgatcgcgatcgatcgtctttgtcatttcaaattcattcaggcgtgcctgtcgtaatcgaactcgattgatcgactacgtagagttccatttgggcttgattggcctcaggtttgaactgatcagtcatctattcatcgtcggcttgaaattagtcagccgttgttaggcaggttttgcttggactttctaggattctgaagaatgaagatatatatatatatatcctgaatgacgattttgcaaaacaaaaattgtttacgacgatcgaggaggataagtattagcattattatatatggtggtgtaattaaaaaggtacgatttgtttttcccgaaaaatatgtacgattcgctaattactaggcgatcaatatattgcaaattaaccaaaaggaatattattcgctcgtaggaggactgcttaactagtccatgaataatcaggataaggggttctgtgctgtgtcagcgtataataacagtagatgcaccgtacccgtgtaattgtgatagaacttaattaatttcaaacattatcttttactttgtttctagtactgttccggccacgtatatacccactagaccaatagtacataggtacatgtgctttgcatggtgacacatatgcatataaggttttttaagttagtgcatgcacaccgaaatattattactcaattattttgtataataagactaggtatttgcttgactctttttcctaaacaatatggatgttgatcttcaaccagttgctttcagtcttgatgttgcttgattttgtacggatactctaataagtcaaagatgctttagctgcttggccagccaataagaaacaaacaaacacaccatggatcatgataaatatgcattgctactctaataaggaactaaggaagtcagcaaatgcaggtgttgtgtttttttttctctgcatggtcctagctgtttaattaacaactagaatgcacactataaagggaggaaaaggaggcagctaacatgaaagtatctcacaaagtcacagctaatgtgctagtcaatttgttctctcacacactgagaaagatgttttttttttagaactgagaaagaggtaaagactccctattagggggttgggtacaagtatagtaaaatgaacatggtgaaaggagctcacaaaatggtagttagccaccaaattttttcaaacatttagaccatccatgcatatgtttagaaacttatctggattgttccagatattcttaaaaatattcttttaatactatggttgtaccatagcacatatatcataacgcaaagctacaaaaaggcagtgaccatctatcctctcatgtttgacttaacaaacacgtacacaaaaacccaaaaaatgtgaaacaagcaagaaccgaaggagctgcaagccacatcatgccttgcattgtcaccaacaaatcaataaatacctttcaaaataaatagacaccagacatatttttgtgtcactagtataatacaagaataaatgaatagacaccagacctattattgtgtgactggtataatgtatttatatccacaccaacatgatagagagtacacgttacacgtactttgttttggtctcatctgaagtctgaaatctgaagcaaataaacaaagaattgcagagaagaaaaaatgtgctctctttgtgttgaccacttagctcatccatggagataagcccagaggatgcgtacaaagcttctctcctccgttgagctgtatccatggttgttattgcaaatttaacaactccttgtcaccattgcacacagccaaaaacgcccctgtattcctgtacagaaaacatgcacaaactgtattttatttcttcagcatgtgctctgcttctgtattttcgtcagggagaaatgtctgacctttggagagaggctcagtgtttggagactgtcatttgcactgttttatccaatttggagatagtggtatgctactgtctactaccattgttagtagtactgtactgttttagagtcttggaccataaatatcttacgagtttataagtctcccaagatctttttgccgtttactcttcactgtagtgtccagttgtccactccactattgcatcagctaatcgaaatcgacaatggtgtgcaacctagtgcctaccattacatagtctcaaagaaagtgtacaattatttcagtaaaggacagatcagaaaagaaagaacataaataccagccatctgcaaaagttattacaactacaattttataataacttctttaatttctctctgcatggcttacattacattgtacactctgtattccttgtggttgcggctataataggagagcacaagagttgtagcttcccttgtcttgctcaagtgttcaattttttgtgtgcgtttttcagctcgtgtgtgattgagaagtacacaaggagaagaaggagaagacgacgcagctgccatgggagaagagaagcagaatgacgagaggaagaacaagtacgccgtcgggtgctccatcatcggctccatcatctcggtcctcatgggctatggtaaactacattagaacacctaattgacatgttattataacattttcgatatcggtgattttagtgagatcagtgatttaccgccgatctctgtctcgttcagcatgtacgtgttagcgggattcacgtgtcacgtgagtgcggtgtgtgtgcgcgtctttcatgtaatcgcgcgcgaaaaaataaagaaaaagaaggaaaattggcatgatgaaaaataattaaattgcagacactggtgtgatgagtggggcgatgctgttcatcaaggaggacctgaagacgaacgacacgcaggtgcaggtcctcgccgggatcctcaacgtgtgcgcgctcgtcggctccctcaccgccggccgcgtctccgactgcgtcggccgccgcctcaccatctccctcgccgcctgcatcttcctcgtgggctccgtcctcatgggcctcgcgcccaacttcgccacgctcctcgccggccgctgcgtcgccggcgtcggcgtcggctacgcgctcatgattgcgccggtgtacgccgccgagatcgcctccgccgacatccgcggctcgctcacctcgctcccggagatctgcatcagcttcgggatactcatcggctacgtggccaactacctgctcgccaagctgccgctggtgtacgggtggcgcgccatgctcggcctcggcgcgctcccgagcgccgcgctcgcgctcggcgtgctcgccatgcccgagtccccgcggtggctcgtcgtccagggccgcgccgaggaggcgctctccgtgctccgccgcgtgtgcgacaggcccagcgaggccgacgcgcggctcgcggagatcaaggccgcggcggggctcgccgacgacgacggcgccgccgccaacgcgggcagcggcggcaagggcgtgtggagggagctgttcctgcacccgacgccgccggtgcggcgcatcgtcatcgccgccctggggatccacttcttccagcacctcaccggcatcgaggccgtggtgctctacagcccgcgcatcttcaaggcggccggcatcgccagccgcaactcggtgctcgctgcgaccatcggcgtgggcgtcaccaagacggcgttcatcctcaccgccatcctcctcgtcgaccgcataggccggcggccgctctacctgtcaagcctcgccggcatcatcgcctcgctcgcctgcctcggcatgggcctcaccgtcatcgagcggtcgccgccgcaccactcgccggcgtgggccgtcgtgctcgccatcgccaccgtgttcaccttcgtcgcctccttctccatcggcgtcgggccgatcacctgggcctacagctcggaggtgtacccgctccgcctccgcgcgcagggcgccagcgtcggcgtcgccatcaaccgcgtgatgaacgccggcgtgtccatgacgttcgtgtcgctctacaaggccatcaccatcggcggcgccttcttcctcttcgccgggctcgccgtcgccgccgccacgttcttctacctcctgtgcccggagacgcagggcaagccgctggaggagatcgaggaggtgttcagccaggggtggcgcgcgcggcgccgggcgtcggcggcggccgtcgagatgccggcctccggcggcggcggcggcggcggcgccccgatggcgtagtgcgaagtgcaccgcggtgcgcgtgcgtgaacaaagtgcaacgcacgcgtgtggatgacgtggaagtgtttgtcacttggggaaaagaacgaatattcgctagctagctagtggtacagatggctagagattgaaatggaagggacctgatactactactgttgcatttgtaggaaacgactactagctaacaatgtcattctggtgtcgtgtggtgtttagaaaaaacaaaatcgttgaaatacagtaaaaaaaattaagaaaataaaaatttgtgctacagcaatggtaatagtcatcgggtgtcaagaacaaaaaaagcatttcataccgtataattacaggtggacaaggaatggaccagcatgtccctcaatgcggctcaaatagtcacattatttactgaatttttgtcggacatactccaggccaataattctggaaacattggtagatttgttagagagagagagagagagagagcagatttggtgcctcatctaatctaaatgctaaccttcgataagctactaaagtccaggcgcacagcgtattgcatagttaatggttgggccaaaaaaacgaagtgaaattggaccggaagttaggagatataggaataagttcacctaccgtcccttaactttacatcaggtctgtctgaggtccataatctccaaataccataaatcttcacccctaaactatataaaaacgtgcaatttcgatcccaagatagtatggatccgtggtttcactgacgtggcatcctagccagcaaaataaaagataaaaaatttatggggcccacatgtaagtgagaagggaaaaaatgtagggcccgcatatcttctttttctcttttcttctcctctcttatgttttcttacctctcatctcttctcttctcttaaccggtggcagagaggggagaggcggccggtgagcctggcgaaactccgccgcctcgagcgcctcgcaatgggagaagggaaaggggaagaggaggcagccggcgggaaatccatactgagccagcggaacgccgccgctgtgacccacccgaacagctactggcggtcattgaaggagggggtatgcgggtgggtgttggtggcggctagctctgcgaagtccaggagacgggtgtgggcgaagcgctggtcatggtagtaggcatcggtggcagcagagtggcagcggagggtgaggtgggcattgtgcctcgtcaattccacggtggtggcagtagtgcaccgctctagagaagcacctcgtccccgccacctccaacaccgatg

SEQ ID NO: 13913 - DNA, 2454 bp, Oryza sativa
  unsure (1)..(2454): unsure at all n locations
ttatgttggtactcgttctgtaagtgagagcgaacgaggggtaaaggaaaaaaaacttaagtaaagatctttaacaaatatgttcaatgtgtatatcacgtgatcaaactcatctaacttatatacaaattagataaaaaaaacactatccgaaatcaccttaggggttatataaatatgtcggagcccaaaaccaataacttggatccgactgagattaatgtatcaatccctggatcagtaaaattgatacatacaatataactggttcttcattacatatgttaaagtcttacaatactaagggttttacaataataggtactcacctatctaattaatacacagcggaagtttctatacattctgactagtgaggtataaccttnannattttctaatttatcggggtcttcgtagtaatagtcataagggtcctcctcttgacccagatctgaaaaaggggttataagagcaagggtgagtatttacaatacttagcaagttatcacgggaatatgttatgcattgacatataagggagagtctacacatctgtcgacagatttttcatcataaatntgtcaaattttgtacctttggattaaacccataaacgatagatggatgacacgtgtacagcactgctgaggtcccgcatctactaatcgatagtatggatgggcttccgacgttaattcacactctcgtttcttaatcaaaattagttggttatgtatccatattaattattaatccttgagagctcatctgctcatgtatgtgtgatatctactagatattttttagtgcatacaaagatattaccaatccatctactaaagttacattgttgttacactataattataccatagttacaaatgtaattatggatagttacactgtaattttaattacattgttgttacactataattacaccatagttacatatgtaattatggtataattgccctgtaattttaattacattgttgttacattataattacaccatagttacatatgtaattatataattatagtataattgcactgtaattttaattatattattgttacactataattacaccatatttacatacatgtaactatagtataattacattgtaattttagttttctaacactgtaacttcaatataaactttattttgtcttgaaccaacttggcttaattgctctgtggtgtacgtttaacagggaaaactagtgctcttggaatcgatcccccgctacgcacggacttgtctcttttatccatcgtattagttagcacaaatctccacgcaaatcatatggcccaaaaatcgacaaatctttaaacgaaaatctgtcgacagatggatagcgaattcggacatataatagggttctttgcaaaaagcagtattggacaatctggaaaagttatagcaagaatttataaaacatataaactttagatttctaactagggtaccatatgagtcccggtactcaactccatgagtacggctattcgaatagtttcaaagatattctactgcagtagatgtacgctttacccgcagtccacgacctgctgataatcatcgactttagttgtagcccagtattaagttattaacaattttggcacctgttctatgaatttatatcctcatatgctctgaacgtaatgttaacagcagcaagaggagttctggcgtttccgaggtatttaagaggaactgatcgtatgacaccacgtcatctcgatcagggtttagaaatataccatatagtttatactcgagtatcacaaaccatttacatgtacatggtaatggttaaagttgcccttcgcggctatagttgcctcctgcgtgaggacttaaaaataagaaccactatacagaggtgccatattgctaattaacataataactaggtctgtccccattctagaaactgcggtcgtacccgttcgttcaacataagtacctggcgaaacttatatcgatcgagacaatactagccacccggaaatcatccaaatcttacgtattgtcccaatctaagtatagggtattttaaccagattgtaagcaaaataagcaatactaaattatctgagtttctatgattgatttatgcatagaaaatagaatattgaatagaaggctataaataaataatttgtaaaatataggcttaaatgatcaacaggtatatggtaacttgccttgctcgatgtcctgagattgattgatattatctagtgtgtcagaggaatcctcaagacctagggttagacatataaaattcaaattcaaaaggaattcacataaaatccaaaaataagaaaaatagagaaaataaaataaaattcaaaaatataaaaaaggggctcaatagatagagaatgatttttgaagaatattggtccaagtttcactgaaattg

SEQ ID NO: 13914 - DNA, 701 bp, Oryza sativa
ttcctgcagcccttggttgtgtgtataaatcgagtagccagctcaattgatttagcttgataaacatgtctccgcttatgcttccagtaagggcattacatgaaaggttcaatgccaacaattgttggcacctcgataagttgcaggtattcttccagtcagttgattttctgctaaatagagttcagtcaatcgattcaagttaccaatggattgtggtatttctccagagaatatgttttgtgaaggctaaggacaacaagattgtttagttggccaagagtatgaggtatgctccctgtcaatagattgttaccaagataaagtagggatatgctagataggtttccaatctccaaaggaatggtgccagatatgtagtttgaccgaaaactagtgaagttaatgttttcggcaattcggctacagagctgggcatgtccccgcgtaggttgttttcgccaaagtgcagtttctgcaaattggagcaattcttcaaggatgacaggaatgcccagtctccagcttctaactggtttgagtacagcatgacgacccgcaaatctgtcatcaagccgaaagaaagaatcacccctctcaaagagttgttggccagatacaggaactgcatgttggaagcatttgctagagatttagggatttctccatgaaaatgattgtcagacataatcagaacttgg

SEQ ID NO: 13915 - DNA, 7985 bp, Oryza sativa
ccctctccgtctgcgccatcaacgcccattgcaggggcaatctcgtcatttggaaaaaaaatgtcacctttttgatccaaaaattataaaatattgcctccggtgtcctatagccaattacacaatttttaaagtgcccatcaaccgtgtcacatttttgcagtgtctcccaaccaattacatattttttgagtgtcctgtagcaaattttgctatgaaaaaaaaacctaaccaactagactaattgcgctaccatatttagtcccggttgataacaccaacctgggactaaaaagggttacaaatacggtaaaaaagaaagggttataaatcgggagtaaagagtctttccctagtagtgtgggtattatagtaaatatctcaatccatagataattttaacagaactacagaagcacaacttgcacaacaagccagttgcgaggatggaatgggcaggcttgcctgcctgcgccacctccgacgcccgtgcatcgccgcttgcgcccatgcgctgtcgcgtcgctagcggtcgccgctgttgacgtaaaatttcattgtgacatacaaagtcctgggagatttgtttactctagtgcaggtcctaaaataatgggcacggacatgccagttaatttgatcctataactaacaagatagatgaactgttgatcgaagagccaataagataataagccaatgtcaatagggttttaaacaatcgactatatatccgatgtagattctgacaatggaagaacttggaacaaacaatccaatcgactgataataatatgagaaagtagatgtccaatgaaccagtcgaccgatatcaatatagaatatgaaatgtaggctcgttggttaaaacatacatcggctaaaagtccaatgtaaatataacttattggttaacactccgattaaacatagaacaaatatataaacttagcaagacttagattatcagtagtaatacagaatatcggacccaaccaagatagttctaggttacttctgatcagataagctagataagccgatagatatatgctaacgtgatggatatggcaaatctatttaaaataatattgtgattgtagagatatatttactaagacagaagattggacctaaccgagacaatcccaactaaaccgacgcgtctctaaacacaatgcaactaaagatagaattggaatattgggtaggcaaacatatcaaccgaactagagcaatccaagagattgaagcgatgcagccttaaacaacgccaatatagccgatacaattgccatggcgcgaggaacttagggatttctccttcgcggagatcgaaaagatgcagccccgtatcaggtgtcaagtcctaccggtgataaaacctcagaaaagagggtggtgatgtgctgaaaattatattgatctagagatagatacagtgacctcggttgtacttatttatatccatgggtagatagtagcacaattaccccagttgtatatatttatattcacaggcgagctggctacgcgattttggagggaaggctgttacaaatggtatcaaagccgaccctcacgattgcgcgtatgggtcagtgggtgggcatatggcacttgtgggcactgtgtgaagcacatgacatggcatatggcgcctgcactagacgtacggacgtgcgctaacagggggcgtattcctggacatttgcctatatgcctgtgcccttcaaccatatcactcccgggttaacccttttacataaaaagtgtgatttccaagaaatgccatcgacaagtgttagtttcaagaaatgccatcgtataaacgactttgtcccaaaaatgccatcgccgttacggttacgtcctgtgccgttaagtgttataggatgaacattgtatttaatatcacggaatggacggaaccctaacggcgatgatatttttttggacaaaatcgattgtacaatggcatttcttggaactcacacttgttgatggcatttcttggatttagacgcttgtcaatggcatttcttagattatctcaatataaaacccgcttgcggccactaaattgtaggtatcaggtcgggtgtgcccacgggcaaaaaaaacatgtgcacgcccatgcccatcgggttgggtatccgcgatacccgaacccatgggcaatactgtcatccctagtgtttacatacaaaagtttatacctagaatgtgtgtgtatttgagaatgtactgaatgatgaacttgtgtgattgtgttggataaactggtttgcttcggttagtttcacttccataattatctactctaatgcttattattattggttgtgcggttcaaatattcgagttccgcttcatatttgagttcacgattttattcatgtttcattattttgttgaatgttctatttaaattattcaagtaccatgcattatcatcggagtacaatttggttctttatttattatccttgataagcgttgatcgcttatttggttccttattcttttctagtggtttttttaggagctagggtggtttggaatgtgtattcttttctagtggtttttttaggagctaggtggtttggaatgtgtagattatatctctattgatgagtggttttggtatgttttgccgtggcaactcgaggtaagtggttatcagtggtgttatacacacccatatctggggacatacgcttcttgtaaagctcattaacaaatatatatgcatgtgtcattgtctggtatgtctgagttgatcaatggctgcagcgatctatatggactaacttttgtaatagtaatacaaatattacagtataaaacatagctctaattcacagataaattactcataattaaaaaagtggaacgagggtagtcagactctgcagccgcatttgcagcatttacatggtggacaccttggatctgtggctgcatctgtggctgcaaaaaaaaaaaagcatcttataattaaagaaaaagaggacttctataaatagtatgaaccaaggataaaattaccacattaattttaaagaatatctaaaatggtaatagttgcgtagttaattatatagatttaaataggatattacgtacgcaagagagaatatatattgacaaattaatacgtatcggagtactgaaacgatgattagaactaggaaaaaagtccaaatacaaatttagatgaaagcccgtctaggaccctaaactttaaaaccggatatttaaccccctaaactttacaataccgtctatataaccccttaggatggttttgaatattttggaagcttaaacgaacaattttgaataactaatataatatatttgcatacatcagttataattcatcaatttattcttatacaacaatatcatactttatcatgttggtacttatttgtaagtgagagctaataaggagcaaaaagaagattaagtcaaaactttaataactaataaggacccggcgcaacggcgcgagttgggaaggccgaaggcgggtaggcccaagccggggcgcggggcggagcgccgctgtgccgtcggccatcgtgggatgctgccgcgcaggagcggcggttcggcggagcggcggagcgctgatggcgctgctgccgtcggccttcgcgtgcgtgcggcgtgggaggtgggactggcatagtgggagaccagaagttaggggttttttttttgttgcctgttgggtcaggctttttggatggtccaagaaaactgaatacctactcttttctgagctaaattctagggtagtcctgggtctacttggactaccctttagacccgccactggtttggtggcctgtttgtgttttcttattacgttgtctaaacctttgctcgacgtccgcgcgcgtatgtgagtccgattgccgagcgtcactgggaaagggaggtggaggatgtcgcgggctcaaatggtataatcgtataaatattcttaaacaaaaacagtttgatatgatttgtcatctttgatagttcttatctgaccctgaagagcccagtagaaaaaaaaaatctgtgacgatttacagaaccgccgaatataaggtgtgaaggacgactctgtgtactcacccgatgaacctgacgccgcgcttctgacaataagcataacgatctccatcgtcacaaatataagaaacaggcggtatctaaaagccatgatcaaataggggcagaaatgaatatctccgccttcaccgctagcttaatctttcttcgttgttctacatcctgctagtttccgttcaatataaagggtgtgaagaactcatatagcacgaagtcatcaccgaacaaaattttcaaacgccagctaccttccatgtataatatgtgatgtttttctccgtgatctaatctgttcaacgccctggtggaccagttactggacgtactaaggacctaagaagtttcttcgaaatattaaagcgttacagtacagctgagaactgactcacttgtaaaaaacgtttttttgcatacggcccaaaaggggattttgcttgcggtagggctatccgcaagcaccaaatggtcagcaaaaattgctatttttgcatgcgggtgcacccgcacataaaaatcggattttcgcgtgcgggttctgatgacgtccgcacgcaaaaataaaattatgaaaaaacaaatcacaaaccctagccctaaaagccacttactactagaaaaaacattttcaccactcacaacttagaaaaaacattttcacagacgtgaggtttttttccacaggcgggatgacttttggagtcaaatggctgcctatgaaaatataaaccggggtgaagctcgtcgttcgcctaaaaaatcattttttttctaggtggaccacttaattaagaggtccacctgcaaaaaacatgcctactgaaaaaaaaatttaagtcctatccttatcttctcctccagcatcttatcctctccaccactcattgccctcactctcctctctctctctctcatttccctctggctacctcccctcccctcccagatctggcggaggggaggggcgtcggcagtggcgcaggaagagggggcggtggcggtagcgtcggcgttggcgcggccggatgggaggtgtggctcccctccctctcctctccctcaactctactctcctccgccgccggccacgatgacgacgaagccgactgcgacgacgacgctgtctggatccgccgccgcctggattcagggaggggaggcggcagcgcagccggagggggtgtcggcggcggcgctgccgaacaggaggtgtggctcccctccctctcctctccctcagctttactctccctccgcggccggccgcaacaacaacaacgacgacgacgatgccaccgccgcctggatccagggtgggaagggaggccaccatcggccggagggggaggccggcggtgccgccggggggttggggtggtggcgcggatttcgctaaaaatatttttgcaggcgggtgtatctaccgccggccaaaatgattttcgtaggcggaccgcttggccgcctgcgaaagtcatatattttcgcaagcctttgcgtacaggcggttctttcccctgcctggaaaaactatttttggccgcctagaaaaacgttttttctagtagtgattgttgtcgtcctcgtcatcgccatcattgctgaagccgctgccgttgttgtcaccatccttgtcctcatcctcctcctcatcatcgggtgtaggggcgggcgggatccgcgcgggagaagaaaggggtgccagttccgctcctcacgttgccaccgccacatcataggggctggatccgtcgctgccaagtctccacagtgccagatccgccgccaccaagcctccccaccgccgccactaagtctctcgacctgcaccacctgatcatcccctctcgaggccagccggctgtggatccgcgagggaggcagcgaggcccatccgccgtcaccgtcgctgacctcctccgccgccaccggatccgcccctatcgtggccaactggttgcagatccaacctcttcattgacctgccgtatgaaatagaaaacacaatataagacccaaaatgccgagtagtgagcaaaggagatcatagatgaaatagcttgatagtcaactttaacctaagatttgcccgtcaaaccactgtaacactgtaagtagtgaccgaatgtgttatatatgccagggacttgactcaaaatgctaaatttcacgatcatctcaattgctcaaaaccgttagtccgttactcatgatcagctagcccaaggaagttactggcttcatactttcgtcttagccaagatatcaaaactcgtacaacttagaaaccactagatacatatagctaaatcatatatatacggtcgaccagccaatagtaaaggttcagcagaaagtatgtctaccttagttagaaccgtcttaatgatcaaccgttctagcatcactcaaacataagcaacaaatctattctatcaattagcatttgtgagttatgaattttccatgttctatgttagttatacgttatttaagttaaacttaattcttagtgtagtttatatctaagttcatgttaacgccaaaatttagttagattctttagtgggttcggttaaggaaagagcacaatcagccgatggaaatcttatccagaagagtccgagttcaaaaaggaatcatggggaccatgacatggcagcttaatttatctattaattaggcaagttttgattttagaaaagtttgggtcatgtccaatgaggactttatatttttccttttatctttagaaaagtttgtttagtgtccgatcaggactcatatctacccatggttacaaatatgtacacttggggtctctgtaaagtatatccagatcaatacaacttcggcgcatagccaccctttttattttcgtctttgttgacgagttcttgtttcgaattgggctacatcggctttgatctccgacgaggagtaaggcttgttatggctgtttatattggcggggctagggcctcgacattctaatcttgtcgatgtaaacacctatttataatatatctcagttaatctaagttgatgtctcaatttacctgtatcgtctagatctttagtagggttttgttggtatcagttaaattgttttatcgatccagattagctaaggtatccaccaccctgaaaatcagtcaaagacttgattgtttagattttatgtttcttttcatacttagtgctgcatcaattgagtttgacatactaagtcatgcttagaatcatagaaactaacttgccaataagggtttcatcggggtttcacacccggagatttctcctttcccttagtttttaattctttaataaatctctcgaagaaaacattctgtctaacctggagcaaacctcaatttaataatgcacgttataatcagaattgccatgggaatgttttttggtagggatgaaaacggatcgaatacggtcggaaactagctctaccatattcgttttcataattttttttggaatcgaaatcggaatcagaaacccggatatgaaaacggaatcgaatattatcgaatacaaatacggagcgaatacgaagcgaaacaaatacggtgacgaatattaatcggaatataaaaacctctcactactcacaaacgatttttgatattgtgtttctaaaatcatgctctatcatgttattgtgtttttaccgctattattttggcaattttttcgtgactttgttttatcaattaaaaatttgaatttcaaaacttcaaatgatattttgaagcagtaaataaattcagctaaaaaagtcatgaacataaaagttgtagaactcatcaagacatacaacttttattttggtcatttct

SEQ ID NO: 13916 - DNA, 705 bp, Oryza sativa
ctaatacgactcactatagggaaagctggtacgcctgcaggtaccggtccggaattcccgggtcgacatcatcatcatgatcgctcgacatcgatacgactttgttttttttttttttttttttttgcgtgtttctaaagtacaaattcagtttattcatctgtttatgacacagtacacaggaggcaaagtgtttcacatcatagacttcactttcaactccttggaatgttcatttctttggcttacaggagagacttgacaggaaggccaggcaatgcttaggcaactaaaatgaggttgggggtaatgctaacgtcaccctcacagggatggccacggggactgttatttgcaagctggttttctagacctgttagctggaagcatggtgagcaccatttttggacgctcaggccgtgtcgggcttcagtcatctccaccacacaggtacagcagcgctttctggtagtcgcccttagtgtcttgctggatataatagtacagggacttgccgtactttctcttgaattcagacctaattttcaacatgtccacttcactgcgggagaccatgattctgatcaggaccttatctcgcgtccccttgcccttctgtcgtcttctcgcagccgtatagtagtagtaggcggccgctctagaggatccaagcttacgtacgcgtgcatgcgacgtcatagctct

SEQ ID NO: 13917 - DNA, 3419 bp, Oryza sativa
cggtttagctaacacgtgcgctgcgagccggtagtaagtagctatctctatcatcaaaacccccagtgttcttggtagcgactagaggtataagaagaggggaagaacgaccatagggtcgtgctccaaccctaggacgcgcccctaatgggcccaacttggatacacagcccattgggctaaaagaagtgacgcagcaccatggatagaaaacagtcgggagtaaaatgataattgcggccgctccagaatagatatggacatgtggctggatccatttgaaagtagacttgataagctttccatgaagtacttgcacgcccaaatcggagttcgcatgaagtcgtggcggccgtcagaattggcgctgccctgcagtccgaatccaccccgcgcgaatcctctcccctttggatcctctccatcgttcctgagtaaaacacgagtgcacgcgtctccggggtataaagaagaggaatatgaactcaagaaagaactcacctgataatttaattgacgtgcacgagcgctggtaataggaccatcatgctgtacttggggggacgtggatgtatcgatggtgttgatgtcctcatcatatttaatatgatttttgaagcaacaaactgtgctttattcttcacctcaattataaaataatcgatctagtcataaatgaatattcaaaattcagataatatttggttaaacttttaaaattctaacctttgcattaattcaaaaatatttcaactgaaaataaaattgattccaaaacaccctaatgcacgaggaaacatgtatgggcgacgtaaggctatatgctaatgcgttctaacatgtttaaagtccccttattacatttttgaaagtttcactcttttctccatttgatgggatggtaatcacatctcaaataactatagctcatgatagtgatgtgaacgtccatcccaagcattaaaggtttcatttctcccaaaaaaataaatcgttgtatcaggacgcaattcttcttagtgttaattgaaaacggaaaaagtctaaattaattacactgctaaactgatgggtgagtacaaattacctctaaacccgaaaaccagacatctttcactctcaactattaatatcgaatgaagtacccctaattcaatctagagtggttttgatcatatgtggcagcgcagtcagtacttttatatatatatatatatatatatatatatatatatatatatatatcttctatatgcatcttaaattcttctatatctttcggagttgctcctatatcttaaatttaaagaaagcaactctttttttagtgcccatgtgcctatactgtcctgggatataatgatatgaatattcttctttttctggaggccatcttcctgctgccctggctggtctttctctttctccttcattttttacagaaccctctccgtatcttttcctttttcctgttcccaaatctacttccatagcttccattgcattatctagattatgcaaaccttcctcatccaatgagtctataaaatcattatattgttctgcattatcttcttcttctatattctctatttcctctatcaggttgttttcttcttcataactctctagtaataatttctcatttacttcccattgctcttcctcacttaataccttatctaacttttggatttcttctcttggttcttctgactttatttgttctattttaatttcctgggttctgggggtttctatggccaagcttttctcttttttttttcttaatcctggatagttctctatagaaataaagttccttgtctctaattttaggccactcacttttcatagagttattatattcatctgctatatctcttaatttatcttcataatattttatttcactttcatggtctaatttttccatcaattcagatatactatgtcttctgttatctataatatctctgtcagatgattctgcatccaaatcatccgaagctctggttttataatttgtaaatctaatactaacattccctttgctgtcttggtaacttatgaagttttcaggctgactcaaggttttattttttataaattcactaattggccatttttctcctgctctttcttcagagtctattattaaagggctcatgaattttattcctttagaatgcattttttctatcacatcatttacattgattttgtatttggaggcacttctattagtcaatctttctataaattctatacttattaataaatttgttcccttaaactcttcgtatccttttgtttggaaaccaaaactcattttatctatgaattcatttacaggcatcattaaatcaggcgctatataggttatcaacatattttcattcatatctccttctagatagcctaaagatgctttgtttattgtgtcccatcttttatctaataaggttattagcactttagctcctaatttctttcttgtcattcctttgattcctattatgtacataccttggtgaatatacttatatcctgaatattttaaactattttcaaattctttagctactatttttaattctagtggctttgttagaacacttaattctagttctctagatattctataaagcccattcttattctcaaaaaatcccatgcagtatacttgttgaggccttattgcccttaaagtatctcgttgatatctttcgagctgcttatctacttgtgcaacatctttcagctcatctatgtcatcatatttgcctttttgtttatcagaacagttatcatctctgcttgctattcttctaaagagactcctagatatgtccatttttcagaattaatggcttgtgaagatgagattatgccagatgaagccaaaactatttccttacctttactagagttgattttgtctagtaattctttaatataatcactattctgtgaaattttattttgccttatcttataatcttctaataattctaatgtagtatttagcttattattaagaaaagaatattgttctacaaattgcttttgttctttatatatatcttctaacttttgctctaaatcttcttgtctcttactccaatttatatagaaattatatattaaatctacaattaaatttagttggctattattagagtgccaactatgttcttcagtatggcttagtctacaccttatgttgatattatctttggtatttattaactttccaatattagcttctaaatttagcttctctatgattaccaggctctgataccactttataattaattcacaactattcactactattcttagtgctgaattcacttattatgagtacagaattacttagtgctgaattcacttattatgagtacagaattact

SEQ ID NO: 13918 - DNA, 716 bp, Oryza sativa
tgttttcctgaaaaggaagtggaaatccaatgagcacatggatcacacctacatggaactgaaaacgttaacatatagtgatgtaagcaaagcaacaaataatttttcagcagccaacatagttggctctgggcattttgggacagtctatagaggtatactgcatacagaagacactatggtcgctgttaaggtgttcaagctcgatcaatgtggtgcattggacagctttatggcagagtgcaaagcactgaagaacatccgtcaccgaaatcttgtcaaggttataactgcatgctcaacttatgatccgatgggcagtgagttcaaggctctagtatttgaatatatggctaatggtagccttgagagccggcttcacacaaagtttgatcgatgtggtgatttgagtttgggagaaaggattagcatagcatttgatattgcttctgctctagagtaccttcacaaccaatgcattccacctgttgttcactgcgatttgaagccaagcaatgtacttttcaacaatgatgatgttgcatgcgtctgcgactttggtctggcaaggtcaattcgtgtttattcatctggaactcaaagcatatcaacaagtatggctgggccaagggggttattgggtacattgctcctggtgagtaggttttctgagcatactgcagagtatcatacaatataaagaaattactattata

SEQ ID NO: 13919 - DNA, 869 bp, Oryza sativa
  unsure (1)..(869): unsure at all n locations
aaaatgaccggaagttcctgccctgtaagacaggaactttcaaacattttgtcaagaagttccaaacttctaataagcacaaagaactaaccaacaacttccaaatataatacaaagaannnnccgcaaggatcttactatgattcatatgtaatttccaaaaattcacagggcaaaatggctgcttattttaatgggaattacaatgatgagtaccgcacttgtgtgggggtgccaaaggctttggtaactaacatcaagggacccaaacttagacaagtttgggttcctaaatcccaagcttgatttcttttgtaggcatactcctccggtggctcaatttgggttgtggacagtggctgcaccaattatatgatgggagagaggagtatgtttacaagtcttgatgaggagggtggaagtcgtgaaaatattgtctttggagataatggtaagggaaaggtaatgggtctcggtaagattgccatttccaagaatcaatctctatctaacgttctccttgtcaattctctaagctacaatttattatctgtgtctcaattgtgtatgttaggatttaattgcttgtttaccgatgttgatatgaccgtttttaagcgagatgactcttccatagcattaaaggtgtgttaaagggtgatctctatctcgttgattttgacgtcgatagagtgaatccggaggcatgcttgattgctaaatcctctatgcgttggctatggcanntangtagcccatgttggaatgaggaatttggcatctcttctaaaaggggaacacattattggtctatctaatgtttcttttgagaaggatcgtgtctgaccgagattgatctgtccgtctga

SEQ ID NO: 13920 - DNA, 2060 bp, Oryza sativa
gcgtatggatagagtcgtaggaagacaattgtatctatcaattaggatatttcatgtaatttccttagagatatgtttgggcaaagtctgccgcaaagacatggtatcttagagttgttagagataagagtcatgtccgatatggacatattttgtaatctcgggtataaatagaccccgagccccatgtaatcaaacgaacacacgttcaatacaatctcggcgcatcgccacccttttactttcgttttgttcgacgatttcttactctcgggttgagctgcatcggtttcgatcttcaacaagaggtaaaacttattatggtggcttacgttctcgggattagtgcttccatctttatgatactctaatcttatttatgtaattcgtcgagttatcatatatcttacataatctccagcaatatcgctatctaaccttcaatcggctgacgtctgctactagaaggcagccgattaggttaaataccaacgttgacttagattatataggatatctaccactttatgaaacatccaacgtcttgattgtctagatattgtccatcttttcatacttatagttgcatcagttgagtttgatcttatgagtcgtgattagaatctcaatctctagcctgtctttggttgccgattagggtagcatcggggtttcagccgatcttatctgatttaactacatttatcttatatgcttgattgatatgttaaatctaccttttatgttaagatcttgtcgcatttaaggtatattagactttctgtttggtatattctatttgtattaatatcttaatatagagtggtatcggagtattagccgatacatgctagatttatctgatcggctatgctataaacatatatagtcttgttgtagtatatatttcgatctaagtgatttataatgtctcggcatagtgaccgatctatctcaatcacttgatttaagtatatatcgacataagaattatatattgttaatatctacagccgatcgagtagatttagttctttcttacttattcatgaccgccaatcgattcacatatgacatcggcttaaagataaatgatatgtcatcggcaactagccgattggctatcatttatggatttaaccacggtttctttgtctttgtttcttgttgattgcaggatcaaatcaactggcacgctcatatatctgaaggcaagcttttggacctgcactggagttaagcatatctctcaggcttcgtgtttttacatcaacatgctgcctgatgttggcgccgcccggccgcctccacccagcgtcccctacagccggatctggacgaggggaggccacccggccatatgccgcctcccattgcaccgctgcccgcaacctcatgtgtggccgcggcccgccgtcagaggagggggtagggggaggagagggggatgggccggaggaaggggaggagaaaattagaggggagaaggagaggatgagatgggaggaggtgaggacgaggggatcgaataaggatgagctaggcagtgcgcgcaggctcgggaggatttttcgcaatttttttaatttaggtcccggctggtataaacaaccgggactaaagatccagcgttagtcatggttggtgttaccggccgggactaaagataatagtggtctgatatgtttttgaaccaggactaaaaatgatatttagtcctggttggtatcactaaccgggactaaaatcagaaaaacaaagtacctgtgggttttcacagcaggactaaagatattagtagtgtcagtttttactcaaatcggaactaatcaatacgctggatcatgtcatgttgacaggcccaaaccttcacctttgacaggtttggcaacgggttgtaacctacgacacgtcactgatgacaaagcaagaaatacaatttttgaattttaaacgcaacaaaaaaaacctcaaaaagatattttgaattttacaagccgtcctatatacatggttacacatcactacctacaaattcacaatttttcgcgtaatataga

SEQ ID NO: 13921 - DNA, 638 bp, Oryza sativa
cacttgcaattgcaacgtactaggagtactccacacacgaggatgatggggagtatgaacgctagtactactacgccgatgcttgagcttgccaatcagggtgggtccgtgcttgctggcgactgacaagggcgtgccctacactacagtcgagccggcggtacaccgcattgtagtactagtattgttgaacgcacactaggacgtgacgagtcgcgacaggacggggatttgtgtgtacagtagtgtttattgttaccagggagacgacgtcgcgggcggccatggcgaggatgtccgcgcaggagaccttgccggcgcagccggggagcgcctcgaccgccgccttggccttgttgatcgcctccaccgcgtccggcgacagcgtggcgtccgcgccgctgtggctctcgtcgtcgccgttcggcgccatcagcatcaccgacgcgtcacacccctgcaaacgcaaacgccgagaagatgaacacccaaaacgccgagagaccgagaccgagagagaggacgtaccctgacgaagcagtcgtggaagaagaggcggagggtgcccgggccgacggcgaagctctgctggaggtgctgcgagatgacggaccggacggtggactccgcgttggggc

SEQ ID NO: 13922 - DNA, 505 bp, Oryza sativa
gccatgcacgcacgactgacaccgacgtggacttgacttcgctgtcccggaattacttacgcatcccatttcacatccatatgattaatcgttgcaacaaatagtaaaaattacagttaattctactgtttcactgaactttgctttttttttttgctggtgtgttgcagggtgccgtgcgtgaagaagggcgggatcaggttcaccatcaacgggcactcctacttcaacctggttcttgtgaccaacgtggccggcccaggcgacgtgcagtccgtgtcgatcaaggggtccagcaccgggtggcagcccatgtcccgcaactggggccagaactggcagagcaactcctacctcgacggccagagcctctccttccaggtcgccgtcagcgacggccgcaccgtcaccagcaacaacgtcgtgccggccggctggcagttcggccagaccttcgagggcggccagttctgatcgagtactcggctaattccgtttttcagtt

SEQ ID NO: 13923 - DNA, 1044 bp, Oryza sativa
ctatctagcaatatgcaggctcattttgctgggagaaaatcgcgagctataaatatgcatgcaatgcagcgttttctcttgcaagagctgcttagacaggagtagttgctacgagtacttgctaggaagaaactgcagtgtgctctgttccaaagagtagtgatggcttctgcctcttctcttggcctattactgatgctcgcggcgctggtctccacggccaccgcgcatttgtcgccgacgttctacgacacgtcgtgcccccgagccatgtccatcatcaagagcaccgtgacggccgccgtgaacaacgagccacgcatgggcgcgtctctgctcaggctgcacttccacgactgcttcgtccaagcacgtttccatctcacaaaccaccctgttttttttttttactttgatttaaggccgaaaagtagctaacaggtttgcctgtctgtcagactacgtgagttagcagcgttgcaagaaaataatcgtggcttaatttttgtctgaatcaacacagggctgtgacgcctcaattttgctggccggaaacgagaggaatgcagccccaaacttttctgtcagaggctacgacgtcatcgacagcatcaagacgcagatcgaggccgtgtgcaagcagaccgtctcctgcgccgacatcctcaccgtcgccgcccgcgactctgtcgtcgcggtaaccatgcatgcatatatcaacgacacaagatatcgagctcgcgattacgaattctgtgatgctgaattgctttatttggtttttaatttggcatgcagcttggaggtccgtcatggagtgttccgctagggagaagggactccaccggagccgctaccgcggcccaggtgattagcagccttgctccttctacagatagcctcgcacagctcatcagcgcgtacgcgagcaagggacttagcgccactgacttggttgctctctcaggtgcacacaatatatataactcctcgatcgatctcctaatcaaccatggaagtgtagtaaacaacagcttgtgttga

SEQ ID NO: 13924 - DNA, 2271 bp, Oryza sativa
gtcgtggctctggccaccgcggcgtcggcgcagctgtcggcgacgttctacgacacgtcgtgccccagagccatgtccatcatcaagagcgccgtgaccgccgccgtgaacagcgaaccccgcatgggcgcgtcgctgctcaggctgcacttccatgactgttttgtccaagcaagttccacacataaccagcgcctttgttccattttgacttaaacgttactgcagtatatctctagtcaagcaacttgagtgatatttgaattgaactagaaaagttaaatatatattgtacatgtgtgcatgcagttagatgacatgttcagacaaataaccatatattgtacatgtgtgcatgcagttagatgacaattgacaagcaagacaaataaccatacattcttcctgtttgactaactgtacagggttgtgacgcgtctgttctgttgtcgggaaacgagcaggatgctcctccaaacaaggattctcttagaggctacggcgtcatcgacagcatcaaggcgcagatagaggccgtgtgcaatcagaccgtctcatgcgccgacatccttaccgtcgccgcccgtgactccgtcgtcgctgtaagatcactttccctgcatgcatagcctgcacgcttggtctcgaactctcctctcgatcgattcctgtatggttgtacgtgggaaacggatcctctaacgtgaacttcttcctaacgtgatcactaacagtaacaggtgagcccgtcagtggtggaactcatatatcagttatcacgttcctctggttttacgtcagatgatcccgatccatatatatgacattattaggcttcggcttttgtacttaaccaatggagtaataatcatatgaacgcgcatgcagctgggagggccaacgtggactgtcccgctggggagaagggactctacaggtgcaagcgcggcgctcgcgatcagcgacctccctccttttaccgctagcctccaagaactcgtagacgcattcgccaagaagggccttagagtaaccgacatggttgctctctcaggtaaagatccaccatatatgctcacaaaccatcaaaccaagcaagcttaattttctgcactcctatttcatgcgcgcacacgatcgggcaggcgcagtgctcaaccttcaggggcaggatctacaacgagaccaacatcgactcggccttcgcgacgcaacgccaggccaactgcccacggacatccggcgacatgaacctggcgccgctggacacgacgacggcgaacgcgttcgacaacgcctactacaccaacctgctgtcgaacaagggcctcctgcactcggaccaggtgctcttcaacaacggcagcacggacaacacggtgaggaacttcgcgtccaacgcggcggagttcagcagcgccttcgcgacggccatggtgaacatggggaacatcgcgcccaagacgggaacaaacggccagatcaggctcagctgctccaaggtgaactcgtaagcgagtaccctgcagacactgcagtaagtagtaacaacgtttgtagcagtatatgcagttatgcacgtataagacgatggagtgcgtgaaaaaataaggacccccacaaccactacgactgaatgaatagcaatgtgtacgtggagatgtggtacatgcagatttgccttgctctgtttcttgttccatctgtatgtgcatggaatacagaggacagaggggcatatgcatggcgtatatgtaacgaaatttctggtgcaaaggcacggaggattatactatactcatcttctaaatattattcctacaagctactagtattccacacgagagaccgagagacccatcagaagggatcagaatgcgtgtggctgggctgctgggtcatctccacatgagacattttttattgggccgtgaactttctcgttcgtaacatgtcggtgcttctatgaaaaagcccagtataactgggtcacgtcccattaaggaagtagctcattcacactagtactcctgtgtccaccgtcggatccgagtttcaaaaataaaagggaaaggtctgaacagatattaaatttttggttgaaatggaacataattttcaaaacaattcaaatacaagagcaggccatcacaaaatcagaagtacatgcaagcacacccttcaagaaatcagcagctaccacaggtgccatgcaaattcgtggcgatgactcgtgtcgtgtgtcgcttgaccacaccaggatcgatcgat

SEQ ID NO: 13925 - DNA, 571 bp, Oryza sativa
ccgaggcgcaactaggtggttacaagggaacatggtataacaattacaatggaagggtcaaatgcaacaagttaggtaggtccgccaatctgccttgcagacgggacaagtagattaagtgcgatcctagcaatgcataatatttttcaagcaacataattaagttcaaatataggctcaagatgttcaaaggtggcttgccttgctcgatatcttgagcttgatcctcgaaatcctcgcactgcgggtcttcgggctccgaaactacacgcgaaacgggacaactcagcaaacggcgaaaataaagccctattattgacctctaagcgtgccattagatagatctcgagatttgagaaattttagaagttgaacggagtcaaacggacttacggttgggaagatattgaatttctaagattattggatttttggtctaaaggaaaaggatttatttaaatcctttttgaaaaagaaaagaaaagaaaagaagaagggaggggaattagactttcctcgggcggctagggcgcgacccgagagaaggggtggctccgccgagcttaatggg

SEQ ID NO: 13926 - DNA, 1023 bp, Oryza sativa
cacgacgacgcccaccgcgttcgacaacgcctactaccgcaacctgctgtcgaacaaggggctcctgcactccgaccaggagctgttcagcaacggcagcacggacaacacggtcaggagcttcgcgtccagcgcggcggcgttcggcgccgccttcgcgacggccatggtgaagatggggaacatctcgccgctgaccgggacacagggacagatcaggctcatctgctccgccgtcaactcgtgatctgatcgaccggtttgtatatatccagacgctgggcactcgacaacatgattaattaccagtgcacgaatgcatcaaggaaagaattccagttgcaattaattacaggtgaaacatactactccgtcttagaaagaatccaatcctaacaatgaatcttgacacatgttcgttattaggattggatttttttttttttggaacggaggaggtacgctcgtattagcatacgcaattatagtcctttaaaatcgtagagcattcagtgaagatgtcaccgagaatgtcacggggaatgttactgaatctgcgtccgtttattagcaggtttgcatgcttcttgatctgtaccgacttctctctccaatacaaaatccactcctgttacaagttattttttccctctctctttttttttgagagagagaggactcccgctcttgcaatcttgctagacctgttcgtcctccatcttgcagtagcaagattttttgttttctggattgccgtcggccggtgaccacacgcgcgccgccggcgcgagttaagatatctccaccgcctcggcgatattttgctccacgttgcaaaggcccgtgaaggtgacgatttggcccatctatgccggtgagcgtgctacgtggtggatggggcgtgggccggcttattttcgcggcgcaaaggcctactctttacttggcaggctgccactacttcggcccattaaaattcaccagcggcagaaattgaaatgcttttttttggcgggtagaaaa

SEQ ID NO: 13927 - DNA, 589 bp, Oryza sativa
ctcgtttgccttcgagcgcccctagcttcggagcagtgcgacctacagcaccggtttcgcacggtacagttcagcccagagattagttcatttttgtttcagcttttgcacgaatatgtcaccatgttttaactgcacgtttcctcatcgcaggacctcgtctgccttcgagcgcgttcgcaggcacgaccggcgcttccgcgagctccgcaggggcgttcgccacctcttcgggcgcgttcgccagctcttcctctcacggagcgtcgatccctcgcccacaaggtactttactttttattaatactattaaatacatgtatgaaactgatggtccttgtccagtaggatttgcagccgggatcttcggtactggggcctcttcgtctcacgccggtaggactggtcctactagccagttctacgacgacgacttgcacggtgcacatcaccacgacgtactaggctcctctcagcttggaggagctccagaggcgcacactcaggagcagccagaggtcacacctgtacaggcaggacgggttggccgtgccgtacccccggaccgactcacgtactcccaggggca

SEQ ID NO: 13928 - DNA, 2205 bp, Oryza sativa
ctgtgcgtcatcttccttagtatgagtatcctcttagtgtgactgcagctcgccctcttcagttatatgctcttcttctccatcatgttcagtaagcttatcctactcttcttcagccagcttctcttcttcttcttcaagcgacatcatcgtcaggtggcacaggtggacgcctgacaatcccctctcctttgaaatggcttgtccacgagccattgctttaggaaactttgccttcagctcctccagatcttcccaggtggcttgttcagatgcagtacctgatcattgaattagcacttgcataatggttgaattattcttcctggtcaacctgtgatccagcacatgtaaaggatattgaggagtagaggagacataagataagtgagtttgcactggcttgtcaaatcccttggctggctttagcaatgagacatgaaaaagctgggtgaactctgcttccaacagggagaagaagcttgtaagcaactgtgccaatttttgagatgatctgatatggtccatagtacttgaaagctagtttgtgattagaacgaggggctactgagctttgcacataaggctgtagcttgaggtaaacccagtcacccactgcaaactccctgaaacttctctttttgtcagcaaagtatttcatttgttgttgtgctctattgagatgttgctgggccagttgttgtattgtggctctgtctttgagccaaacaaccaaatcaggaatggcacaatctctgaacccaatgttaaaatggcttggggggtagccatagaggatctcaaaaggtgtcttgttcagagaagaatgataagagcaattataccagaattcagtcaaatgtagccatgtggaccatttagtgggggcagaatgagtgaaacatctgagataaatttccaaatattgattgactctctcaatttgcccatctgactgaggatgatatgcagaagtaaagtgtagttttgtatcagacctgagaaaaagttgttcccacagaagactggtgaaaattttgtctttgtcagagacaatagtagtaggaagaccatgcaacttgaagatattagtcatgaatgctttagctaccataatagcagtaaaaggatggtggagtggaatgaaatgggcatatttggaatatctatccactaccaccagaatgctggtgtaagaatatgatcttggtagaccttcaataaagtccatggaaataacttaccaggcgcctgagggtacaggaagtggttgcaacaagccaggatacttggccctgtccggtttttcttgcaagcagatttgacacttctgcaattcttttaatcattttcttcatgccttggcaagcaaacagctgcttaatcctcctgtaagtaactgggaaaccagagtggcctcccactgggctggagtgcaattcagatataattttaagctgcaagggatagttagaaccaatccaaattctgttcttgtatttcaggagtccattctgcagagaatagtgttgtttggctgcagggttaagagttagagcagcaatcaactgagaagtaaaactgtcttgagtatacccttgttctacctcttgctgccaactgggtacacaagttgatacagcattaatttcttcttcagtgtcctgaaacttcctggacagggcattagctgcattgttggaactaccctttctgtagcaaatcttgtaactgaggccaagcaatttggtcaatgccctgtgttgccatggggtgtgcagtctttgatctgataaatgcatcaggctatgatgatcaatgagaatgacaaactccccatgctgcaaataggatctccagtgatctactgctaagagtatagccatgcactccttctcataagtcgatagccctctagttcttggacctaatgccttgcttagataagctatgggatgcccattttgagtcagcactgcaccaataccagaatcactggcgtcagtctccacagtgaagggtaattgaaaatttggtagggctaaaacaggtgcagaggagagtgccttcttgaggtcttgaaaagcttgttctgtctcagatgtccacttaaaagaaacatgcttcctgagtagctgagtaaggggtttagaaattaaaccaaaattcttcacaaatttgcggtaatatccagtgagtccaaga

SEQ ID NO: 13929 - DNA, 607 bp, Oryza sativa
tcagtacatgcaccaaacatgtccaaaagagagttgtaatagttctatatctatatataaaggtgcgggactgtgattaagagaccataccaacatggggctattagaggcttcgttgttagcatcaaattcagaaagaacatcaaaagcatgaagcttccaatctagagtttgagtaacaactactctcgtcacgcatacattcccgtgaacctgaaattgatgatgacaatttcaaattttatgaccaaagaacttccaacatacattgttttcgtgtgtcattacatgactttgcacaaataagaacatgcatttatattgactattgttcattatccgccattaacaaaataagagtaaaacatcatatcaacaaagttatacaagtacaaattctgaaatcaaatggtcaagaagaaatgacacagtataagctggctgattgtgatacttttctcatctggataaaaaagaatttggcatgtaaacaagaagatcctgacgataatttggttgtgcaatctaattccaagggtaacttatactaaatataaattgatatttttaaaattttaaaaatgagcaaattatgcccaccagaaat

SEQ ID NO: 13930 - DNA, 719 bp, Oryza sativa
actatagggcgaattcgagctcggtaccctcctatctgacaggcatgtgaggaagatgtaaccatttaaggatgggcagagtaggttgatccatggtggccatcggtctctcgtggtccactcacatgttgcatcatggcactgcgatgcaaagttcagttccatcttcccccgtgtacttggatggacaaatgctatttattcgccgaaagcttgcagagccatcaacagatcaactccctctagccccctggccggcaagaggcgtctccgccgtctagctccgtacgtacgtctccgatctttcagccggtgagctactaaaatcatttatgatctgcgtggttggttggcagtattgttgagactgcaacatcgacagagcgatctatcataagctcagcttaggctgtgttaaagagctccataagatgcttgttcttgaattgcttgtaaaaatttgcacccatgtgacgcatgcaccaccgacttcgaacatcgggccacttaactggaagtcccttctcatcccaaccgttctgcaagtagtcaatagcccgcaacatacccccatgaagaacatgtataaagcaaacgttgggcctcatacccaccactgcaatgtgcactctctctaggaaccagtaccagctttcaggggtctcactctctacaatgcaaaagccataagtagaaactggtttgttcccattacaccc

SEQ ID NO: 13931 - DNA, 4717 bp, Oryza sativa
acttaaatttaatgtgacttatctcacatgatgtcttgaatgtggggccggctaatgggcgggtgaccgccctaggcgatcacccccctatctcccctatacacttctctcttccttcatcctctccttctcttcctactacaccataaattttaaaaaaataaaaaacacaaagttaaaaaaattatgtatagaaatactatatataaaaattttgaattcaaattcaaatttaaaacaggtatgtaaacttttgacttataaactttgggtctataaactaatatttgaattcaaattcaaatttgaatcaggtatgtaaacttttgacttataaactttgggtccataaactttaggtgtataaaatttagatgtatagaaatactatatataaaaaatattttgaattcagaatcagatatataatcttttgatttataaacttttgatctctaaactttatatgtgtaaactttaagtgtataaatttactataatatgaaagtaatgcggtgccaaaaaaagaaaccacgtggagaagagggggcgtgctaggagcgatcgatcgccccttagcaatcccgtttggatgttgggtagaaaccatgtcgagacatggtttccttctttttcctcatttattcacttgccacattatttttcattttaggttgcagcttatttgatgctatggacaccatcctagttattgggttgggaatgacctaagtaactattgtatgaattagctattaaattagctatagataatttggagttagtagttatggttggctatactaaacttgctagtagggaataatctgtgcacaccagactctcgtgacaaggttcagtaaattcagagggaattagttggagccagttcaaaaggagattcttatgtggaccatagtggccttcggcaatatggattagtagtttagtactgtactactccttttcgagtgtgaaatgtataggtaaaggagaatgaatagatgctgtagttgtatgtgctttaattttcacggtggagaacaaaagttgcgcttgcttgcagaaaagagaaaggcacggtcgtagattatttaagcttcagaacagagagacaaacagacatctacacttcgaagctgtgtaaacctgtgagagtcaatctctctctactttccaaacatggctgtaagctctactctgttcttctgtttatgcaacagtactgtataattttaagctctactctgttcttctgtttatgcaacagtactgtataattttatctgtagtactgtacatctactaattgatcacgcatatgcttctcaacaacgggtctgaattttttttgttttgttgcgacaggtggtggagttgaaggttgggatgcactgcgacaggtgcatcaaggcgatcaagaaggcaataaaaacgatcgatggtaagcattcgttccactgaatctgtcatttttatacgctacaaaacatgtacttgtatggttgcatgatcaaccgtgcttcttctgtaaaaattaacagatatggagagttatcagctagagacagagataaacaaggtcaccgtgacaggaaatgttaccccagatgaagtcgtcaaggctctgcagaagattgggaagacggcaactaactggggtgaagactgaagtgttcatctttagctagtagtatatatcagctgatgacttgatgtccttagtccttagtcctttctatggttactttgagctgtttatactgcagatatacagtagtactaaggaacataaagtgggtaaactcggcattgcttactctccctcagtagttgattaatgcaatggattatgcgttgccctgttggattaccttacctcctttgatgtgtacctgatttgtttgcaaaatcttccggatgatgagacaaacttttctacgttttcatggaggatatgcatgatatgtctttattcagaacaaaattatccatcctttccttcaaaatctgaatcagctttcgcttgcactcctatagaccatcttctcgaaaaaagaaaaagaaaaaccctgtcaatggttggattttgttcttccaaaaggataaaaaatgttggagcttgggggcctgaaatcatgtttttctcttctgctgctgcttgcagttcataaaggctgcaaaattggttcttcttttgcttccaaccaattcgtacctgtgaatgttacagtgtttaggcattgtttatggaacagacagaaatccgatgcaacacacgaagttatgtgagatttgtttaactccaatacatatcctaaattgggattcaaagcgtgtcagttagtttgatcctgcaactaacaagaatgatagaaataatcaaactaatcaaccgatattgctatagtgtggtagatgtaggtccaatggttaaagtatacatcggctggatatccgatgcaggtagattcgcatgtatatcggctaaccaactgatacatctaatacctgaagctcataataatgataacttatcggttaaaaccctgatgaaacgttgcatcatattgacttagtagatcaaacttattagcagcaatttaatagatcaaacctaaccgagacaatataagattgaagataaaaagaaaaacatatttagctgatagatctacacaaccgtgatggatatattggatcaatctaaaacaacaatatgattagagaaataccaactgtcgacgtttgaggtcacaactacagtatttgcatggtatggggatcattgataccaggtaaaagatacagagacaatgatttttatacaggtttaggccccttcgtaggaaggtaataaccctactcctattggccgaagccggtgttgctctatatttatctaaatcacacaagtacaatatttgggataatctatctagatgttgtcgacttggcggcatggataaccaacacgtagttgacgacaagatagtcttccttttcgagtacaaactcattgatataagagatggcgctagatctctcttgtcggcctctgcaggcaccatattgggtatgtctaggcttatctctgatgtcaatgtctggcggcatgtgttggtctctattctgatttgtgtgtcgatctgtctcgttgtgtcttctctcctcctaaggggtattgtatttatacccatagatgttcccttgcccaagtagaactacggagtcaagtatggatacaatccgattagttcttatagttttcaaataaaactctatttttctttccttatccgaaactccttctatatgcgaggtatgatttcgtataagacttggtatatggtgggccccactgagcttagtcgattactatgggtatgtggtatccataaccctgacaccaacctagttagaatatcagacttaaccaagaaaatcctaactaagccgatacaactctaaacagctatgcgattaaagatagagttgatatatctgataggcaaagcatgtaacagtctagttagaatatcggacttagctgaaaatgttctaaccaagccaatacaaacaaagttgatagaacttacatcctctccagtgaacgaacttaaccgatgtagtccaactcgagagcatggcctcgaacttgatttctcgccagagatcgaacttaactcatgcagcccatcctaagacaaaagatgtaaaaagacattgggtgtacatatttataccctggagtttgtgcaagtctaaatcgaacacgagataagatttcataactagaaaaaaaaactaatcctacttatttaagagagatactaagaaaatatgagaccatcctgatgtggtcttcccgactcctccttgaattcagccttatttatataaattttcagctaccgagcagtttatttccttactcgaatccactaaaaagagctttgttccggtgcattaggttataccttcaggtactggtatcaccaggtatcaaattaaatcaaaccgttattcaatcaacagggacatgataggtaatgaactaaaacatcggtggaaagggaatgtgcaagtgcaaccatcctctgcgtcaagcatgtgccgctgccgccgctagcctagagatgtcaaaatgatgggctgcaagcttggatccatgaccgacgagcactaggaggtgagggaacaagatcctctaacgtagaagattctacgtcagaaggatgtagaaggcttgagcgccgtttatttcgcatctgacggcagcgccggttttctctagcctccgccctctttcgaccagtccagaagcgcgatggttcggcccatatgcggtcaaagcgaaggggaaaaaccacgcatggaaagaaaacgaagccgcccctagtcggccatggccattggctacttgctgccgttcgtcgatcatcgcctcccactacgcgggtacaggtcaagcaaatccccgaggaagcaccttcttccgccgccctctgtagcgcccgttccgtcgtggcgcctagcgggaaaatcatctcttaaaaaccctaattgcgaaatttgtttctttgcttgttgtctagtgtccgtgccatctcaagatctcaatccccgatctatcgtcaagtccaattccgaatccaatccttccaaatcaaattcctccgcaaaagtctattttgcctcccccgggggtcgatgg

SEQ ID NO: 13932 - DNA, 604 bp, Oryza sativa
tgaataggcttcaatcgaaatcaaacacaagtactattcaaattaccaaaatattggtagggcatgtttttggtagcaatctaaataggcccttagtcttacgcatacaaaaaatcaccaccataattaaacattgtaatgataagatagataagaagtgccatcgatacacggtacaaatttgtcgatcccgacgaatcaagcatgcggtaacctatcggcaccttctaggtcggtcagaatgcattgcattctcgtggtccttcaatcgttgatactctacttgtgtttctgactctgttatcttctggccatgatatgatggagtgacattgtcgatccatcgagtaaatccacccatccttggattgccctgtaaaaatagtaatgttattcagtttgggtagtaattttgtgcaaatcatagcggattttgtaaatggttagacatacaacgaaatcgttgtctacattggggcagacaaaatatctccttcgaaatgtttgttcaacaaaggatgtagccacctgccagcgatctctgcacccacactttggacgcttggaccatttaggtaaccctaatggattgttcctccagtct

SEQ ID NO: 13933 - DNA, 2889 bp, Oryza sativa
tcctgcagcccattactagacattacatagcagcttagctggaagcaagtagcagcaatgcattcataatatatatctgcaggcagctgtattaaggcccagaactacttcagaaatctaatctaatatagtgaaagctaagagctttcttgcaaaaagggcctactcatgttggtggcaaaacatggccatcaataaatactgttcgtcagatttcaagaagcaagcaatcataaaggtccttcacagaacttctatcaacatctagtaatggagtgatatgactaccggtgacgcacaaactatacaagataagcatagctgcttgcagaaatgttgaaacatgatttgtttcaaatgaatattctagttccaagagaacaccaaaaataatgtaaaagactgagcatgtgtgtaataacatgagagtgcaacacagcttaccttgaaaggttggtggtaaactacccagagtaagtgtttcaaactcaatagaatctattttatatttttctttattctctgcaataattggatttgcaatatcctgtgcagttttgcagatagcctacaggttacacaacttttatcgtcaaccagaagtaatctacaacttaagagtattaatttttattgtcaaccagaagtaatcttcaacataagcgtaccttgttgaggtaaggccacatcatctccagaaatctgctcacccaatcaatctagcaacagagaggacaaaaaaaaaagggcattaaaagtactgcaattactattgatcgagtccatgaggtttcttcaccaagtagttgaaaacttaaaagatatagaagcatactctatcacagtcaggattcttgacccacaaaggaatttcatgaaggatgccatccaaagaatttgagtcatattccaccagtgggcaaactttgacgtcctgaaaggaaatcaggggatacattagtgtaacagtattcacaattatgtttcatgtatatcctgcatgagagaaccctttcttggagatgcaactagtccaagtgacaccgcatgggagaacacaaaaaacgtgttacccagtacccagatatatgcatatataaatcttaaataagtatcaaacatcagatgaaagaacattacaaacccaccaaaaaacagaaggatactcataccacacagatctaatgtaaataatgtgtggccaataagaaatgaagaaggttctgatatgaaaaaaaaattgaatcagctcttgacgagtttatgaccaaagtgtttcttcttaacaacaacctcagactgttcccaaactattttggttaaatgattagagatctattgacagagcagttaccacataacacaagtattcgctacacggcaacaaaatgaaatggcatacagtaataaataaagaggaagatcaaacaagcatatgcccaccttcacctcggttggctggaagtagatgaagaggaagtacccaataacaataccagctgagaatccaaaacaaaacccagagaaatcaatcaacatgctgactatgcccatctcagattcctacaccagctttctaccagaactctcatagccaagcacataagaagatgaaacaaaaaggcattactcagataagttaatcaaccgaaccacgtcaccctgctaaattacaaggggacaacctgagtaagctaacctactagaactagctagtacctccccttttttttctgcaagtatcctattcagagcatgacaatgccctaacatctgcaaacaggtattaaactaattccgccgatcatcatgaagcaattccccactttagaaactgtagggggtccatctatcaagactttcccccacggcacgaatgtaatgcttcagacacgtagacacaaagaaacaagcaaacaaacatgcttaaagtttcagaaaatacagtgaaaacgacactaaaggaactgtgagaacaaagcttagcaatgccctaatggcttggcaacacgaagatgcaagagcttctggagaggagaatacatgtaacattcgaaatggccacacggaattcagaagaatgtaatatagggtggtcatcagtcaagttgtaatgtgctaactacgaatactttggttggtggtccggttggttcttttttatgtgggtttcagaatggattaattctgtccctgtaaactgaaatagagtattgctattagatatttcaatatcatcgtttcggattaactcggtccaatcaaatctactcacaatgcccgattaaaccaacaagattgatcaatagatgccggaacaaagccatcagcaaagcacagatgcgattcctcgatcgcgagatcgatcaaaaacgattgcaagatcgagtagcagatgggcgatgagtttgaaaccgagtggatttacctccgtctcgaatcggccgccgatggcgtggtgtccgtgggattcatctcttgccgacgggaaaccgaaaccggggatgcggcggggaaaagaaaggcgccggcgaggagagggtggtccgtacgccgtcggcggatggcgctctcagcgagcgagggccagcgacggcgggccatatgcacggggcgccgacgcggcggcaagtcgagacgagagggagggaggaacgccgccactacgccatgcgcgacagcgcgaggtcgcactccagacaatcagacttcagaagatgaacacaggggactgcttggtgttggtaccatagtacttttctccgtcttaaaatattactatttattatatggttttaattaagatatggattttatcttggtttttattagtatctttctaaattgttaaatgatatatttcaaacctatttgatagagcatcaactc

SEQ ID NO: 13934 - DNA, 1051 bp, Oryza sativa
ccaaattcttcaccagtagtctctgcaggagcaggccccattctcgaagcgatggaaccggctcgcgtccctgacgagaaacgctctatttgtcaactccgagatcgtcttcagaaacgagtggcagtccccgcacacccgcaggttcttgatcaccacgatctcacttcccgcctccgtgttcagcaacccgaacgccaccgccagcttctcgctgtggaaccccaccaatggcacggccgccgcctccgctaccgccttctcagcgcgctcctcaaccacatcgccacccgtcttctccttcaccatccgctccagctcgaccacgagctcgtagatcctcctcgcctgcgggtgcgagtggtcgtcggccatgaacaggtggaccttccccttgtgctcgacgtagctacacccgggctccttcctgagcccgcgccgcctcatcgccgcccgcaccttcgccacgccgtcgagctgcccggcgtcggcgtagatgttcgccatgagcacgtagtaccccacgttggccggctcgaggctgacgacgcgctcgaaggcctcttctcccatctccacgttcttgtgtatcttgcaggctccgagcagcgcgccccagaccgcgccgtcggccgccatcggcatcgacgcgatgagctcccgtgcttcgtcgagacggccggctcgtccgaggaggtccaccatgcaggtgtagtgctccagtttgggccggaggcagtaatcgcgctccattgttgagaagtacttgcgcccttcgtcgtacatgccggcgtggctgcacgccgacagaaggccgaccatggccacgctgtccggcgcggttgcttccgacaccatcgtctcgaagaggtcgacggcgatgtcgccctgtccgtgcatgccgtacccgatgatcagcgtcgtccacgagacgacgctcctctcgggcatttcgtcgaacagctcctgcgcctgggccaagctgccgcagcgcgcgtggaagttgatgagcgcgttgcagagcggcaggttgtcgcggaagcccgggatt

SEQ ID NO: 13935 - DNA, 606 bp, Oryza sativa
agtgaatatttattttacctagttatatagtacattggttgatggtttttgaccttgtggtttaaactcttattcatatgttattttttttacaggccatgtacaatgacttctcaacctcaaacatccaaattgacaaagatttcactgcaaagctatcaggatatggatgtgttggattcaataccgaggaggaaatatcaaatgcatctgtggtaagttatgttttgaaaatattttagaagatatagttatcagagcccaactcatttgcctgatctctttctgtaaattcaagtagtgtgttttggcatggttaatactctgttcgtttgtatggattctgtgttgcacgccattgatattatttagtcccaaacatcctaatattttgatgtgtttttactttacttgtttgcattatatccatagtggtcaatgccattgtttaccgtggatgctattctttgttaggctgctgcaaacctctcagtggaaaccttggagaaaggtgtactgactcccaagagcaacgtatggtgctttggagttgtcctgctggagctaataacaggaaggaagaaccttgatgtccgttcctcaaaa

SEQ ID NO: 13936 - DNA, 693 bp, Oryza sativa
ttgtaagtctctgtcatacaagaaatctgacctaattgtgggaaccagaccccaacgaccaatctcttcttctaacaatagaacactcagtatcaccaattctgaagataggagaggaactgatgcagctagggcaagagatgacaagttggcagctcttaaagcatataggagatctaaggggttgtgttttacttgtggtgaaagatggggaaaagaacataaatgtgccaccaccattcagttgcatgtagtagaagaacttctggaagctgtgtcagtagaagctgtgtttgaaactgatgatgaaaatgacaccaaggagacacttatggctatatctcagcaagctatgtgggggatagaatccagtaaatcaatcaaattaagggggtggattcagggttttgaattattgatgttaattgattctggcagcactcattcctttgtggatgctagcataggacagaagttatctgggctcaagcaacttgataatcctgttgctgttaagattgctgatggagggactatgcaatgtacacaggaaattcctaactgtaactggtggatgcaaggatacaatttcatcagcaatttcagattgctgtatttggggggttatgatattattctgggaatggactggctagaatcatacagtcccatgcacattgattgggtacacaa

SEQ ID NO: 13937 - DNA, 1721 bp, Oryza sativa
ggcatcaagcttgccaagcgtgtctgagggtagcgggccaaatagccctactgctggtaggcgtagtgttcgcacacggctattgactggtgtgcaagtcaccccaacccatgaagtgcagactggggctgcagagctccagttgagcttcctgccatgtggcagtgaggcagcaaatgcaagaagagcctgcttgtcggagttcagatcagcactcttggcaggaggaatgcatgcaaagaggagagaaacacccagaaaagctgtaagtatatgatcttgcatggttgatgcttgttggaaacaaactggtccaacactagaaaccaatctttcccatcagctcttcactcctctagcatgagaaaaagaaaaagaaagtaaatcaatgtggtgcgtaacagcaagaatatagtaaagtgcaagtagaaagaaggaataaaaggttaggaaacatgaagcataaactctgcccttagatatactttcagcaccaattgccaaatttaaaaaataaatatgctaaaatcttgaagatgaggagcgactgttttgcacagaaaataatctaacactactagagttgaatgaacaagatgcttgctactattaacatctagaagtagtgtttccgtgttgatacttttcatattgggattgtcttagataatttcaaggacaaattcctaggccagctaaccacagcaaatatttataatatatacaagtataactgatatgacctgacaggggtttgacacatcaaattacacaaatggctaaataccagcagtattaggtccaataaacaacgtggatttgtacaatactacaagaattgctttagagtttcagaacagagtttaacagctctctagtttgtagctagccatcacctcagaataaccgctaataattcccatgatcaacacttgatgctgatgcaacctctttctcaggataaaagaaaaaaaaaaggagaaatgctcacagagtgagtcaactctatgcagggcacatcacatttctcaactgctacatggtaatctcccgtcccaaataaaatacacgtggctcatgttctcttcctctagtcaaagccgtaggactcaccatcaggctaatctgctttagtttattttctaaacggggcagttgggatcatctgcatatgacaaaagcaaccacccaaatcacatcacaaggcagctatcaccactcctctcccctgttttaataaaagcacacacccaattatcttaacaagaacttctactaccctttgccactgtgccctaagcaccgcacttacacttaggactgacaaaccatcataaagaaaaacagttgtcagacaactccaagaaactgtttcaacaagaactgccaacgggagatggcaagattcccttgcagccgggcgatctccttaaatgctccagcgcatggcaccgcatcatagatagatatctcacctaacattacatctgcagttctgcacccctcatgcggctgccttcgaaaagaaaccaaatatgctcaccagcagcgcagatactgatgatggttaaggccatggcacaaaagcaaaagctgcgatgcacaatgcgagacaaccaccaccagggaagagaaggaaaggaaagaaagacgatgcctttggacttttggggggggcgaggtgggcgccgggatattcatgggtttcatgagcttaccct

SEQ ID NO: 13938 - DNA, 1518 bp, Oryza sativa
cctggaaaacctggcgggcaagggaggcgccgccgccgccgccgcgcgcgtagacagacacgaggcagttggccacggaagtgttcgcggcgagccccgatcgcgccgcgagggcgtggagctgcggcacgatgcccaggggagcaacggggacgagcgccagcagcgtgacggcgtcgaagcggacgccggcggccacgcgcatgcggcggaagagggagaagcagccggccgggaccccgtggagcgcgcacccggagatgagggagttgaacgcggtgcgcgccgtggcgggcggcgtggacgcgaggggcaattcgtcgaggagctggcgggcgagcgggaggaggcggaggcgggagtaggaggagagcagcgcggagaggaggtaggcgtcggaggacgggaggaggccgcgcttggccgcgagcgcgtgtatctgggcgacgcccgaggcgagatgcagcttggcgcaggagatcaccgccgccgggagcgccagggcgtgcggcggcggcgaggggtcgccgtggcggaggagggcaagggcctccctgtgccggccgaggcgcgtcagggtgcgcacccgcgcgctccatggctcgagggagtcgtcgccgccggcgacggcggcgggggaggctggtgcggaggtggaaggctcggtggccattgccgcccaagagagcgagacgcagacgccacgggtccgcgaccttggagaagcaggcgcgcttgcgcgggcccaacgaatcacatttcggcccaattaaaattaccgcaaccccgtgcctcactttcgtcaaattcctggcccatttggcagagaatgacacaacaacaacccgatccttgattgttctgaatagatatggtagattatctgattattatgtgtgacattgaagtataagcaaattaattaaatactattacaaagtaaaaagcctgtttcaaaatgttttctaagaacttatatatacacacgaacgtactttaggtgatttaggaacttgggaagcatatgctcctgatgatctataatagtatgtacatggtgaaatgtgatagggttaactggatctgcgccaaatgtgatagagagtacagctgtacattttgaaccaacacaaaaaatcgccatgttaacaccatacaattgtatgaatcaaacaaacacactgaaacacacacaaaaagaatgaagaatcgtttacaatttttacaatgcaattgtgtatcaaaattgcaatgccatctgataaaaaggacagggaattaaaaaaaaaatcaaatcaaaagaatgctcagctcagtgttgctctccgtaccgccggctccggaaaaccgagctcaccgtgctgtacccgagcatgcggtggagcggcccttcggccggcgacgccggccatcgctggtcgccgctcaagttgctcctcgcggacgcgtgctcctcccccgcgtcgtcgtcatccagccggcgaacggcgggctgcggcgcggagaatatcttcttgg

SEQ ID NO: 13939 - DNA, 12170 bp, Oryza sativa
ggttttgcaagataaactgtaagatgctgcggcctgtggataatgtgcacactgaaaagagagcacaaaaattggattgcacagatgaaacttacataagcctgagtgtgtggatattccctatctctttcggtatgttaccagtcaagttgttccacatgaaatccctttcaaaagaacaaaatatagcagttaggtaccaaaattttggaaatgtaacaaaagaaaaggcttcacgagactaaatgcacaataagagtcaaccatgcaagaaacaattcctttatgtcccagttattatattatgtaagtttcttctttcttgtgagtcagaattatgtttttttgcttaaaatatactaaatgtagtaccccatgagatacaatattatctttaaattcagttaactattccagctttctatcaagttggtacttacaatgttttcaattgagatagaagaccgatctctggtgccaaagtcccagaaagattcatcttaaataactgcctgcatccagaaaaaagtatgcaatttcaagagaaaaaaaatagcatgatattggcaatccaattatcatattgcacatcatacagaatggacagaagtagataataaacagatatcagaatgcaaaatggatttcattagagaatgatcacggctttgaccaaaacatgaaaatagcaacttaggctaaaagtaactagaggtatgtgtcattgatgatagcgaacacaatgggaacttgaattattttacccagtcaaggctgaggtattcttttttttttcagaaagacgcacgagggctgcgcattttgcattaagaggtagaaaactcatagtacaggtgatgaacctgcttaaagaaaaagagagaaagccagaacctctggctggagctaagacaattatacaaacaacaattgcagagggctcactcaacaagtacttgggaaagaacaaaccaccgttaccactaaaaaaagagggagaagagtaagcgtataaaataataaggttgaaagattatcatacaattctgttacatgaagataattatttattggtatattgtcacagaagactcctttccaacttgatgtgcatggatctccactattccaattcttaagattattcatcggatcaattaatcttcctttgatagctctgagagcatttactgcacataagagggaaacagttcaattcacagcagttttaaaattttaagtatctgagtcaatattactgtttaaactaagcatcacacatctcagcaacaacaaaaaaactaataatgattattcttactttgattgcacagctatcttcagattatctattaaaaaactattcttcagatatttctttggaagaactactgggaagcaaccctttcaaatagttattattctacttctctaacaaagttgttcataccagattaactaacataatgttatgtaattgccaggcaatataatgttatgtaatattgtaagtttacttacaatattgtgaacttctttaatttaaaatctgtaatattatgaacttctttaactctgaattaaaaacatgttatatcatgaactttttaaattaccacatgaatataactgattactggtgtgacaacaattgagtgtgcggcaattgatggcatgaacattgtagaaacggacaattcacaacaggttcagatgggggggacgggatcttcgagatactttcaaaacatagcactacttacaaaaagatatgcttaaatccgcacagatgggatatgcataattgaaactttgaaagcttaaagcccaattctgtcttcctgaactatagaactagtagctattctgagctccggcaattcaaactgcctggctcaaaagtataacagaaagcaagcaagcaaatgcagtacagcacatgtcctactagagattactgtatattaccttcagcagggtcagtgctctgtccccttacgacattcacatgacaaatgcacagaacaaccacgatcactgcgcgccgaaaacctctgaagttcgccatgtctgtacaagagaatcaggagcaagtgatcagcaacttagtcatccctgcacgatccagacatccagcacgcttgctaccattctaaatgatcgattagtccaaaatggaggcgcttatcctacccacagaagactagcatccagtatctaaggtgtgaaagcgtgtcaactccatatgatgcttaacgcgcctgacctaaccatggtgtgttcaaaccaacaaccatggaaaaaatatggcccgggcacaatcaaaatcaactctcctcttgactaaagaaaagtaagcgagcttgcaagttacttaagctcctccacataaggtgaaaacaacctattaacactgacagcaagagccacatcacaaccagcaactgggacttcccaactaagcctgcagactgtacggcacaagagcacagtacacaaggttcaggacttcgagctactaatggttgtcaacgttaggtaaatttttatggcgacaaatatgcccttttccgcataccttctccgtcgaatattttcaccaaaagtaccaaacttttatagcttcaaaggtacagatacaaagaagagaagcgaggagccgaagaagaccaagaagctaggagaacaacgaatagggataaaaaaaaaaatccaagccttcttttttttttggcaaatagcgagaaaactgtaatctgaagtgaaatttcaatccaagaaaagaaaacaacaagatcgaactcacactagaaacaaatcctgaacaaaccaaccgcacaatcctcgaggaatcgaagaagcgaacctgcaatcaaacgcagaccgaccggccgctccaatccgaacagcgatttgcagcagccccccgatcggggagcaccagccgacgaggcgcccggccggagattgccctcaccaacgaactcgggaaaggcaggcgagagcgagcaccgcaccttcacccacagcgacaacccccgcggcgcggggggacatatactactactgctgctgcaacttttcagcccgtgcagctgtcgcattcctcccccaatcccatccgcaccccactccctttcctcctggatcgcggcagctacagcgacgaaggcgaaggcgaggtcgaggcgaagctctgggtgcggtgggttggtgggggaaggttgtgctttggcgaattcggggagttattaatggcggcttctgcttcatgcggcgcgctaaaatactttggattagtaggagagcccccccttggcgccatattttattcagtcaaaattgcatccaggacctcggaggatagagtatttacgcgaataggtccccgtgctcgtgtgaaagaaggaagcgaggaggaaagtagagttgggaaggagtccgccgcggttcaaccatcggcgaccgcattcgcctcgtgcggccggactgagtccggtgatctcctcctctgacaaaccgggcccacaggtcaggtcttattattttttatttttatgagaaaataaatgtattcaatacatcctaaaattttcatctagaatgagatgtaacataatctaagtacaacgaatctaaacagagcttccattaaaattcagttcatatccgttgtactaaattatatcccattttattttaggttgattttttttttgacggatgtagtagaggagagtgacctggcttggttgcttatcatgtttattatacggtgagatgatgcaactgatggttggtacttttctggtggtagtttcgattgttctgtgctttggggggtgttgacggatgcatagtgattattttgtaatttagtagcaattgtctaaaaatcgcacaagagaattgtcatttaagatcatgaatataaaatgattgattgtaaacagccgtcactatcccgtagcagcatcgcaataatttgttcgtagcatcgtacggtggcacagacaaatggaatcaagaacaagcataaagtacaagattatgagattagcttgacagaagcacttgatcaactctctagctaagtctagagttgagctgaaaacgtcctaattctgaattttcctgacagtttcaaatgtagccagtgcccttctgcactagttgagtttatttggaattaaaattacccaaacaaattaagaggtcaaataatttgaccggagacctactcctttacctactttcactatctcataaattactgtgtgtttaccaagctgtgctcgatttgacactgttcatctgtagtatttgacactatccaagtgaaaaataaacgagcagactgcttctccaacaacctgtggaacgacttcactaagaacactacctatgatttcataccgaacaacttgggacttagctgacaaaagtccataatttcatagcaacttgttaattcgtttcgaaaaataccaagttggtaacaagatgatctagaggatatgataacaatgtccacgcggctcattagtaacccccaaaaaacaggggtcgactaacaaaaagtcagagagacaaacacaagctgtagttttcagctccagttgaacgtgaccagagaaaaagaaattgccggccatgatctgttcggctgatatttttttctgggagccatatcgagttgctttctagtacgggtcgcattgatcagtccaagataatgacacttgtgtctgcagggatgacactttgacagatgttgaggctgcacactaaaactgttcccctcctataaccaaaaaaattaggaacattgacataccattaatatactattagaccagtctttttcaatctacggaggctgtgaacagtgtgaccatatgatgacgaactgatgatgtggtcttgttgtgaggctcccatggttttcagaaaacaagactggttgaagtgttctagttccgtgcacagaaattatgacatgtttgtagtgtttaaatttggttctgtattacacttatatgggctagtaacatcttgtgttgaaatgacattacagctgaagtgttggatacgctgcaactagagtacaacaaatgttcagaagaagagtagcttggaagatatttcaaccgtgtagatgtttcatctccctcagacagatgtttcatttcgttttcatggtgcagatttgataacaaccgtgtagaataaaaccaagattataagtcaattttttattaatactcaagatggatacgtctgtgtttcgcagctgcttctggatggcccgggttggttaacttacctcaactgcttaatatcttcggggaaactgatatgcttctgaaacccaactgttcttcagagattagctattccatttttcacttgcgaagcttctttagagaaaaaaaattgttcacttgcctatgatccatggcacggtatcttcactgattggtacatacaaccaacacaacgcgactaacctgcgactaacataagattggagtgcttaatcactttaaatctgtcaaagagcacgcgagtttgactgcagattgcagcttcacaccgacgacggtaaaaagtgcagactttaccagttttgtaagtggatttggggcatctatctttcgcctcttcaccttttcttgtagtgagatacgcgatgatcttgcatattctcagcaacagaaaaaaggcagtaaaatataacacttgtcctccaaattgggtgatacagccaagaggaaacggttctgaagatgattatactaatcctgatgtggtgatgatatggtcagatcaatgtcaccattagaaagtagctaggaaattgaaggtagggaacagaggaagattgtggctggattacttttaaacgtcgacgacaccggtgggtctgatgctgatgttctgctcatatttttgctggcattatcataatagagcagttactgctaaaccgctggtatatagctgaatgggatcatcccagtgcaacagcagttcacacttgccatgcccattgcaatctgcaagttagtagctgtagctttcagttaagaggaatcatattataaccttttaaatgcttgatttaaacggcaaaccaagtgctagtttacacaggcataggattttgtacttctgatgatctgacacggatgcgtcaaaaaaaaaaagatctgacacggacagctgggatattcagatgttcatcaacacagtacgtgcacattaggacaaagtattcagatatatgtggcaatgggttttgcattggattctctctctactttgtaacacagagcaagtgttctgttttcagaggttaaatgctacatggacatgcttctctctaagataatcacaagttctgatatggccacctatcgcaaagccaattgagatgaacatgtcaacaggccaaaaaaaaaaaagaagaaccggaatgaataggattccattaatcacaagtctaaggtttgcctttacaaatatctgatgatatcagtgagtttaaggattgcaccttagctgtcagcagagacaacgtaatgtcgccaatgcctctctgaatcgaagcctgaaacgagtgctctgacaggcccctggttctggagctcttccaagttcactctacaaaataatcacctttcttcccctcaaagaaataataataatcacctttctaatatcgccctatgagtttcaatcaagaacacaacgcagaagttcagtgagaaaaatgatgaaaaggatggtacgaggttgcattgccccatcccagcgtgtactcggactagacggagcttcaggtcgtcttcttgcacggcggctgctcttcggttcttcttgctgaggtcactattggaagcggcggcgaggtgcaaatctaagccataatcgcagccgccggcggccaggggggagggggacagtgcgccggcgaggcggcgacgagaccggcggcggctcagagggcggcgcggccggctaggtcgcaaccagtggtcgcgatcacgagccgttcgattagcattgggcggttatgatagaggcggaattcatgtggtttccagataccgttttgcaagaagacccctcgtattgttcgctatatcaagtacatccttgtttcaaatagaaaacagaaaaacgaagtacatttcgagtcttggattgctaccaagggtagcgattctagaccgttagatcaatgttgagcggatatgattgagggggaattggatgtggtgtaggtgggcactttttttttgcaaagcactaccattatatggtttgccttctttttatacagttctactctctcatagaatgagttgtatattcttttttaagaagcatgaatagttatatattagtaattatgatagtttgttttacggtaaatctagtcatcaatctttatgattttgctgacagtcaaagtgttgatttaattacaatttaacatttatatttgtggacagaagaagtagcttggaatggtatcccatattgttcacactggcatatactataatttgtaagtcgataactgtacctttcaccttttactattttaggaataattaggcctttaaacagttaagtaaacagaaaaccctatagcatgtgctacattacacaagcacatgatctttacctctggtctgagagaccgagacagatgagatataaagtgatttttgggaagcatttcaagaaacagtaagtagctagcttcaaaaattttggagaagctaggaaacttagcttttgacttctagtttttattttattttatttattctgtataatctgaatgaaaacaaataaatcgtttgtttgaggtagcttttgttacctgaagcaccgcaaacagacctttccaccaaaacagatgagattttgacaatccatgaccaacattctaggacgccaatcacttcacagttcacaatggagcaatagtgtttcaacacaatcagatgtttgaggggagcttgagaaaaaggaggatacacgttctagaagttactacatgttagggaatgaagatgtagaagaggaagatgtttttgtacgataaactcctggaactacaactcttgttcctccacctgaactcccttgggccaaaagcttttggtgggatgccgtaccggcccaatctgcaacctttgtggagtacttaacaccatgcttatctctgttgaaaggaatgtgatttaagcaataattatgacctgataaatttccctcaaaaagaaaaatatgacctgattgaataaaattctattcaccagctcaatatagcaagaaacttagcatggttggtaatggtgcaattcgaagagtctatggtttttgttatacatatgcttacaaattttgtatttgtaaacttaattttggagtcgattttattatttttttaaaaaacagtactattactatataaaagtgattaatgttactaataaacggctataagcgaaataatgattcccggttcatccgaacggaaggtccacagtccaaacgtacgacgagctgggcagagggaaacgcagctgccgttaccttgtcaccctcaggcagagggaaacgctagctggccagtggccacgcatggcatgggttcatcccgggagtaagagtaactagggtcggaccaccgggccccgggccgggtggcacgcatgtaaactcgcgataagatgtatatcgatcataagatgcaacggcatgcatgtgacagcgtatgcgtgctgcgaccacgacgaatgttcatgtgtgccactagcggattgctcgaatgcatcaatgcgtgtcaactcgatcgagctatagctacatatccgtgcttcacgagagggcgctgagccctagtaaatgaaagcccgatcgatcgatcccgccattactaaccattacaaccggtcgttgctcttacctgccctgctcttaataaaagccttaattgattaactaactaaccccaacgaacttacgaacgtacgcacaaaactgtagcgtccccgtcctgtacatgtgtgcgcgatagataaacagccgcatgcatatatatacgtccaatattttctcgtttagttcttcgggctaattaagcgctgtacgataacgttcgcctccgtgtacatgaaaactcgccgcgacgctgggcgacgccgacgcatgcgggatacgacgacgacgacccatcataagctaactgagtactagtacgtgtctcgtgacgcggcagctaccgatttcgatcgatcgccaccggccaactaccgtgcgtcggtgcgtgcaatgcgtatacgtgccctgccgactcgctcgcttcggttcagccgtggacacgcggccatgcggctatccaaccagatgcgctgatgtacaaacacgtactccctcctaaaaaaaaaaaaagtttccgtgcccaatatttaaccgtacgtcttatttaaaaaaattataaaaaattaaaaaaacaagtcacgcataaaatattaattatgttttatcatgtaacaacaataaaaacacgaattataaaataaaattatatcagatggacagtcaaagttggacacggaaattcagggtttgcttttttttttacggagtaaagcgcaagcctaccaaatgcaaaatttacgacatgagaacctgtgttcgtttaattagttgaacaatcaagtcatgcaaagcaaccgaacttagtacatttttgttgcgtggggaccaatgctttagggcgtaatcatccatactcacgaaggaaatcgttctggacaacgacacgtctctaaaacataacttttaacttcttgtttctataaaaatatttattgaaaagtgatatatatatatatatatatatatatatatatgcttttataaaaatatcttttaagataaatctattcatataacttttacatatattttcaaactcaacaacttaaaagttatttatgatttatatttttaagatttgaattaaatattgtcctaaacgattttcttcgtgagtacggagatactgctaacctaaacaaccgagcgaatcatctttgactaatcatcgccaccagataatggcaaaccttgaatctttagattttgggagtttttgaccgtgagaacacctgagcccggccgctcggaccagcgatctgatctatacaatggttgttaatagtgggttttttagcgttgttaattataaatacttgttgatatggaggaaagagaaaaaggagagacaaaacatcgttgttatgcatgacaacagcttaacaacgactcttagtcactataatatagaaatatggttgcatgaggatataaatataaaaagaatattaataaaagaaatattttttgagttaatgattagagcctttatcgtctcaactattataaaaacatggtctctaaaatcttgtattatttaagagaccatacccgtctctaccattgaacatgccctaatctaccccaacatcccaactttgaccgggcctcgatgctacggcacgtgggcccacccactgacaagtgggccccaccatgacgttatctccttcaccactccccctcgcgatgcgacacgtcgagcccgacacgtctcctctatccgagcaacgacgccgccgacttttccagacttaccgcctattctaatcccccacacctcccacctctcgcccactgacggccgggcccacacgggcggtgggcccacgtgtaagaaaaaatcgcgtgaaggtcacggggggcccggtgtttttaccgcccagcgtttcgaaagcgaaagggacaaaattgggaaaaaaaaagaaagaaagaaagaaagaggagaaaatttcacgccgcggctcacacgcattcctcttcttccctcctcttctctccccgcctcctcgcggtgtctgcctctctctctcgcgcgcgcagcctaccgccacaagcaaagtccaggagggctcgggcacggaagcttctggaagcttccgcgttggcgtgaggaaggaggcggaggggaggggagggggactgacctactccctcaccgcggtcgttccaagtcccgcgccgccggggattcccatcccctctcgcggcgcgccgcttcgacgggaggtagggagggtaggagcaagagcaacagagtgatgtcgagttcgggtggcttgcggttgttatcggtctcatccggttttgcggttgcaggcatcgtcgtatcgcatcgatctggtttggggggttttgggagtctgaagtggtgggtttgagatggaggacttgctggacacggagatcgggaagcatgactacgactggtaattgactggtttctccttacttatttggttttctgaattttgcgtcgatttcatgtttgctgcaattggtgaacccgttgtgctaagttgggtaagccgtttctctaatttggagtagctggtggcaatgccgcgtttgaaatttattttgggggcgttttattggttaaacttggacgacgttatacttatcgtgcttgtggttaggtgaatgaatggtgcttgtttatccgaggaatcagtggtgtcatcccagggaaatcatgatttggtgtatttaggttgagttctgctgactgcgattgtttccggttttaagattggccatgtacggatgctacttggtttagttagggaattagtttcgttgacagcaaagacaagtaggtgactgtattgtttggtctgtgggctccttcctagcttgaagagcaaagcgttggatctcaagtaatgtcttctctatattggaaagggaaaaaaattcggcaggcaaatagcattgctaactttaggatgttttatactggctcgtattataggataatttcaatagttcaaatgaattctataactcttttgtgaaatttctgaaactgaattacaccagcacccagccacccactgggaattacaatgaccagacattttaattgcaagtttagttgaaataactactgttacactttagttgactttcatcacattccactattgtggtgataaggccgatttggatgtcacgtctatgggcttgccacaaaacgggagtgc

SEQ ID NO: 13940 - DNA, 3310 bp, Oryza sativa
gccggaaaaggaaaggagcggccggattggaaagcgggggcggcggcgactaaactagggtttcggccggaggaggacgacgatcccgacaggtgggacccacctgtcagcgaccgaacgcgcgcgcgcgcggctgcggactgggccggctgggccgaggagagagagaagggttttgggccgactttcggcccaaagccaaaagaagactttttaaaacctttttcaatttaaattatttcttaaatgcaattccatttattaaaaatactttcttagctcaaataaatcccagaaaaatctaggaattatagaattaagcaaagtatttaatgaaattttatctggccccattttatattggaatttattaattaaacttagatcttctcttcaagacttttaaaataaattctagaaattccaattaaacaacaatttatatattttgaattttcagggtgtgacaaacctacccccttaaacagaatctcgtcctcgagattcggaagaactggcgaacagatgcggatgagctgacttcaattcatcttctcgttcccaagttgactcttcttccgagtgattactccactggactttgcaaaaacggaaaactcgattcctggttcttctctcatttgtttccaagatacggattggtttttcaacataggtcagatcctcttggacttctatctgttcaagattagcttcttcggtaggtacccttaaacacttcttcaattgcgacacatggaacacattatggactcctgccaaagattgaggtaactccaactgataagcaacctctcctcttctactgacaatcttataaggtcccacaaaacgcggtgccaattttcctttggtgtggaaacgatgaacacctcgaaaaggcgtgacacgaagatacacgtaatctccttcttcaaaactcaaatctctacggcgattatcggcataactcttatgacgagattgagccactcgcaatctttcttgaatgatctttaccttttcttctgcttcccttaggatatccgtcccgaaaatctgacgttctcccgtttgatcccacaaaagcggagtgcggcacttccgaccatacagtgcttcgtaaggagccatctgaagactagcttgataactgttattgtacgaaaattctgcatagggtaaattcttatcccaacttccaccgaagtctaaagcacaagctctcaacatgtcttccaaaatctgattcaccctttcggtttgtccgtctatctgcggatgataagcagtactaaaattcagcttagaacccatctcttcctgaagtttcttccaaaaatttgaagtaaactaactgcctcgatcagacactatcttcttaggaacgccatgcaaacacacaatccttgccatatacaattccgccaagcgacttccagaataggttgtttttaccggaataaaatgagccactttggtaagtctgtcgactatcacccaaatagaatcatggcctgatgatgttctgggtaaaccagtgataaaatccataccaatttcttcccatttccattcaggaatcttcaaaggctgcaacaaaccggcaggtttctgatgttctgccttgactcgctgacaaacatcacatactgctacgtattctgcgatttcacgcttcatacttgcccaccaaaatctttccttgagatcctggtacatcttagtactaccagggtgaatggagtataaagtatcatgagcttctttcagaattgcatcttttaaatctttgttgtcggggacacaaattctctcacccaaccatacagttccttgctcatcttccaagaaaccgatagcttttcctcttctcatattcttcttgatctattgaatatcaggatcattaatttgggcttctctaacttgatcaattagagtgggcttcgcttctaaggctgcaacgaaacctctactgacaattcccaaatttaatctttcaaattccttgcataattccaatggcaactgtcgtccgtctgtagcattgcaatagccttttctgctaagagcgtctgctacaacattagcctttcctgggtgataatgaattcccatgtcataatccttaattaattccaaccatctccgttgtctcatgttcagatccggctgagtaaagatatactttaaactcttgtgatcggtgtacacctctgtacgagtaccgaaaagataatgacgccaaattttcaacgcatgaactactgcagctaactcaagatcatgagtagggtagttcttctcatgcggacgtaactgacgagatgcataggcaaccaccttcccatcttgcatcagaacacaacctaacccaagtttggatgcatcgcaatacacctggaaacccttctttggatcaggtaaaatcaaaataggagctgatattaagcgactcttcaactcttgaaaactctgctcacattcttccgaccacttgtacttcacatctttctgaagcaatcgtgtcatgggcttagcaatcttagagaaattctctataaaccttcgataatatcctgcgaggcctaggaaactgcgaatctctgaaactgtctttggttgcttccaattagttacggattccacattactaggatcgacggcaactcctcctgctgagatgacgtgaccaaggaatttcacttcagacaaccaaaattcacacttgctaaacttagcatacagttgatgttctcgtagcttctccaatgcaaggcgaagatgttcttcatgctcttctttggttcgagagtagataagaatatcatcaataaagaccaccacaaacttgtctaggtattccataaacaccttattcatcaaattcatgaagaaagcaggggcattggtaagtccaaaagacataacagtacattcgaacaacccatacctagtggtaaaagctgtcttagatatatcttcctctttgattctcaactggtgataccctgatcgaagatctatcttggagaaaacagtggcacctttaagctgatcaaacaaatcatcaattctgggtagcggatacttattcttgatagtcacatcatttaatgcacgataatccacacacattctctgggtatggtctttcttttccacaaaaataactggagctccccatggtgacgaacttggtctgatgtatcctttctgtagcaaatcatctacttgcctcttgacttctgccaactcattggctgccattctataaggtctcttatggatcggagttgggctgcag

SEQ ID NO: 13941 - DNA, 2391 bp, Oryza sativa
aaaaatttagggtttgtctttttttttaagcaagtaggggtgtccgtttctcgggatttgtggagggttgacggatctgcccctgaggtgaggaggctgagagtgaccgaccgacgtcgacgtcgacgacgacgacgagatcagccgctgctgcccctgcctggctggtggtggtgccctgcagggcattgactcagatacatatgggtcccacttgccggtgaagtggtgtatggtacgaacatcgttgaccaagcattacgtgatattagtccctcgaacgctaactgaaaacgaaaacgcagtgcatacgacttgctccctccgtgaactgtattaagatctaagtgtgattgctaactaatggtgagttgggtctggagtggagttgtggagtagcctaaacccagccacatctctctagtttattttgtgagcttcacccagttccgcttctattttaggtggtgttggaactcttttactaggcttcgctacaggaaagatgaaactagagttagagccattccaaataggcctctagttattagatccaatacttacgggatgccatgtctaacatcatatgtacccatggtaacatcagcatgatatctaaatactagatctaatatctacggggtattatatctattattgtgttgagttgtgatccaaattcatttgcatataataaaggccagcttctgttggagcgaaacggaggcccgtcgttgccgtagacttggaccgaagcgaagcggaggctgaagctggcccattgggttaaccaaataacgttatgcacctggggacacccgggggtgtgggagcggagcctccgcggtacagatcgttatccttttaaggtttcaccttcatatagacctcttgtaagtcgccgttcagcgttgtaatctcaccctgatacagtgaagatattttgctggctagcgcacgtggttttttctctcctgttgtgggagggttttccacgtaaaatcttgtcttctgttattgatttattgttttttatcatttatttgcctatcgtttcttaacattattaaaggtaatataggacctgttcactttgatatcatttttaaccataccattttttagattagatgccaaaaaatatctacgtttagtttgttgccaaatttattaaatacataagaaatcctgccaaaaattttggtattatcaaaatttggtaaggcttattttagctacattctgaacatgcccatagtatttgtgacccgttctaacgcactggcacatgcttggagagtggcggaatcaacttctgattcttggctagctcaccgttcatgaacacttcagcaatggtttatcagccgcaataattgaaacatcagcagtaattgagcaatggctttttttttatattccattatctaaaaaaaaatctaatcagccattgtatggcctccggtctgcattacatatgccggccagtacatattgtacatttttgtaccgtcggacaattcaagccactgtacactggtacgtcattcctgttgcacaaatcgcgtttgatcaatgcaacacaacgacacacgcattgctcgtttgctcctaccgccttttggatctgtagctgagctcctaccgagtgagcttaatttcagccatttgagcacggcagaataaaacgcatccactagggccgtgcttagttttccccatatttccaactttccatcatatcatatcacatcaaaaactttcctacacacataaatttttaattttgttttcaaactcctaactttcttcaaacttccggctttttttcaagaactaaacacacctagacaaagcggcagagcctgcgcccgagttggtcgggcaaccactcaggcttagctagtagcagatcagaatcctttgctcaacccaaagattatcaggttcacatgtcagtgatgaaggcacgatgcagttcactatagaggatctcaatccactagtagcctagctaatactgatatttattgtcaattttcgaaaatccttatgaaatgttgctgagattcggaaatagtcttttatcatctgaactcagttgtcgttggttctgccggccacttacaggtgttcatccttttcgggtggtttgtgtatcaaccgcagtgatttttttttcactgacagtcttgctgaggttctcgtgtgaaccagctgggttccatgccatattgtcaatttgtcacctgctaccgtattgaccgtctagccagagaacagcgtaccaattggcgcattctttgatttcttcccccttttcatcttgagcacagttattgctgggaatcatagaagcctacttcaacaaatcaagtgatttaccatcac

SEQ ID NO: 13942 - DNA, 997 bp, Oryza sativa
cataggatggacgattcacagggagtgtttaaagagatcattgacaaggacgttgttgcttacacttcgatgatcactggttattcagaaattgtggattcagttgcatggaatgcatttgatattgccattgatatgctgcagggcaacttggaagtaaaccgtgtgactatgataagcttactgcaaatagctgggaatttgggagcacttaaagagggcaaatcactccattgctattccataaggagagcacttgttgtctcagattatattctagagacctgcattgtgaacttgtatactcgatgtggagcttatcaatcagcagttgctactttacagaattcaaagggaactgcagcttcatggaatgctatgctttctggtcttactagagctggacagagttttgatgcaatccactatttgtctgtgatgctgcatgagcataaaataactccagattctgtcaccttcgcaaacgtgatttctgcttgtgttgaggtatgctatttcggctatgctgctagtattcatacctacttaataagaagatatatacctctggatgttgttttggcgactgctcttgttaaggtgtactccaaatgcaaaaaaatcacgatatcaagacatctctttaatcaactgattgttaaagatgcagtctcctataatgcaatgatgtacggttacctacataacggcatggccaatgaggccacctccttactcaattacatgatggcagaaggtattgttccagattttgcaactgttcttagtctgcttgctgcttttgctgatcaaagagatttagtgagagggaggtggatccatggatttgggattaggcatgggttttgttcggatggtgacgttgaaaatcatattctttatatgtactcagtttgcggaaaacctgcagcagcaagggttatatttgatttactggaacagaaaagcttggtttcatggacagggctgcaggaat

SEQ ID NO: 13943 - DNA, 2410 bp, Oryza sativa
aatgacaaaagcccttgtatggcaactgctgaactcccagaagaccatccaggttcaaataaagttgagaatagtgtaagtgggaagcaggccgcatcgaatgcctcagtgaaaatcttgccactgagattgtcaccagctatgtccaagaaggctttaaacgctgatagatggaactgtacctcttggtgagtgctgcagtttgctttgtaacactctgtatcttcagaacaacgatgcagatgaatgcactgcaatgcccattctataaacttctgcactttggcacctgcctcaatttgtaaacgttcaccaccaggacaatcttgtagacgatcatgtaatctaaatttgaaaaccaaaagaactaacatcaacaatgatggtaaacagaatatcgtggaagaaacagtatgcaatttgtggttacctctgagctatgatttccttgctatcacctaaagtaagcgccttgctttggcaggcaacgacacaagatgcgagcaatgaagtcctgaggattgccctggcaaaatccttcgcccctgattctacaatcttacctatcagatggttgagaccttgaagatcctgctccgtccgcaagaaccaaatggcatcaagagcaacggacaaaccataatccagcattaactgatggtctgctagagcaacaaggctttcagcgagaccccactgccgcgagaacaaaaccaactgcagcgaatgcccaaaatcaatctgtccatgctcatctatcctctggtttggcatgcaaccatttgattcttcaacagggccattgccatgaacatggctggcactgcattcctggtcatccttgagcacaaggctagcctggccatgctctgcacagtgtgccggagtgccatggcagctaagttcatcagcttctacttcagtgaacactgcattgtccaaaggcatcacctttgcagggatagctagttgcttgccatgctctaccattttctaatttgcttctccaatcaaaccattatattatgtcctagcaagaatattcggatactccctaaagatcaagcagaaaaacaccgatttaacaaccaatctattagcttgaagaatcacttaatccaagatgctaaacagggggacaaaaggatccaaaatttagcgtttactgcacatcacatataaccataaaactaataaacttctagtggaggctggaaatacgaacaaaaagatttcaaggattagagctacagataaatcaaaatccgattgacaagcaatttgtggggggtcaccatatgagatcaaatgttgcatttggtatttggtaagatcatcagaccacacggataccgacgaagcaacagccaaccaagagatgatatccccacaggtacgaaaacttgaaaatttgtatttccagaagagttttaataagaaaacaaactcgaaagaccaactctcaactaggaacccaacctttttaactcagaaaatttcggattcctactcggcctttacaaggggctcttatgaattcaagcaataaataaatatctacctccagatcgaatttcctaataatctcaatatgtggaaactaaattcaatctaaaattcctttaaaagtagaagctcaacctaacaaccctcttaagattttcagatgattaacaagaataaaaaaactcaggactatgcactattggatggatcaagacccttcacctgggcgttccaaaaccgcgcctcaccgcgctcgccgccatcgagacgacgggcggaggcgccggtgccggcgcgacccggggaatcggcggccgggcaggaccgcgggtgaagtggaatcccgggccgccgccgccgccgccgccgcgtggaatcggggaaaggatttggctcggattttgggggagaaacggaggaggagggggaggagggttgggtgggtgcgccgcacgtgcggcgagcggaggaagaagaagacgacgcacgcgagggagaggggggaggggagacgagacgatctccaattctgcagcgagagagagagagagagagatcggacggccctggtcgatttccacgggaatcggacggcggcggtggccaagtgggttgcggagacgcggcagtacattcggatgcgatcgtttctttctgagatgcttatacccaactactacgtccgtcctaaaataaataagtgtagccgtgaatatccgtgtccaacgtttgactgttcatcttatttaaaaaaattatgaatttttttttaaaaaattagtcacacataaagtattattcatgttttattatcatctaataacaacaaaaatactaatcataaaaaaatttcaaatagacgaaacaatcaaatgttggatatgaacagtataaaactacactt

SEQ ID NO: 13944 - DNA, 5610 bp, Oryza sativa
atattggcctcaatagttcatgtagtacaatgtttatgagttgtttccaagttaatagtcattttagataggtattatcatttataatagatcgtggaataacatacatgcataagcaaaatcatttacaaacaacatgaaaactaatgtggaaattgacatacttatcataattcccaccgaaagaaagaaaaaacaactagcaaaaatgttagtattggcattgtcatcaatatgcttagattagtcttgcagtcccttgctgaactgactttgttggtgggcttgtcatttgaacttcaccaacattcgattcgtcaaccggtgagtcaccaacattttgtgttcttgctgctcttgcattacgccttctagcattttgagcccaattggcaagtccttcgaccacattctcatcaaatattacttttttgaatgaagttcccatcttcaagttggacaaaagaaattagtaccataaaacattaagaaaaatagctagataagtatcgtgtaaaggatatgatgtcattaatatgtgagaagatcacaatttgaaaaggacaatttatatcattgatatagtttattaatgtttcattaccagctttcatgtccatcaagagaaatagtttactttctaggaaaattagttttaacatttaatctactaattgaagaatctaatcatattatcaaaatatgtttcttaaaaaactcacatgagagacaatagcgtagagagggagggtgctatagccgcatagaagttgactgatgacactgaaagcatagaaacaattgtgagttttccaactgaaaaaaaatgattttcctagaacaaaatctaaatatggcaataagtttcatctatacccacaatatgccactctttgtgaggatggcatgtgggcattagcccacctattgataggatatcgatggcatattgtaaacatcaatgaaactaaatgttgtacatcttactaggatagttatttttttttcttaccttatgaccaatcgagcaataacatatcctttatttcccataatgcatgatttgaatccatatgtaacctgaatgtgttgacagatttttagatttcatctcacctcacctcacacacttgataaaaaaaagatagtaggctaaataaacgtaggattcacaaattttataaatttgaatcaaatataaagtatcatgtgatagttttcaaatagctaaaatttgaaattttgaacgagtggaattttgtgcaaattgtattagacatgtaattagcttgcgtactatgctattaatcatgtaaatgtttactattatttaataaaaatagttaatatttttacaagctagcaatggacatctaaggatatgttttatgcatggaattcatttgccaggatatttccctaaaactttgagtcattttatgttgttcttaccagaagccaaaagaaaaatgcaatttcaaatgcattttggaacaagacaatgtggatcaacaagaggactatttttggtcggtggaaccaaaatagctcatctgatggggatactacgagctccccttcaatcgctgtatgtttttcagcaacctgatgggctagctcagtaataatgtgctccaatttagtcccaaccacaagtagcatctgaaaaaaaaacaaatctaatgtttatttttactaaaacaatcctgctttgtaaacatggaaaatcatatgtatgcctataatcaatatttctactaaacataggtagcaacataattcgtaggaatgcttgcatttaatctagggataacataaatgttaatgtgcggatgaattgttataataaatgttgtacttacaacaaatgggactgccgatatccagatatagacataccatcctagacatatccatatgtaacaaaagaatattgtcagttttttcacatagtacaaatatttaaagcataaaagaattgagcaaattacataaagaagcttgactagtgttttacacaaatgtaaaagatcaatggtttgagccatgatagaacaaaagaagatgcccgagtttgaaaagttttgtgtagaaaccacaccttgaacattaagcagcaagaatattatcaacatagcccaaaggtaccaactgcatttaattagcatatatgttaattagtttctacataaaattctatcgaaggattataaataactagtacttgtgtgcaacctaaatctttatccattagttacttacctaatgcctacaactttcttgaaatcatcctccagtgctctaatcatgtatttgtaaaagttgaatttaggattgcccctgcaatgtttctgttatataaaaaaaaattactgatgtaagacaatatgcctaaagaaacaaattagatatcccacttttcaaacgtaaaagttcgaattaccataatgaagccaagccgcatggttacatagtcctcctcagtaaccgacccatagaattgttttaagaacgagcgctatatgatggaaaataaattagtttgttctctatcacaattcacacaataatacatatcaaactatttctaaaaatctacttctaagtttttaatattgtttttgtgaattgtatgttagtgattcatacaccaaaaatttgtattgtatactaagttgtccattaattagtattggcattttaaaaaaaaatcttaccagccaaccaaatgttttccaccttttgccgtgtcctttaaaatgatttttgataaatgggaattcttgcacatgtttgatcatttggggacctgaaagtttcattccaataatccatctgtaagcaaatggtaatggatcgatctttacttgcccaatggagaatgttctttcatcataccattttcatcacttgcttggatcttgttctcccaatgttgccatttccttgtctagatgataatgcacaaaatgtttagcaaaagcatgacacctattaacaaaaagatgtaagaataacttgatttccaatacctgtgcgattcctagaagaactgtaacagcacttagaaccacatgggagaccgctaatacgaagataaatatgtgtaattgatgaatggcttcaactgaaagtattggaactaaaccctgtgtaatatagtaataattagtttcggcaagaaggtaacatgaatgtgcaaaatagatagaagataagcacaacaaaatgcagcatgatagtgtgttactaagatgagaggggagtagcatattgaaatgtgttgtggtttgctttcattttatacaatggaacacgaagtaaaagaagcataactacataaacttggtactccctccttcccaaattgatcattaaaaatacaattcaaaatttctcaaattaatcatcatataaccgcatggatacggatttcatcagaatttaattaatgcaacatgggagaatgtgtgaatgctaagttgtactaattggtaggatgttttaatcgatgcatgcattgtgagagaatgtgtgtatgatgtcttgattgatgtgatttaaattatccttggtcttggtgcataaacatatatatatattatgatcattttgagaaggagggagtactaattaaaaaaaaataacaatatgtatgatggatgcaccatggtacttgttctaagttgtaacaacaatattgtgcacagctcggcgtcctacaaacaatagagtaaaaaaggacacctctagttctcgttccttgtgtttggttaacgaacttgaaacgctggacacgatgtatagatgcaaccctccctcgtttaccgtttacccattcttcatgataatttgttcggatattgtacttgaacgaaaaagaaaaagagaagaaaattttatccattcgctgatttgtgtaagtctcaacagtttcgagttaattaatttgtggcatttctaggaaagcggcatgatgagagtcaaacaaattaaaggcaaatcaaattaaatagtcctaactactactagtacctttttctcgcagtagtcagacttggcccctcctccggcgaggagcctcctcacgccggcggcggccaagtgcgcggtggtcttggccgtcttggcgccgctgaagtcgagcttgcacggctgcaggtggtccatgacgctcgccttcacgcatatcttctgcgtcagcccctggaacacgttcagcagcagcgagatgaaccccagcagcatcagctctgcacatcagccacggttaattttcagtcgatttcatccttaattcgcttgctagacaattcttgttttcttttctcatggagatgatgagattagttttgagctcaccttctttgaccttgaggagtccctcgtagagcggcttcttgcggctcttcttcaacctctgctcagagacggagacagagattatttatagctcgtgtcggatcgatcgccatggcggcattagctcgaacacactagctacgtacgacgaagagcagcgacgtatatataccttgcccaggcggtggagcaggcgctcgaagagcagcgagatgatgacgatgacgaagcagacggcggagacgatccacgtcggtgtgtgctccagcgttatcgccggcgcttcgccgccgcccgccgccgccttccctccccctccggccatggccgccgcgcaatcagcctctcacaggctcaccaacttcttctccttcttcccgcgagaatgtcaaactcaaactgggaagtaaatagtgcacggaggtggaggagaacgtgcacgccgccgcgtagagagtgcggggagagaaatttttatagcggagtgggagattgaccaagcgcgttggcgttggtggaggaagaagaagaagaaggagaagtggactgacgggttaattaggacaaattatagcggggaaatttaattaattaggtgcagcagaagcgatcaaaaactgttgcgacggcaaagagaactttggacacgctccttgtccttggaaccaagtagctgggtcagcagctcagcgtagcagctaaattcatgtgttcaacaaacaaccccccgtctgaattgggaatttcaacaaatggcagcttcatgttttctgggacggagggagtatctttttatgttattttgattttatgacaattattcaacaccgaattcatattaattagattctagtggttttaaacattgactcgatcgaccacacatcacagcaagagtacacatacacatggtcgcccaaaaagaaattaagaagcatctcgagggcttcgtgctacgatccatatatccaccgggacactagctagctaattgcaaaaacgtgggtcaccatctcttcatgaaggtgcagctagctagcgtcctgctaattgtcctttttaataaagcagctagttaaggttgaatgttattggggttggttagagtgtctacggtccttgtttgaattatttttctagtttatcatctctaacatcaccttgttgtgattattattaattattcgctttgtttttgttatcttccttttctgcccatgcatgtgagcattcagaagtcatcgagga

SEQ ID NO: 13945 - DNA, 5887 bp, Oryza sativa
actcagggtagtactgtggtccataccgttgggtggggcttggggcttgagtgctcggtttgtgtcactgccccagctgatagcaaaaactttcagctccctgcattcgtgtctctgactcttttgttatgtgatacacgatggcaattttccgatttcgtttgggcacctttaagctccatatgcattaaagtgtcttggcctaacttatttttacaactgatgctaagcactgtatgaggcattggggttgtagatataatttctcccaaaatcaagagaacatagatgtagccatgggttatttgtatcataaaatggcattaacgaactacaattttgttgcattgagccatcttgaagttcaattagtctgtatctgtcatattgctgccatgatctattgttgatctgtcctaatccatttgtttggtatgctgaattagaacttgaaaaatgtgaaatctttatatggtaggagtgagtgcaggctgcctcagaaatgctatgcaaaattttccaaggttaaccatcaacattttgttgaattaaaaggcaatgatctcacaaccatgtaagatactaaaagagtaaatgtaatgattgctgagtggttgggatttggggaaaaaaaactataacagacgctaaattttttttgtgtatatccttgaaattgcaaaaatatgtttgtatcttagttgctcgatttagaggttgctcacttaacaaatgacacatattgcagtgtcattgtggaagctcttaaggtggatagtttgcagaagctttgttcatcactggagccaattcttcgtagagttgtgagtaaaagaactcatagcattggatgttagacatttcttttctatagagatcatacattatttctttgttgatcaatctaattcattatattctggaataggtaagcgaagaggtagagcgtgctttagccaagttgggtcctgccagaattcagggaaggtacaagatcactgtaaaacttgcttgttgtggtgatacttttggatgtgtctatgtgaatttcagttttttctacagttatggtttgagcacaacgaaaaacttaatacaataacattatacctattggaaacaggtcctctccaaaaagaattgaaggacctgatgggagaaatcttcagcttaaatttacaactagattatctctaccactgtttactggtggaaaagtagaaggtgagcagggggcagcaatacatgttgttctgctagatgcgaacactggggttgctgttacttcagggcctgaatcgtgtgcaaaactggatgttcttgtgcttgagggtgacttcaacaacgaggaagatgaggattggacggaagaggagtttgagagtcacattgtcaaggagcgtgaagggaagagacctcttttgacaggtgaccttcaggtgacccttaaagaaggtgttggaaccataggggagcttattttcactgataactccagctggataagaagcagaaaattcaggcttgggctgagggttgccccagggtcttttgaaggtattcgtgttagggaggcgaagacagaagcttttactgttaaggatcacagaggggaatgtatgtttgcaatgagttattgttttactcatactgctagatgatttgaatgttactcgttaaccatatttctattgtatcttgcagtgtacaaaaagcactatccacctgccctaaaggatgatgtttggagattagaaaagattggcaaggatggtgcattccacaagaagttaaatgcaagtgggatttatacagttgaagattttctccagcttcttgtcaaggatcagcagaggttacggagtgtaagttctacaattgttgttaataggttgtaattaatgtagtttaattgatgatcaaatacctcttttttcttttagattcttggcagtggaatgtcaaataagatgtgggaaagccttgttgagcatgcaaagacttgtgtcttaagtggaaagcactatgtatattatgctattgactcaagaaatgtcggtgcaatattcaataacatctatgagttcactggtttgattgctgacgaccagttcatttcagcagaaaatctcactgacaaccagaaggttggcatcttacttatctctttctttgttttaaagttaaaaatgcagtatcttataaatttataattttgaagtgttgtatagctgatttttggcatattaggcatgttgccacatgacactgtaaacttatgttgctgtgctgttggcagtaatgtatcaatgcacaggtctgcgtcctgcatgttcaccttgcattcagagccctatagtaatatacataaatctgtggtgcttcataactagtttttgatatcacgtttccagtggttgccacaatagaatatgcaatttgttataaattatgtgcctcttgaaggaaatgtcttcctgacaccgatatgtttcttttgaattcaactgttgtgtacccaagagctgaaaatataaataccctattgagtgcataacctggctgaactctattgcagatctatgcagatggattggttaagaaagcatatgaggattggatgcatgttgtagaatatgatggcaaggcactcctgagcttcaagcagaaaaagaaatctgtcacaacaagaagtgacacggctgcagcagcaacaaacagccctgtttcctatggttcatccaacacacacaaacaattgtctcaaccagcaaaagcagggcaaacttctacaggcactacaagtgaaggtaatatgatgttcagctcaaaatcccggtacatctatgtatgttgacaatttttatggtggtctctgctgttactatgttccctgttatgtttttgtttaggagctgcattttctttgttatgttgggctctatttatcttacctaatgcgagccaagtgatttcggtttgtctttttatccatatgctcgctgacccatccctggaacgtaatgttgctgagctcctacttaatttatttatatggaattatccatctcatctggagtcactctcttgtcttcaaatttcataatcactaattcactgcaatcttcctagtgagaatagaaagatgggtagaaagtggtctatgcaattatgacaagcacatgcagagtagggcagtaggcccattgagaatgctaaaactggaacatgacaaactgtagcagcactggaagatgtgcgtacggccgtacgtcatgactacaaactgctttaactactaccattcaatacttttgttttacttattggaactcagccattgttggttggaattgatgtatgcatttggaaacatgttgatgcttctgatcatgttcaggtcagattatctgtgaacatattattgccattactaatacattgcgctactgaattcctttggtcttttcagcagatggatctacaagtgcatacaatggaaatcaggcaggacgatatgcagtcaattctcaaagcatacctgcaaacgtcactacacaatatgagcggagttcactgacacctgaaagccagttcaatggttccgcactgcagaatcaagtttctaggggctccaatatactggcattgggaccaccacagcaacaacatcagcaaaattttgaattctcagcactaggtggccagtccatgcagcccaccggcttgaatcctttcgatgactggtcgcaaccgcaggagaaccggagtggggttgacgactacctgatggaggagatcaggatgcggagccacgagatattggagaacgaagagatgcaacagatgttgcggattttgagcatgggtggcgcgtcaaccaacctgacggaagacggcttcgcatttcctaactacatgccatcaactccccccaacttcaactttggggatgaccgtgcccgcccacctgggaaagccgtcgtcgggtggctcaagatcaaggcagctatgcgctggggcatctttgtcaggaagaaagctgccgagagaagagctcagcttgttgagctcgaggactagcaaacatcctaactgctggtctaacaaagctccattggtgttgctgctgctgctgttttaaggatctgaaaaatgggcttagcagctcctgtttggaggacgcttccttgaggccctgggttcttaattatggacacggattctcgtctactctttttttgtatagttgtttcatcattgtttgtttagtgtgatgcttagttgaatcctgtacgaaccttaaccagaactgtgtacatttaattgtttcaaaattcacacaagcattcgacactccgtttggttgtagtttagttttgaattataccaatataaaagcaggaaacatataatagaaacaatataaaagaaacacggattcatttttatttttttaaaaagaaggaaacatataatagaaacaatataaaagaaacacgtagtgcagtgggggtttgagttgagggacatatctatctttttccctcggtttcaggcatgtttcagccaacaattcctttacgtaatgccaaagttgcgcataccgtgcattacaggaaaacaaagggtcctgttctatatacagttgtggagaaatgacagtataccatcacaagcaactgaaaaacataccatcacattttatggtgcagttgtagtgccaacgctgacctatgacagcaacaaaaaaaaaacaaaaaaaaaaagtttccaagcatttatgtcttctcacatcgcaaccgcaaaatgctctatacaatctcgacaacaaactcctctctctgacatagtgaactaacacagtgaaggctcatttggctccattctactgtgtcaacagctaaaccatttgggttctgggtaaaattccatgaggtttctcaagctccagttatgaatgatgggaagtaatgctccaaaaccgccaggaaatctctcctgttgttttccatgttgaccggaacgccgagccggccaaccgcctcgaccagttcccccctcagtctctgcggcagcagctgccctcttgcactcgcgcatgcccggtacagcggcaggtacgcgatagcgagtgccatgggctccgggaggtcatgcaggcggatcggagacgcccctctcctcagaaccctggtgatgttcacaaaatgatcttccccagcctctactccttcagcaaatgcggcctgagaccactgctctttcagaaaatcaaccaggtcttggggaatatccatcgtactcgtggtcgcaatgctgtctgcaactgcatacgtagcggcggcatcgttgaggaagtttgaacggagaaggaaggaaacaccttcaaaagacccactaccctgtcccctcgcagctttgagaatctgtgggctgagggcttcgaggacatgccgggggatatgcgcaagcaggtaggtggcaactgcgaagtggccgcaagaggcagcggttgttacagcaaggcacatctcaatgtctgaaacatgccggttgacaaaccactggacaacctgcaagcaaccacgctcagaagcttttactaagggacaaaggaaagatgtggcatgcccttcatccaccaagcatgccatcgtttcaaatttgcagtagtgagaagcatagactagagcaagatcgacatcgacagccaagctgttctgatgagcaatctgcaaaaaataggcaaaagttatatagttgcataccatgcttctacaaaaattcttattcacacatgccaaggactatataataaagcagatagtaagaaagtatattctgctataatataatcagtactgaagagcaaagaacagcacaa

SEQ ID NO: 13946 - DNA, 597 bp, Oryza sativa
atgacgaaatccaccaatcatgaagatgaggaagatagtcggcgacgacaaacgtaaccgacagtaatgatgataagcatcaacagagatgatcaaatatgatgacgaagttgcctatcaatagcagtagagtaagctatataaagagggttgaccggatggtgatgaaaaagaccatggcggggatccaatcaatagcgggggaatagccgatgattatgaccaaaacccttattcccgtttggatagtagggcaaccgtgaagggggaataacaaggtggcgaagtcttaatcattcattaacaacgggggaatggcagaaccgatgaaacaaatgtgctggtgaccaaggcagtgaccataattcattaaactggtggagatgcttcacttggaggaaaggatatgctggtggtcaacttattggatctgatatgagttgattgggtgatgacttccaacttccagacatgtaaatttaatcttgacctactggtttgaagcgaagacaaaattgatgacttccaaaggtgacttggtggctgaataaatgaatggttcattttggcataaagcttggcaaattttgaaccctg

SEQ ID NO: 13947 - DNA, 621 bp, Oryza sativa
atgcctgtatactcctctacagcccatccgccgcctactctttattatcattgagattctaaaaatcgaacatatctatcattggaattcattttttattttctagaagtcttgccaaccattagtggctctgcaactacactcctatacaccccacgctctgtttctcctttttattgtcattaagaatttaaaaatcaattataattatcaatgggatttatttttttactttctagaagttccagcaaccgccttgcccgtcagctttacggcctgcctgtcgttcctcattttaatcgtcattaggattctatttgatgttttattaacagtttttatatgttgtatcaaccgccaccacactactcctttataggcctgttacttattttatctcatcatgtgttttagatggtctttttttttcaatagtctatttcttatcaccaattttagttatttataaattgtattcctaattgaaatctattttatttttctaatttcagaatttattttttatttttgaatttaagttgtttcaaaattgtattcctacttgaactctcttttaatttttttactttctagaagttccagcaaccgtcttgcccgtca

SEQ ID NO: 13948 - DNA, 5669 bp, Oryza sativa
aaaaaaaaccagccaaatgcttctttccagctgggcaaattgcatttcgccccttgccgctctctgtaagggcggcaaggaccaaagcgcaaaatgcgcacacggcgccgtcgagccgtcgtctgccatgtcagcttgccgccctccactagagcggcagggtctatttttgtaaatttttacgatgatagattatttctctaaatattttttttaaaaaaattaaaattgaaaaaaattcacgactcgtgctcgagagcagcaaaaaggcccaaggagataaaagaggagcacacacgtgttctcctcacatcagtttcggcccatacgagttggttttgggcctgattgttctcacagttcatattgccttctcaatataaattcatgtgtccacgtagacgtgacaacgaacatcgacacacaggagtagggtattacacctctggatgacttgaacctatataaattcatgtgtccctctctacgcgaggtggtcgggcctggtgaaccttctctgattacagtttgtccgtacctcactgcaaaccctctggtcagatctttactctcggggaggggtctccactcctatggtccccggtaccttgcaaatgcagatgctcacgacgggtgcatactcacccctataaactcacattcacatgcataaacagtaaatatgagcacgagtgcaagtctaggatttaaaatcggatggattggtttcactaaaaaaaaactaattagttaagctagttaagctaagttcactttgctaaaagtggtttgttgaaggcttgatattaatgattttttttcaagtctaaccatgatttagacagctgtatgtctggaaaaatgggtttgatttgtaagggagatggacaagtggtttccctgctaagctgtccatctcatgtgtgaatcacatgcatgtccacatggattgtggtatccacaacttttacagttggtcgtttcagtgcgtgcatccacaagctcgcaatgtgagatgagatctgaaagcttaattggcatgttggataattacaagagaaattgaaacccctgatttcaagtttcaaccggttgcaaggtaatttaattagttatgttcctcgaagaagagattaagagtgtgcgtggaatctcaaaatattatttcagagaaaattaacataattatcagtacggattcatactccgtaattctgtatggattattagcatgaaaatataaattgcacaccgtcacgttgatttagtacctgcaaggatgtctggtggctggagggagagaatatacccacacccactattcatatttcacttttaatcacttgttttaatttcaaaaaaatataataaatatttaaaaaggcacataaacataaagttcccctctccgaatctaaccatttaataccaattatttgagaatggaagttggaatatatattactccatccgtttcaggttataagtcgttttgactttggtcaaactcaaagtcaaactgttttaaatttaactaagtttatagaaaaaagtagtaacaattttaacccaaaataaatttgttatgaatatatattcaattattaatttgatgaaactaatttagtattataaatattactatattttcctataaacttagttaaacttaaaacaatttgacttttaccaaagttaaaacgccttataatctgaaacagagggagtacgaaacactgagcgtattaaatttttttacaaactttttataaacactggtgtgtcacagtgtcgttgaatctggttgaatctcgactttttataacttccagttaaagatttttgttaataaaaagttggtaagaattatttttagtacgtgtagtgaggagcatttcttgccacctttattcgattccaccacttgacacatccatcgatcactcctccccctaccaacgatcagctcagcttcagcttctcctcggcatgtccgccgccgccgccatcgcgtcgccgatcccggcggcgatcgccgtcgtgcagcagcagaggcgggggaggagccgcggcggcggctccggcgctgccgccgtccgctgctccgcggtggccccgacgtccgcgatcgcgcccatccttgccgacctgaggctgcggtgcgccgccccgctccccgtgctgcggcgcgtggcggacgccatggcctccgggatgcgcgccgggctggccgacgacggcgccggcgagctcaagatgatccccagccacgtctactcactccccactgggtaaccaacctacttaaacagttaaacatacacttaactagctctaattacagattagctagctggtgttgctaatacatcgtcagctactgcaggcaatgttaatgcatcagcagttcataaagttattgttactttgttagtggatcatgtggtattttaattgttcagctggatctttgtgtgaactgaacttctgaactgcaacacagtgggcttgtgaatttctgattattttttcttttttgtattgtgtttagagtggagattgatcagctagtatatctttgcaacttgagctcaggaaattaatcttggttaattatttatctggttaattttgtgtttcatgattgttgtgctgaaggaatgaaacaggactgttttatgctctggaccttggaggcaccaactttagagtgctgagggtacaattgggaggaaaagataagcgcattatagataccgagtttgagcaagtctcgatcccaagagaaatcatgcatggtataaccgaggtttgttaatttttcacaagctgtgttcttctgagcttactctattatgtagtctgtgaaatgtgatgcattcatcagaatagctgcagggacatgtatatctgaatgcctgacaacattgttgtgtcaaagcaggatttgtttgatttcatcgcgagtggcctgtcgagatttgtagcaacggagggtgataagtttcatttgccacaagggagaaagagagagttaggcttcacattctcctttccggtgaatcagacttctattgattctggcattctgatcaagtggacaaaaggttttgctgtctctggaactgtaagactttatttcataatgcattttttatgtatagtttccatgattctttgattcatgatgtatggcactacaaattcttatcttgtcccgtttttatcctagtaggatatcctgtatatgacattttccatattggtctgaaactcatccgttctagaattcacgagaaaaaaaaactgattcatttgtagaatttctgatgccaagagttacaagttacaacagtgaaaaatcccttctagaacaaagaacactacttttactcactttccagatgatggtttatgaattagcaagttagtttctttgtcagttaaatctttgttttggacaggctgggaaagatgttgttgcttgtctgaatgctgcaatggagaggcaaggccttgatatgcgtgtctctgccttggtaagcaaaaagcctatgagaataccatggttatgggctagaaatgttcgtggaaagatatcctcttcacaatacatttataaccaaactattggaattccacttaacaggtaaatgatactgtgggaaccttagctggagcacgttattgggacgatgacgtaatggtcgcggtgattttgggcactggcaccaatgcatgctacattcaacgaactgaagctattccaaaattgcaacaccttaagcttgaaacaggaaacacggtatgccataacatagacaaattctctattaagttattgcaaatggaaagtgttacgaagttaaggaatttttcttgatggaagtctctgtactgcagattattaacactgagtggggagctttctcagatggacttccattgactgaatttgacagagaaatggatgatgagagcataaatcctggtgaacaggtgaaaaaaaatgctttcaatttttattttctaagataagcagaggaaggtcctactgtgcatactatatactgacaaaagtaaaacatagtttacttatatagaagaacgacagagtctcagggaaaggaggaaacatagtagaaaatttaagcaagattatttagccagtcttgactctgagggatatatttcttcttgctcttgaaaacataatcttgatatcctggtgtgcttgcaaattgcaatatgcgcagatattcgagaagacgatttccgggatgtatctaggtgaaattgtccgtagggtgctggtcaagatggctgaagtatctgatctctttggtcattccttccccaagaaacttgctgaaccatttgttctaaggtcagttctcatgctctagcatcacaattaaattaaagtattatgctaaggtgaaaaactccaaattacaggacaccacatctatgcgctatgcaacaagacacctctgacaatcttggagaagttgagtccatcttgagtgatgtcatcggcgtaagatacttactcctcatgtttcagtcacatcacaaagggcatctagctagcacatccaaacatgcaaaatttacccccaaaattcacatccacaggtgtcccaagcttctctgctggcacggagagtcactgtagaagtctccgactgcatcatcaggagaggaggccggttggccggggcaggaatcgtagggatccttgagaagatggagaatgactccagagggcacattttcggacgaagaacagtggtcgcgatggacggtggtctatatgagaagtaccctcagtacaggaggtacatgaaggaggctgtggctgagctactgggacccgagcgatcgaatcgtatcgccatcgagcacacgaaagacggatcagggatcggcgctgcgctgttggcagctgcaaactcaaagtatgctgctgctcaaatctctacaaggtgatcgcaattgttataattgttgagttactgggccgaattaattctctacaaggtgatctcaattgttatcattgttgagctactgggacctgaacaatccaagcatatcatcatatggtggcctcttatctgaagtatggaggggcttcatatatgctattcttctgtactactagtctactatactatataacgcatttgaggaaaagaaacaccagaaatttatcaacttatgttttgtataattcatcaacttatgtgtttgtatagttacagttcaccagaaattcatcagcttatgtatttgtatagttaaagtttatcctcaattttgtgtggcctgatgtttcattgcttagctggattgtatattttgcaaatttctccaaaacatcttaccgctgagactagcaattgcccgagttgttaatgcttgctcaggagcaattttgcagcattcaggcatttgcaggattttttttaaaaaaaatacaacttatggcacaatgccaccacaaatgctaaatttgacctcacctgcaagatttaaaatccagtggtctgaattctaacacctgagttcaaaacaagattggctgtcctttacccttctcgttttcaagtcaattgatcgataaagtattatggagcaaaactaagattaactgtatcttcctg

SEQ ID NO: 13949 - DNA, 1101 bp, Oryza sativa
acagaagcaagtacagtaaggtggtactcacctaatcagtagcgacgactctatgaactcaatagatttcctgtataaataccaaagtgtttgtaacttgaacggctagcctcaaacacagtagcacaagtgccagttcctggatcctcacttctaaattccttatttacactcctagtatagactctgccatcatctaataccagcaaaggatgcacagttacaataataaactgagatggcaagctgaactttttaacccacataccagtctcagaatctgtcaaaaaccacaggtccatgcggataggaggaatattgtgaactgtaactaagcagccacctgaatcagccaacgataactgcaagttaagttccgagtaagtgctgtcaccatcctgaacatgcctgtgcaccacttctggaccttgtactgtcatccatttctctgtctcgaggttgaatgaagctatgctgcctggttcaacagggagcaccactatttcaaaataagtcgtgtaaaattccatcatgaaatacaccaccccatcgacgaccacgcatctcatctgtttactgcaacagatggttgctgggggcccctgcattttccgccacatgtcttggttgttgccatcaacggcaattacctcacacagctgcctttggtaaaatctgatgatgcggagcgccttgtacactccagtggaagagatttccccaaaagcatgagactcgactttgccatggtacatcatcatccctctcccagcagcaatttcatctgagtggttcttgggcaatgcgacggtaaccccggtggctgggttaagcacccagaggcacagagggtgtaacattctagtaaatcacaccatgtcgagatgggtgcgcaagcgcacgacagcatcatctcttatctggaatcgcaacaacctcgccggacttgtccctgacagcggctcgacggtcggtgacggccgattgaaaaagttgaattttttacattaatacccttgccgcccactgccagggcggcaaggggcctccacgcaaaaaaccagcccgagaagggctattatcaacagagctggaaagaag

SEQ ID NO: 13950 - DNA, 928 bp, Oryza sativa
aaattcagctagaaatgtatccacaacaatacactattattgcaacaaaaattagcttgcaccaagttcactcaggcacccacagatatcacaatttcatgacagctgtggcataagctaagctaaacagtcatgcagaatgtatacaaggggctaagcaaagctattagtcgtgtcacacacgactggtggtttaaatttgaatatctgccagggcaactcgttgaacatacaactgtgaagataggcaatcatgctctattgatttgacttggtacagttgtgttgcacagcaactgatatttgattatgaacgtttccccattttcacaaaactagatctggaatattgttttctcatggggaaatggacatggtttctgagtacatgaaaacctactcgtgagccctaacgcaaagagggctcatgcttagttcatgtcaacaactgcaatttgcagtcagactaattgagctactcatcaagagcacccaattccttcatatcttccaagaatgccatgtaggaatcatcaatgctttgtggcttggatactgaggacgaaggccggggctcagatctaattggagccactgacggtttcagggcagaagatgatgttgttgctgactgttgcacctttggttttggtttgaggagagccgattctctcttaactcgaactgatgcaggaacctgtaaaaaaccaatggtttttcagtacaatggtgcatctaaaactatgtaaatggaacacaaaatatatgaatcaattagctatagcaatcttagaccaactcagctgtttaaaagttcgtggccaatttgtttatttatgatgacataaagggaaagcaaatttatgtaagtgttaagagaaagcttaatagtgggctagccaactataagctcatgtggaggaagggg

SEQ ID NO: 13951 - DNA, 19332 bp, Oryza sativa
tttgtatgtaatcaccgaaataaattcaatagaaattttggcatgacctcccctcttttttgaagaaattttgaagcttgctcgggcagctggaggaggaagaagacatatatataggggtgggactttagtcccggttggtagcaccaaccgagactaaaggtcccgggggggcctgacaggtcctgacagcattcgaaccgggactaaagatgatctttagtcccggttggtaacacaaaccgggactaaagatcaaatatgcccgttacccttttgaaccgggactaaagatcatctttagccccggtttttattgcatccgggactattgtggaaatcggccgaccgacgaaagatggtttctctaccagtgctggtatatattcgttgcttgggaacatcccccccccccccacacacacaccaaatgcatggtacataaagaacaaaaccaatcacaattaatcttcccttatttaattctacgtattttcttaataatcgtgtttaactcttaaactttttatattctgagatgaatgtagtaatatttacgagttatcaaacacatttcatttgcatatcggtagttccacgacttttctcaaactaataatgtgccaaaaaaatcgttaaaaatttaacaagatagatcgataaatggtatatcactatacaaatataatatatatatatatatatatatatatatatatatatatatatatatatatatatatatatatatatatatatatatatatatatatgtatgtacccgagctcaaatctgttcatcgtagccactccgattttaaatctgtgttaaaaatttaacaagatagatcgataagggagatggaaaatctgcacgcgagtgcacatatacccttgacccccgatagacacctgtccccggtagtgtaatggtttcgtgtaattgatcattaaaacgtagagtggtcttgtacatctcgatggcgcatatggcgaatgagtggtaggtgtcagcacagagcgatgtggttttgacatttttacccttcagcgcttgaaggtgtaatgatcaccacgccgcttcttgtgttgtttccacagtgcatccactcagatagctaaaggcccacaacaagtgttgtttttttatgccccatcgatgccatcacctaacattactataactcagcaatgcgcgcctgacgccatgcatcgtgtcagccatatatgcgaatttttttcagagaacatggatccgtctcactcggatggatgggtcacaatggctcctgctgatgtatctgcacacaggatacatcactccattgacaagatagatcaaggctccctccatcctaaaatataaagctcaaccactcataacacaaaaccaagaaaacatttaatcacctttttggttggatcaccttgatacatgcaagcaatatgattgaaaggtttgatggtataggatttaaaacaaatcaattctattggaccaagaggtgttaattaatgtatgtatacatgtacgtcttatattatgagacataagagaaaagtggctgtaccttatagttcatactccctcggatgggataggacatctcatcctagattagtttttttgacggagaaagtatactaatttgagttttctgtgttatttttgttataatttatacaagttaaattttaacttgcatatttgtgaagtgatatattacatagaagtattcatctatcacatgtgctttttttgctcagagccagcggaaaatagactactgcttgatgacaaatctgtgagctagatcgatcacgataccatcaatgtcatcgctgttacctggctgcccactcaagggcatctggaaaaggttgcacgtgaaagtcaattcttgatgacagtatttttgtgcagcgacttactacctccgtccaaaatataagtatttttagaaaatacagatttgcactcgggttcatatgtacctacaatctacaccgttgatgtgttccaagattcatgctgcaaaatgtacctaaccttaaccaaatgaatatagggagaaaaatattaggattaggttggttcacaatatgtataacatgtatgttgcattttttaccaaataatttttttcaataccaatcatatatgacatttatatatatagtgcattgtatttttctaacccttattttgtttataacatgatatttagtcaaaatgagaaaccaatatatctacaatatcaccaaattgtcatcttgcaaaaatgatacttccaaaatgatatatatatcctaccatcaaaaactacaaaaacaaggtaatttatataaacaaggtaaactacataaacaagttttacatacaagaaatacaaaaattacataaacaaggtattttacacttgtaaaaaatatagtataacgtaaacatcatgcatcttacattttgttagcacctaatatacttgccttaagattcgcacaagctacatatagggtgtagattgtgggtacatgtgaactcgcgtgtaaaaaatccaactcctacggaggtagtacctcccaatttatcatactccctccatcccaaaatataagtaacaactactcataacataaagaacaagaaaaaatttaatcaccttattaattaaattacatccatacatgcaagcaatgtaattgggagacttaatggtacatgaaataaaataaaccaaatttaaaggaccaagagatgataattaatgtatacatgtatacacgccttatattataatataagacatagagaaaaactgattgtgacttatatttggatagatggagtatcatccttgctcttcctggaatcgagcttaaaagcctgctacactttaagaacaaaaaaaaaagtaataagggatcaaaaaattttgcctaacaccaccctacatcttgatagaccgtgcagacatatttatgcagaagtacgttgtcgtgtactgcctagtaaataaacacatcttatccactactatgtcagtcccaaaatacttatcattttgagtttttatttgtaatcattcgttttatttaaaaaaattataaaattattatttattttgtttgtgatttgttttgttatcaaaaagtactttaagtataacttatctttttttatatttatactaattttttaaataaaacgaatgctaaaacattgcaaagaaaaaatcacattgacaacaaaactgtgggatggaggatacgtgctgctggcttcctacagacgcacttaaaagtgccatctgctgtcttggtgtcccactgactctcagagaatcggccattgaagaggaatagctcctatctattgccgcctgtactaatatgaatggcgcttgctcccgcagcaccaagggcaaaacaggaattctcgctctcggtacctgtgtagcaatacgtacaaggtactacatgctctatgtttaacactgcctgccgtagtactaacaagccatccaccatcattcttgtgacccctacatcacgaatctccgagcatctgacggcaaggatagtgggtacatatgtacccgagctcaaatctatgtgtgtgtgtgtgtgtgtgtgtgtgtatatatatatatatatatatatatatatatatatatatatatatatatatatatatatatatatatatatgtttgtaggggtgatatactgatatatcacatatagatatatcttgttcttttttgtttccaaatttgttgataacattttaaatgctatggaaaacaatggtatatcctctcgagagacaaatagacttcctccccatatacacaaggaatcaagacatgaatgtcaaaactttttctcctttttgaggctataataaagttataacccactaactcctaaagtttataatgcaaagatgccacatcattagccactaacaatcattatatttaaacatcatgcaaaaatgctatatctattaacttattaaagaaatagaaaaaaaaaaggagcctccacgttcactcttacggtctagaaattcttatattaatcggagaaaagaaaaacagagtccatatagaaataaaatttagaaatagttgaaattcggaattaaaaaatgaggaatattagaagaggagactatagtccatatataaatataatttagaaataaccaaaattcagaattaaaaaataaacattatcagaagaagagtatagagtccatataaaaatacaattaagaaataatagaaaattggaattaaaaataaggaatattagaagtagagtatagagtatatatataaatttaaaactaagtaaaattaggaataaacataataaaattaaaagtagagtttagatgtccatataaaaatacaatttacaaattactaaaattcgaaattaaaaaaaacatgggaagaagagtcttaatacaatataggaattcaatttagaagtaactgaaattcgaaattaaaaataaaagaatattgaaagatgagtttagagtccacgtagaaatacaattagaaataataaaatttcagaattaaaaataaataatattagaagaagagcctagagtctatatagaaatacaatttatagttaacgaaaattcggaattaaaaaaataagaaatattgaaagacgagattagagtccatataggaatataatttagaaataacggaaatttgatattaaaaataattaataactaacacatatataaaatataatatgaattacacattagtagtttcataaagttagtacaaaatttaaaattatgttgtcattttaatatattttaataataaattgtgaaaacatatatgctattatatgagagaaaatataatgatgctagccgcgcaatctgcgcgggccaccatgctagttatctataattttataattgattatactataaagttataacccattaactcctaaagcttaacatgcaaagatatcacatcatcatccactaataatcattacatttaaacatcatgcaaacatgctatattatctataactttataatttattatactataaagttataacacattaactcctaacgcttaacatgcaaagataccacatcatcatccactaacaattattatatttaaacatcatgtaaacatgctatattatttataattttatagtttattaaatttttagagctcttgaaatgcaagcatgttaaatcatcatcccacaaaatccacaaaatatttcaatatatatctcccttatttttttataatattctatgtacatatatttcattctcacttagttaatgttatttctttcttctctcattaagctctaccacatcaattgtttttagtgctaaatggttaatctatggcccaaattatctctatcattttcttttctcattaagccatatcaactcaattatttttagtttttagatgattaatatacggtccaaactatctccctatatttattctctcgtaaaatcatatcaccttatttttacatttaaattatcattcaatatactatttaaattaaaattatcataaacaacgttaacttatgtaatcttagttatctagctatgttacacattatttttatttattgttgtcatactaaactcctgtagcaacgcacaaggtttcacctagtgtgtttaaatatatgctcccatcattgtaaaatgtaaagaattttggtcgaatatgatacataatagtaatacgaatctgatctaaaatataagggattttgatcagcattgtttagaaggatagtcgtccttctgttccctcccctcaagtccatgcatgcatgcatgcagcgcagaagcacaactccctttgtgaaaatcagaaaaacaagaggtttgttaacgaaatccacgctcttacagcgtattctggtcggacgggcaagttgcagtacgcaggtatgagtaggacaaaatctctctcgaaggcaaatactacatatatagctgaagccttccttgagtttccttcataaggatttgcagagatgctcttgttctacacatcacatttgcgtcccgcactaagagcatctctaatagagaccatagactcagtcctaatcaattttcgagggttaagatataaaaactagattcaacaccgaccctagtaccctactaaagctcccaaagtgagaagaccccccgatcctcctcccaagcccctagtcctggggctccgagtacggcccccatcgacttatttttctagcgtgaaccaaaatttcacttcgcgtgatctagtctcacccgcacggcactatgacctggatctcctccggcaatcgccgttgactccccccacccacctccgccaagatcgccccaaaaaggtgaggtttttcctacctttgttgcagtcgtctacagggcctccgcttgcacgcctggcctccgcctgcatgctggtcgttcacacgctcggccatcgtccacctggccacacgccgcccgcccgcccacacgctggtcgctggtcgttcttatataaatttcaaatgcacaaactgcacaaagattttgcataaaatagtttattgaggaaactctattcattccttaaggggatgtcccttcgtttttacacattgcttaaaaagttataaaaaattagtaggatcaatatgtgatatgtcactccacaaacatgtatgttcaaatttaacttatacaattaggaaaaaaattcatagaaacgcgtaattcgtggttaaatttattatttttgttttgagttgtacaagtcgaattttaatttacgtgtttgtgaaaagaatatatctatcttagaatgtttttattttttatgacattttaaacgtcatgcacagtatgagaggatgccccttcgaggggggaaataatttacttccagttcattgctcaatttcatcggcaagcaatctcactttcaaagaatgacagtcacaaaaatattgctactagtaacaaccgcaattactgagcagctgacaatacatacagttaattaatcacaaaatactacaaatagaagcataaatatgcgggggttaatataactaattaacttgtgggattaattaattgcttttctatggattgggaacctatcctctaagcacgaaaaacggaacaatccattagcacgtgattaattaaatattagctaatttttttaaaaaaatggatcaatgtgatttttttaaacaactttcgtataaaaacttttttaaaaagcgcaccttgaaaaacgtgcacgcggaacacgagagagatgagttgggaagactgaacaaagaacacagccctagtgatatttgtgatcgatcacaatggcacgtagaacacctcccagcgcagtatgagtatgacgacggccggagtgcaggctccgatggcgatgaccaggtacgccagccaccgctccgtggggaggacggtgaggtagacggacgtcatgagggagacgatcatggcgaggcaggcgacgacggtgaggcggtgtccccaggtgagctggtcgagcttgaacttgacggggtccctccacgcccagatgaagcagaagacgacgacgatggcgctgcacatggcgacggtgttggacaccacgaagatcttgaacggcgccctgtcggcgtggatggcgagccccgtgttctggttgtagccgccgggcatggtgaatgtggcggcgaaggtgacggtggcgatgagggtggccacgagggtgtaggtgccgacgctgagctcgaagtactcgtcgttgctgccggagcccggccgccggctgcgcagcgactggtacgtcgccaccggcggcagctgctggttcttgcaccgccgcgactcgtacttcttgagcttctcccagaggtagacgacgtaggcgtccatctcgccgccggcgacgcgctcctccacgaggctgcgcgccgagtggccttcgcggttgaggaggcaggggtcgacgcgggggtccctgagcagcatcagcgccgacttgatgcgggccatcttcgcggcgaggtggagcggcgtgtcgccggagttgtcgccgcggttcaccacctcggcggggcggacgcggccgaggaggcaccggagcgcgtccaccttgccgctcgacaccgcgacgtgcacggcgttccggccctcccggtccagcatctccgccgcgtcggggctgtgccggagcagctccgccgccgctgccgtcgagccgtagtaggccgcgacgtggagcgccgactgctgccgctcgttgcggcggtgggcgaggtcgggcttgtggtcgagcagcatccgcaccatgcgcttgtcgttcttctgcgccgcgaagtgcagcgccgtgttgccgacggcgtccgtcaggtcgatcagccccggcgccgtcttcatcagcaatatctccaccacccctgctccacacacaaacacactcaaatctcttcaaatttgattcaaatgcctcaaaaatctattcacctttttttttaaaagtatccatatacccctctaaactaacgatggaagacggtgatctaacactttaaaactggactttcaatcccaaactttgtaatatcattcattatttaccgctaagatagttttgaaaatcgcaagcttaaacaattactcccagtatcccataatatagcaactagcaatctaggataggatgtgacgtttcatataatgaatctggacaggcctcctgactgattcattagaccataaaactaattatccggttctaggttgctaatattaaaggacggagggagtatgtagtttttgaataattaataaaacatatttacatatcatcaatcattggttattaaatttatacttatataatgatgttatgtgtaagagcgtaagcatggtaagaaagcaaagtttaagtgaaggtttgaacatataaatgttactccctccgtttcatcatgtaggtcattctaacatttaccacattcatattgagatatatgtctagattcattaacattcaggggttggatgtggaaaaaaaaatattgagtactggaattcatcaaaaagagtactctttgaattaatttgagcaaaatttcttcttacgggtgtggccgccgaggacggcctggtggagggcggtgccgctgacgttgtcggcggtgacgaacttctcggggacccatggctggtcgaggatcttgtcgacgacgtcggcgaggccctcgcgggcggcgatgtgcagcggcgtctgcatgtccacgttgggcgtgtgcccgcagttgggctccgcctccagcagccgcagcgccaccgcgctccgccgctgcttcaccgcctcgtgcagcggcgtgttccgtgtcttgttcatcatcatcagtggctcctcctacatacatacatgacgtacatttttcgcataaatattatagtcttaaatcttaatccaaaattgtatggtcaaaatatactttatatttccctacacggagggagagtaacgtaattatcaactcgcaaagcactcgtaggagcaagaatgtatttatttgaaaagaatatacttcattcgtcttgaaatataaggctctatagctctgtaaaaaagggaatcgacatttgtacaactaaaatgacaaaatatatggtattactaaattcattttttgaaagaattttcacaccatgttaattttatggttgtttatatttttaaacagataaaagtatatcacaatgagtgatgtcttttagtgattaccaaaaggtactaacacacattataatgctgaatttgacagctctcgatttcttacatatgagatttataaaaagtatcaaattctacattgcaaaaaaatggcaactctcttgtcacaattatataccggatggtcgaatttcttatattcaaccagggttcaaaattctaaaacgaaatttctgaaacttcgagtctattggaccccacacctagaaaactatttggcctaaaattttcaggttatttacaatttttttttgtgaatttagaaaattttatttatatttgacaaatcgttgtgcaaattttaaatagtgtcaaaacgaaatacccgaaatttcagttgtatcggtacccaacagaaatagcctaactgaaatagtatcaaaccctgtattcaaccggtgacgacgaattaaagctagaagaaagaaaacggacggatacctccggccaacaaggcccagccatggtgatgaaggtgatgagcatgtcggcgacggccatcttgccggccctggcggcgaggtgcagcggcgtgtccccctggtcgttcctggcgacgaggaggtcgccgtgctcggcggcggcggcctcggcgaacgcgacgcgcccgagcccggcggcgatgtgcagcgccgtgttcccctgcggcgtcgtcgagttgaggatcttgccgccgccctgctcctcccccagcagcgccgccaggctcgccgtgttcccctgcaccgccgccttgtgcagccgtggatccatatatgcttcttatttcctctaccttctacctaccttagctacctagctagagctagcctctgtacagtacagtgatcactcctctctctgaatgtctgaatgtctcgtgtattcttctgtcagtgtgtgtatgatgagatcgatcatggaggtgatggtgatgcagcaatggcgatgctgatcgagtagttgtaacttgtatgtactccatgtactatgtaggagtagtgtggatggattctttgcttgtttgtggtgggcttgtgcagttgtgccctaccctgccatggaagctaggttcatggtgctttacttgctaaaccgaatgtgctaaatgctccattagaaaatatatatgcagtctgatgtgctctgtctccagctcctgccacagcatgctttactggccgtcatgcatgtagcacaaggaatcaaagctttaagatggatgtggatatatattacaatgtttgattactctaatttcctcctgaaattataaagccatgcgataggtttggaggcagctttgccaaccatatgatccgcattggtgatgacgacaaaatcattgaagaattaattttgatttttcaactatccatataaagaggatacgagattgagagagaagtaaaatgcaattaacttagtagtagttgttaactgacttcagttagagagaatcacaactttgtctcaagggtcaagcgtcatgtggacatggcaacgacctctgcctcgctggccttgacgctttgtgcatgacttcatgtcgctttgttggtgggttaattatgtgattgtgcaagagtggataagtgggttttacgggttttactttgttgaggtataggaaatcaattaaatagccaacaaaataaccaatttatcaatgcatacggccacatcctaatctttttgcgaaactttttgatatgccggtgcacacccggaacccctgggtctatctttgctcgatgagatcccatggacagaagaaaatacaagagaagagtcttatatacaatattatttccatggtgttgttcatataaatcgttacagtatcatacggggatttacccaaccatgccgtcttgatatttcatgtggttgattaccgttttcagtaattgacaactaattcagtgattcaagtggttgagtaaaccatttttctactaataaaaatagaagggttttttcttccgtcgacaagtaaatataacacggtaccatatgatctaatactaatactagtagaaacttgatatatctatcgataggtaagacaaatttgtctatcaatagtggatctcagctcctttggaacacaaggttttgttgagttttttttttaaaaaaaatcatctaattaaagttcaccctttttagaggagtcgaggccggaacttcttggtaactcgtaatagtaattataacacgataccatatgttctaatactaacagtagtaggtacctgttatatggatcaatagataacacaaatgaacacaacaaacgtggatcttggttcctttggaacataagattttgttcgtttttacaaaaatcctctaaaacctatcctttccaaaggaggcgagcccaaggattgcaactagagatggcaatggtgaattcaccgtcagagatcatgcctgcgtccccgtcaccgcggtgaaaatatttcaccgtccccgcccccgtcaaccacgacggagctataatttctccagccccgatcaccacgcggtgaatttttctccgtggtgaacccgtccccggttaaacagcatattcacagccatggtcggtagatggtggcggcgacagcggctcccggtggcgcagcgacgacggttgctgcaggcgcggcgacgacggctgctgcaggctagcggcgcgtcaacggcggctcccggtgaagacggctgcaggcgccgcgccggcccggcggctcgtcgacgaaggcggccggcaacggcggcttcagtctcccggcgaacggcggtgcggcgaacggtggctcccgggctgccggcggactggcgaatggcggcggcgcggcatgcgtgactcgggtggagggctggaggctgctgtggatctagatgggtggaggatttggctttgacctgttgacttagggttagattatatatatatgcctactaaatgggcttcaatattatgggccaatacatctaaaaagtctagaattcctcccttgtacattacagtcgggtcaccgtgggggccggggacggggaatggttcaccgtccccgcccccgtcatccccgatggtgagaggtttttaaccattctattccccatggtgagtagatattaaccatccccgtcacctaataggtgaattcaccacggggaaacggtgaacgggtccccattgccatctctaattgcaactccagttcaaaattttggacccccggggggggcaagtgattattttggctaaaattttcggtttttctcgatttttttaatttgatcaaaatttagtcaaattcagtaaaattaggctaaaatttcaaaaaaatctgtccaaaaagtgttgaaaatcctgaaattttcggtagaaacgaaatgagcgaaatttcggacatactagcttgctaagatactatgccacaaaagttataaggtttattatggttgaaacagtggtgttttagcaaactatgaattcatttgtatggaactccagtaacatacataccctcttttgagcattccatagaattcctttcacacacatgtgcagcttgactagtaacgtgtacaactccgtattaattgcacactgaacattgtggaatactccactatatttcatcaggacaaaggtgtgtataatactgttttgttatcacaaaacaaagaaaatttaatacctaattaaaaagtcctatcttgttaatttacatgatcttttgattcccataaacacgtacggatcataacccccaaaattatccaaattatcccaagaacaaaagctgcacaaacaagatcaaatatatcacatcacaaatccataaataattaaaaacgagctgacaaattcccagaagcaatttttccttgccaaaaaaaatcactccgaccatcatcagctcagagtgcaagcaacgctcccatcagcagcagcgccgccatcgtcgccgcggcggccgggacgacggcggcggcggcgccgccgctcggcgacgagcccggcggcggcgaggtccccggcgcggagctcttgatcgggcacgcgtagccgcactccgccgggtcgaccacccggtagacgcccttgctggtgagcaggtagacgtcgccggcgttgtcctcgccgaaggagaagatgtagcccagcgacggcagcgtgctcctcgccgcggcggcgtcgcaggggatcggcgacctcccggagcaggcgaacggcagcggcgtgacgtcgtacgcgccgctgcccggcggcgactcgaggcccgcccaggcggactgggcgtagaggtcggcgtagaggtagcggccggcgaggcaggggtcggtgccggagcggtagacgtagccgccggtgatggaggcagagccgacgttgttgttgacggcgctgtgggcgtagcccatcaccggcgggatggcgtcgatgtcggcggcggaggtgttgccgccggggctcgccagcggcaggtacgccgtcgtgccctccagcacccgccacccgtagttcccgccctttatcaccaggtcaacctcctcgtacgacgactgttttcaaattccacacaaattcatcaactatatggcaaatttggaccaccaaaaccattttgttaaaattaaaatggactaaattaatcccagtgacatggtatcgctggagaaaaatactactccctccgtcctataatatagcaatctaaaattggatgggacatttcatagtacaacgaatctgaacatgtatctggaccggttctaggttgttatattatgggacggtgagagtattagaagagagagcagtataaaaaaaagctatcactaggtcaatctccttggtgttgcctatttaaacttacacaaaatcatcacaattatatggcaaatttagggggaaatacaaaacaataatttcttaaaatggacgaaattaatcatgtttgcttaaatatacgagacatggtatcgctgaaaaagaatagtaccagtagggaccatcgtaaaaatctttgtaccgatatatgtcctattactaatagagatcgccgtaaaatttgtcttaaaggaagggaatgtggcacctgtccgacgtcggcgcagtagaggtcagagggcttgccggagtcgaagctgcaccgccacgggttcttgaagccgagggcgaaaacctccggcgcaaacttggagtcagtggagaaggggttgtccttggggatgacatagtttccccagcctgcagtgctattgccagctgcagagtttgtaacaggaagatcggtcaatcatcttgtcaggggttgttgcaactcaatttcagaactcaccaaaatatgaacaaatttctgaattcaggtactatcctgaacagtgaattagttgaaagttgcttttgggggcatttgatttgattatgaacaaattccagaggaatagagctaattcacacactatccttttttttgaacttaattcacacactatcctgaacagttctgaataggattgcacctgaagctcaattcgtttgaaataaaatgaattttattttgttcaaatgttgctttttttttgggggggggggggaggggagggggggcatttgatttgaatacgaacaaagctaattgacaaactatcctgaacaatgttacctgtcaggactggaccttaagttcaattcgctgggggaaaaaagaaatgaatttttagttgaaaggttgctctttttctgggcaatttgatcgcaaaatgggggagaatttgggattacttggcaatgcgttgacgtcgatgcggatgatcttgccgagcagcgacttcttgttctgcgcgaagttccacgggtcgccgacgctgccgccgtcgcccatcatcaagtagaggtagccgtcggccttgctgaagaggatctgcccgccgtggtgcgtcgtgaacggcagccccatcgtcatgatcctcctcacctccgccgggttcgccgccgtcgcctgtgacatcaaccgctattgagttacatgcatcgaccaatttaacccaaatacctaagctgatgagaaaagacggacaattcacttcatatccaaacacttccccctcaaatcttaagtcaggattcaaactcgtgatgagaaaagacggacaatttactttatattcaaacattaccccctcaagtctcaagtcaggattcgaactcaaaacttttggctctgatactactattgagttgcatgcactgactagttaacccaaaagctaaagctgatgaggaaaaaataacaattcactttatattcaaacacttccctctcaagtcttaagtcgatatacgaattcgagaattctggctctgataccgtgttgagttgaatgaaccgatcaatttaaacaaaaagattaagctgataaggaaagacgaacaaaccaccaccgctggcgagcgagaagagctgggtgtgcgtaccgtcgccggcgagccggaggaggcgttggcggtgtactcggcgatgacggtctggaactggcacggctgggcgccattgtcggcggtgagcttggaagggtcgcagccgacgtcggagttgcaggcgcagcggccggagcaggaggcggactgcgtcttgtcgcagctgtaggagacgaagaagcggccgttcttggcgaactccgggtggaacgcgaggccgaggaggccgaactcgttgtcgaagtggacctcgtcggtgatgtccaggaacggcgtcgccgcgtccacctgcagcggcttgccggagccctgcgccggcacggtggcgacgaacaccttgccggcctggttgttgaggaacacgcggttcgagccgtccgggtgcggcgccatgttcaggtacgacccgttgccgaggcgctccaggcacatgccgctcgccggcggcgcgacgcggctcgcgtcgaacgccgcggactcgccgtcgaagcacggcgcgccgccgccgcccggcgcgccgcccagcgcggtgcagaagtcgcccgacgactgccacacgtcggtcagcgtcggcgccgccgcgccgccgcggggcggctggaacggcgagcccgggatgcgcacggccttgcaggtgtcccacaccgtcgtgcagtagtccgtcgccgccgccgccgccgccttgccgccgctgagccggctcgcgacgccggtggagttgcacagccgcggcaccgtccgggggctcgtcgtgacggtgaacagctcgccggcgtacgggttgcatctctgcagcagccggcgacctcatcaaaccaagaaatcaaatctccatggaaattccggcgaccaagcgaaggagtcatcataccgcgcagaggatggacttgacgagttcgccgcacggcgtgccggagatgttcatggcggcgaactgcctctgcacggcggcgtcgtccgtcgagttgcagcaggccgtgccattgtagccgcagaaggtgagcgatccgttcaccgtcctcgggaacgctgctccgcggccaccatgatccaaaccatcagttgcaattcacaattcaatcacaaagaaagacaaattgcaagaacatcatacttgaatccatgcacaattgcgcgcaatggccatcccggacggcgaggagaagcacggcggcgatggcgaagagtagtaccgccccggtggacgacgccgacggcgccatggtggattcagggaaggagaaggtgtgaagatgctcagaggcagaaatggtggacaactagtttgcacttatatactagtatataagtagaaggcagccattgaccaatgcaagatcaagaaattcaagatttggtagtaaaagaaggcaaacaagtggtaatttttgggtagaattaaattctgatttctgaaagttcacgtgttggatggtgacaactttctgtacacattatatatcataagatgagcattagcatctggtcatgcactccaatttgcaattaattaaacaaggaagtcgcatggagagagagcagacaaatgtgcttgtttggattgtgaaagtgacaaggtgaaatcgacagcaaatttgtcaacggcctatttgaagtatggagttcagagaatttgctcactgcaaatacccaatgccccaatcagctgaatattttcactcttgaacctgaagatcccagatccatcggtttcagactttcagtgaactacaaactacaatattgtattgtttttttatgccatcaggaaataaagcatgcagtagcatcaaagctacatgtaacttgtaaaatcttcatgtcagagcaagaaggtaaagttggtgttactctttaccatctattgtcataacaactaacaagtggtattagagattcagaacatcttgacagtttttcttttctcgaatatgcagcagaactgcatatcattgcattaagaaggaacatcttggacagtcaactgggacatgatagttcttcagtggccttgtaaaccctcttcatcactgtactaattgaacaacaaagctcctggattttcttaaggttggttgtcaatttacgaccagatagttcaaagcctgtctaaagagacttacctaattgcaatttcctttttcatacaggaccattgacacaagtggggatatatcaatagatcatgaaggtccaaatgtaacagaaaaaaatgattagacagcaacagttgaccttggaaagatatgaaagctttgagtcgttgtagtttggattaattaaaggcacaggaaggtaggttactttggatacttgaaatttgtgcttcttttaaggcccccaagggaagatttttagaagaaaattgtttacatgaggatactgaagtcaaagagagtgagcaagtgggtttgtattttgacactggataagagtactcacatggatcaatggacttataaacagtgggagatatctcacactggttaggggaaaacccagctatgatcactcagtagtagtggagctgaagttactactaattattagtatcatatctgacagtgattttggtctcaaaagttacaaatgacaaagttatgcatgctgcctcttctgtcaccaaatcatcactccaagcctttatgtgcctatatgtaatatattatgatatagggataaattttataacctttttacaatgttcaaataacaatgccttttgagggaaaaaactgaccctgggtggtaggcaagtccaaaataatttttaagtgaatcttttgagagcttcgaaaaggttagatgaaacttaaggaaaatgatatgtgaaaggattttttttccctacatgcaaaattatacaaaaggagttgactatgggcatatggattgatgtgcccagaacaataaagttacttgttcttagggtaacattttgtatagcatttaaataaagaaaattacctatgcaaagctaaatatggaatatttgacgga

SEQ ID NO: 13952 - DNA, 24446 bp, Oryza sativa
  unsure (1)..(24446): unsure at all n locations
agctttcaaagtttgttttaaaatataacagaacttttctactaacattttcttcctaaacaaatataaccatacatcattcaattttttaacgtaacttcacttcttatccaatcacactccttttcatttaattttatatattttcttaataaccgtaatagaggttgtagttcattgctcaatttcatcaggaaacaatcacattttcaaagaatgtgacaaaaacagtcacgaaaaatattacctctatcccaaaatacttgtcattttgagtttttgtttgtaacatttgactattcgtcttatacaaaagattatggaattattatttattttgtttgtgacttgctttattgtttgctcattcatcctttttaatattttattttatttaatatttttatttattttattttgtttgtaacattattcatccttttgaatattttctctaactttttaaataagacgaatggtcaaatattgtaagaaaaaaagtcaaaacgacatctaatttgggacggaggtaatattaatactagtatcaaccgcaattattgagcagctgatactaatacacttaattaatcacaaaatactactctatccattccaaaatataaggcacaaccactcttaacccaaagactaagaaataattattatcatctcatagtctggattaccctaataaatagaatgcatgcaaccaataaaattagatatctgatgatgaacgatgtaaataatacggagtaatattttagtggaaacgatatgatagttaatgatatgtatgcacgccttatattatgaaataactttaaaaagtagttgtgccttatattatggaatgaagagagtactcaaatatgttgggattaattgcttttgtgatttttaattggtcataatggcacgtagaagttagaacacctccttgcccagtatgtgtcacgacggcccggagtgcaggctccgatggtgatgaccaggtacgccggccaccgctccgtggggagggcggtgaggtagacggaggtcatgagggagacgatcatggcgaggcaggcggtggctccacgtgagcttgaacttgacgggatccctccacccccagatgaagcagaagacgaccacgatggagctgcacatggcggcggtgtgggacacgacgaagttgcgacaaaccaacaaagaattaaaccataactaattgggaaatctaaatatcgagagcgttcttggttttgccttattgcgcaacacatccgacagccgtcgagattgctacctggtgatcgatcgccaggagcgatcaggattcgatccctccttccctccacccgatttcctttcttggcaccgtattacttttctattttagtaaatttatacaccttaaatttacatagtttagagacccaaagtttataaatcaaaattttatatatccgattcaaattttataaatcaaaattttatatatccgattcaaatttgaatttgaattcaaatattttttatatatagtatttctatacatctaaagtttatacacctaaagtttatagacctaaagtttataagtcaaaagtttacatacccgattcaaatttgaatttggattcaaatattttttatatatagtatttctatacatctaaagtttatacagtttatagactcaaagtttataagtcaaaagtttacatacccgatttaaatttgaatttaaattcaaatattagtttatagaccaaagtttataggtcaaaagtttacatacccgttttaaatttgaatttaaatttaaattttttatatatagtatttctatacataatttttttcaactttgtgttttttattttttaaaaatttatggtgtagtaagaagagaagaagggaaatagaaaggaagagagtacctatataggggatgagcgatcatccgcccattagccgcccccgacagccgtccatccgcgtctacgtgctatcgaaaagacaagaagccttccacttcaatggcatcaaagcgaggaacctgcacaccaccaaccatcaaaattaaagataggttacactatcctaatctttctttttaacaatacatttgatgacttatatattttaaaccatacattatttttcactttcatttgtaccattattctctactcaaaaaatacgataaaacgagtctaacattaaatatattcaaatatttaaattaatttacttaaatcgtagaaataagttagttctgcaacagaagtaactacctatagcattaaaagtagttatacttatgttgatgcgaaaaacacacattgggtctgggagaactgcttagctccagtgcaggtccaaatcttgatgaggtgtgggcgtgctagtcagtttgatccagtaactgataagatatgtaaacagcagagccgatcggctgtcaagccgatggagtagttctagccgatgccgatgccgatgccagccgatagcgatagggttttgagctatcggcaatatgtccagtgtaaataatgatataaaggcagtcagctggtgataataagatataaaaataatataatccagtagaaatcaatcggctaacaatatgatatgatataacaagtactaatcctatggtcaaagcatacaatattagataaatcaatgaaacctttgttgccatcggctaaatccaacttatatgtatatgcaatccttataagccgatgcaacgtccagataacttatcggctagcaccccgataaaacattagcatgaacctatcggcttaacaagatttatattatcaacaaaaatctagtaggtcgaacttaaccgatgcagcatgagattgtatatgataatctaatactcgatgagccaatagatctgtctaatgtgatggatataacaaatctatttacaacaacattgtgattgtagagatatatcggctaagacagaagatcggatctaaccgagacagttccaactaaaccgatgcttctctaaacacaatgcaattatagatagaattgagatatcaggtaggcaaatatatcaaccaaaccagagcgatccaagagatcgaagcgatgtagccttgaacaacactaacgtagccgatagattcaccagggccggcggaacgtaggatttatcccttcgctggagatcgaaccatcaacagaactgaaccgatgcagccccatgtcaggtgccaaattacgccggttgataagtaaaaccacagaaaagagggtggcgatgctccgagagtagttgtattgatcgagagatattttacagtgaccccaggtgtacatatttatacccatagggagatactagtccttgtcgaacaagaaagaaacttttctaaagataaaaggaaaacataaagtccttattggacactaaatacattttcctaaagataaaaggaaactaacaaatactgcctaattaatagataaactgccatgccgcatcctccttgaactcggtcacttctggataaactttctttaatagattaattttcttaatcgaatataacaagaatccggctattggcgacttgataattctcattggccgattccaggactctaaagccgatactgactttaggccgataataacttcgggcttaccaaattttggcgttaacaactgaccgattagttgatgatagctgagatacgaaaacgtgtatgttgtactgaccaagagacagagaaatgagaccacttaccaggaaaaaaggataacatattatctgttagttatcatgtgattcacgtcaagtgcatgttgctgaggctaagatgtcgttacactactatattttcttttttcttatagaatctatgatgacctatattttttagactctatattattttaaagatccacttgaaccatcatactctacttaaaatatgtgataaaataagtctaatatcaaatatatttaagttatttattttttaactctaaaagcatagttacttccaataatgtgaagagttacttccttacagcaatatagttacttctaggcaaaatttgttacagacatccaaaaaaacatgtaattagccgagggatatcgtaagatcgtgaaacggctaagagacactctaaaaaatgtgtaattagctgttggacactttcaccattattttattatttttgggctgaatggagagagaaacaattcaaaaggaccagattaccctcagggctgacaggcagacatagctttgagggaggtggcgacgacttccacggcaatggccttgaccggtggcgaacaatagcggaaggcggtggactctcaagccatgtcgctgaacaacaacgagtagttgtcgtctgcggtggtgacgagcaccggcatgcattcgatgatgatggctccctcgatgcaatggatcaccacggtcgtgcgctcgtgcccgctatgcgtgctgctgctggtgcaggtcacacactggcccaatggcgataaggaacttcttcacaggcgagacgtgaaatacagcctcactaaggcgcttgtggcgttctacccgttcgccggccagcttggcgtcgatggagctggccacatccaaatcgactataccggtgagggtttgtgccgtgccgcgccacgccgtgagctacacgacttgttcgccgacgccagacttgccatgcgtgctgaactgctgatgctggttcaggtcatgtacctccgaggctccgatgtggcggcgtagtgctcagcctggcgagcattgcccgtgcctccgccgaggcgctgttgccgccgacggagacgccgcacctgtatcgggactcggatgtgcttcgaccacaagctgctcaccacatgtgccacgtgtattatgctaggtcgctaggaccactcaagcagcgccgctggcatatgcggtgatcacgttaagcaagcagcagctagcaaccagcaggtgcaagcaaatcatcatcatgctaaacaagcagcaggaacaagggtgaagaagtgaaaaaagagaagggcaaaattggcacttcacatgacttctctctcctcaacccgatgtatatattattttattgcttatagtgtccactagcaaattacaccttctttgagtgtcttttagccgtttcacaatcttgttatattccttagctaattacacattttttgaatgtcctgtagcaaattttgcccttctaacgccatgtggagttaattcgctacagtacaattacttctaatatcttgaagaattatttctatttctatttatatttacttccctctaggagtgtatttccttttaatattacgaagagtgacttctatttctttaaaagttacttccctccggtagtgcaattatttttaatatcgtgaagagttattttctatatgacgcaagattttattttttaaaaaataatatagtgattactttaaataaatactatgtatttacttgaaaatcttctctacacttatggatttactccacttaatttcttattttcaactcgtcgtaatgtaattacgtctaatgctataaagagttaattctattgtatagctaagttatttttatgatttaataaattacttttagattaaattgaattatatttaaaattgaatcttttttgtcacatattttgagcgaagtacaatggtgaaaaagatcttaaaaataatatacggtttaaaacatataagtcatcaaatagatttaaaagaaagatacgtcagtgaccaatctatataagtgcttgttgctattttaaggtggtaaaggaggatttatacgtcacgtgggatgaagttgtctgtggtttagccaaaccagcgaccgtgcacagtgtaatcgtgtccataactaatatagatacatgtgctcatagctatcctatctttctataaagttaaggcccactaaattctaaagttcaacatgcgaatatatcacatcatccactaataattatgacatctcaaatctcatgcaagcatgctaatttattaacttccagagctttaaaatgtaaacatgttaattaaattatcaacccacataatcacataatatttcaatatatatctctattatttttttataatatcctctgtatagttcatcctcacttaaattttagagctttaaaaatccaagcatgttaaatcatcattctacataattcccaatatatttcgatatatttttccataattttttataatatctatattactacacaattcatcctcacctaattaatgttacttctctcttctctcattaagccataccacctcaattgtttctaaccatcaaatgattaacctacggtgggaattatctctctcattttcttatctcataaagccacattatattacttttacatttagatcatcattttatatactatttaaattatgataaaccacatcaacttatacaagtttctatatatcgtctaactgtcttacatattatttctatttattattatcataccaaacttctgcagcaacgcgtaggggtttcatctagtatttattatttttgttacaacttgtatgagtcaaaccgtgtattatttgtcaaattttcgtgtaactgtgacatgtaagaaataaggtgacatcgatctgtcgagtgattgcatgagtcccattaattaattcctatatctgtatgtctccattactgttgtgagacttgacgtcaaccggtagcagtgtcttctgaacaaacggtatgtagaaagcctccttccctaatatgagtatcacgacgaccggagtgcaggcgccgatggtgatcaccaggtacgccggccacctcttggtagacggaggtcatgagggagacgatcatggcaaggcaggctatgacggtgagcatgtgtnnnnnnnnnnnnnnnnnnnnnnnnnnnttgacggggtcgcgccacgcccagatgaagcagaagacgacggtgatggagctgcacatggcgacggtgttggagacaaggaagatgtcgaacgccgcgcggtcggcgtggatggcgaggccggaggtctggttgtagccgccgggcatggtgaaggtggcggcgaaggtgacggtggcgatgagagtggccacgagggtgtaggtgccgacgccgagctcgaagtagtcaccgttgccggagccagctgacctgtggctgcgcctgcgcagcgactggtacgtcgccaccggcgggaggtgctgcaggttcttgcaccgggactcctcttgcttcttgagcttctcccagaggtagacgacgtaggcgtccatctcgccgacggcgagacgctcctcgacgaggctgcgcgcggtgtggccgtcccggttgaggaggcaggggttgacgcgggggtccttgagcagcgtcagcgttgactggacgtgcgccatcttggcggcgaggtgcagcggcgtgttgccggcgctgtccccctggttgatcacctccgccgggccgatcaccttgaggaggcccctgagcgtgtccacattggacacggcgacatggaccgcgttcctcccgtccttgtccttactctccgccgcatcggggctgtgctgcagtatctccgtcgccgccgcgatcgagccgtttacggcggcgacgtgcagcgccgactgctgccggtcgttgggccggctggccagttcaggcttgaggtcgagcagcatactcaccatgcgcgtgtcgttcttctgcgcggcgtagtgcagcgccgtgctgccggccgagtccgtgatgtcgatcagatccggcgccgtccttatcagcaatatctccaccacccctgctccacatgtgtgtatatatatatatccaaggcttaaattttctccaagtttggtttaaattcagcatttgtttgttcacatgtatgcatgaggatcacaatgccaaataaaaccacacattttctaaaagaagctaacccgggaaaagaagaatatatattaaggcctcctttgaacggtaaattaaaaaatgggggaaaaaacgtaggaataagatatcctattgaaatgttcactgttcattcatttggcttgcgcagaattggagcagacgagaagcatacgaaaatttccttcccctatgttaattttcaaaaggaatttcacagttttgctaaaaaaaggaatttcattggagaaaaaaaggcctaaaaagctatttttctattcctaccgtagaatcgaggcaagtactcaggccccgtttggcacagctccagctctcaactccaacttacctggaactggagttgtgccaaacattccagatcctccgtttttaggagcggagttgggagagctgctccacaaaattatactacggggtggagctgggtttttactgctccacagctccactccaccccaaaagacccactgccctttaattttttagtgtatttacataaaaatgccattaaactacacctacccacctcctctcctcccgttctctctcctcccccatctttctcccgagtcccaatagctgcggcgggcggtggtgggcggcgtcggccacgacggcggaggaggaagagggattgggggcgatggcgtcggttgccgcggtggagggcgtggcggtggcactccggtcggtgctatcccgcggcgggacgacgcgcgggcggcgggcggcgagctagcaggcggcggcggcggcggcaggcacacggcggtagcagggcgacaggacgacacgcgggcggtggtcagcgagctagcgggcagcggccgtcgggcagtgggcggcacgcgctgcgacgacgcgcgggaggcgtccggccggcggcgggcggggcacgcggtgacgacgcgcgggaggcgccggccatcgacgggcggggcacgcggcgacgacgcgccaccgtcggcgggcgacgccctgggattgggctgccggcggctaggtttccttttttttttcaactctttttgcaatttattttttttttcaattttttttcagatctagagctgaaaactagccaaacacttctcaacgagtctccaactccaataagagctagctcccactagagtaggagtttggagttaggagttggagtttgaagccctaccaaacggggcctcaatgtagacatcccttttagagtaaaatttcataaaactctaagttctgaggcatttgtaacgtaaatccctaggtattgcaatttgtttcattaaaccctgagttttgaggcaaaaatgttacgtagaatcctgattacaagcttatatcgtctgtttgacaaatatatttattcatattaatggtaataaaatttcttttaagtacatatacacattagctggtacatttttaacaagtgttggttatcgatagtttgattatttgtgtgtattaactagttaatgtgtcattatcggtagggaattatgttgagctttttcaatagtgtaatgcaaaaagtgagaaataaaataaagtacataagagggacttgtactttgaatctactaatatgaatttgttttgcaaatatcatgtataacaatggaatatgagctttttttttacataaatatggggcatcttgaaatattttgccctaaaatatgggatttttgaaacaaatccaatatatgggctattacgttacggatatctcgaaaccttgggctttatgaaatttagtgattttactaattactccactaacattattaacaactattaccttttaattctaaggcaaataaattttctttattattatataagccaatagattacatcaactatgtccaaacaaacttgagcaccttataaaaaagagtaaatttaatagaatcctaggttttggggcatgcataacgtaaaatcccatgtattacgatttgtttcacgaagccttatgttttgaggcaaaatgttttaatgaaccctacgttcaagcttacattgtctatttggctaatatatttatgcataataaattgtgaaaaaatagtatgtggtatttttaagtgtacatacacagtagccactgtttcaacatatgtgagttatgaatagtataaccttttttttaattaggcaactagttgacctaccatttatattgaggattgtgttgactttttgcaatcatgcatagtgggtgaggaaatagataaactggggtgggagggatgcacattttgagcacacttagaacatataatttaaagtactatatattatatgtaaaatgagtaatttacataaatggggttccttgaaatattttgtcccaaaatgttgggtttcttgaaataaatcacaatattttgggttttgcgttacacatgcctcgaaaccttaggttttgtgaaatttactctttaaaatatatatagtgtacatattatgttttagattctaaatggtaaatttagaataaaatctaaattgtattttttaaaaataaaatcagaataaaatgcaattttcaaatcagatatgaaaacatcagcatagagacaaaaaaaagccaatttgtactttttaaattaaatttctgcagaagagtttttgtgatgcttgatgtttgaatgtattttcgggtggtttcatatactgtcacaactttgaaattaaattggtatgcatgtctccattactccatataaaacaaattagcaccataatttctagctagcatgtgtgcatgcctacatgcatgcattattaagtttggaagggtaattatgacatttaatcatatttcctcatatgctgtgatatattaatatcaatgagaaaatatttttgtttcgaaaaaaaatgaataatcaactgttaaaatctattgtatcatcttagctctttggaggtaagaaggagcaccataaaaggatctttgctcgtgaaatgcttcgagttgcatggattaaactacaagtatgagttttatcgctaacttatactccctccgtttcacaatgtaagtcattttagtattttccacattcatattgatgttaatgaatctagacatatatatctatttagattcattaatatcaatatgaatgtggaaaatgatagaataacttacattgtgaaacggaggaagtactcaatatttttatgtttcataccaatcaggcaccatttttatatgtcccagttgtttttaaatcctcattttgcacacacattactgttcaaagctatcatatttttctattcatatgtttaattttcattatattcacgaaagaattcccctatgcccatgaaagtttagccgatcccttctacgtccctcgagttttgctcactctcttatagctcttgaattttggttttgatccatttcatacccattctcttagttgtctagttagttcttatagaaagatccacccttaggcataaaggaaatgtggaattttgtagactatattgttggatatggaacttaattactccctctgtcccagaatataagaagttttagggttagacacggttattaagaaagtagatagaagtgagtggtggagggttgtgattggatgattagtggaggtaggtgggaaaagtgaatggtggagggttgtgattggttgggaagaaaatattggtggagaagttgttatattttggtacaaatcttgagggctaaaaattattatattttgagacggagggagtatataagactattgtatttatgactttattgtacaaaggtattagtattcagaaagttaacttttacataatgacaaaatatattttatttatttatccatagagtatatgtagcataattttatgacagaactgcaacagatatgtccacctttgtactccctccatctacttttaatagtcatatttctaaatttaaaaaaattatttttgataggtatatttgaatccaacaacctatcatcttaatgactttctcgcatttaatgcgtgactctctattcttccacacaagattggatacataggcatcgagaaatgtaaatattaatgaatcgtttgtttacaaggaatgactagtagcatgtttaaatggatgataagtagaattacttatccttgatctgtgtactaagatgaaatatgactatcaagagtagatagagagagtatatattatataaaggaatgctaaccaaaacaatgtttacatgctacacacactttaatatatattaaaatttctatgcatcatacttcccatacaacaagcatatgaatatcatagtgtcacacaacaaattactacatttctaacaatagatttaacaaacttctgcatattccttgcacatctaatggcaaaagtaacttcttttacaccgcggttaagtatgaaaggaatcaaaattaaaattcagggttatgcaagagagtgatgaaaattgaggggcatagaaggaaacaactacaaattttaaaggcatagaagaaaattttctctatatttataggtcccaaagaaccatatgtgtgcgatcgggaaaggaggttgagaacttctctcccgcgcacggctatcgggaaaggaggttgagaacttctctcccgcgcacgcaaaacagagtatctgattagcatattattaattaaatattagctaaaatttttaaaaaatagattaatatgatttttaaaaacagcttttctataatatttttttttaaaaatggactgtttagttgttcgggaactgaaaaatgagaaaataaaagttgaaaaaatgggaaaaagaacacaaaccaaaggagttcttacgggtgtggccaccaaggacggcctggtgtagggcggtgccgcggacgttggctgtggcgacgaacttctcggggacccatgggatgtcgaggatcttttcgacgacgtcggtgaggccctcccgggcggcgatgtgcagcggcgtctgcatgtccacgttgggcgtgtgcccgcagttgggctccacctccagcagccgcagcgccaccgcgctccgccgctgcttcaccgcctcatgtagcggcgtattgcattcactgttcatcatcatcagttggtcctcctgcgtggatgtgtataattaataataagtttaggtaaatattacatgtgagaaaagtctattcatccctcgagggatgtcccttcgtttttcatgccacctaaaaagtatttttttcttgaaaaacagtaagatagttaaatatgtgatatgcaatttcaccagcatgcaaaattaaattcagtttatataagaagaaacaaaataaaaatttcctttaaatagacgcgtaatttttattcagatttattgtttttgttttaaattgtataggttgaatttgaacttacatatttgtggaatagcatatcacatactctctctattttaaaatataaatatgtttagctatgaatctggacaaacacattcataatcatagctaaaaattactcacttcattttatattataagtcgttttaactttttttcattagtcatttttaagtttaagtaactttataaaaaaatatagtaacattttcgatacaaaacaaacatattatcagaatatagtgaatgttagttttggttaaactaatttggtgttatagatgttgctaaatttttcgataaacttaggcaaacatatttagttagagataatccaagaaatgtcattgacaagcatccaaatttaagaaatgccatcgataagtatgaattctaagaaatgccactgtacaaacgattttatttcagaaatgacatcaccattagggttacgtccattccgtgccgttaagtgctataggatgaacaatgtatttgacggcgctgtcagggttatggataccacatacctaatagtagttgactacatctcggcaggacccaccacataccatgtcctatacggaaacaaccttcggatataggaggagttccgataaggaaagacaacaaaagttcttcatggaaacgacaaggactactcggattgtatccatattggtttccctagttctacttagacaaggggacacctatgggtataaatacaagaccccctaggaggggaagagggcggacacccaccagggagaaccaacgcgatcaacacggtcaccacgatcgagaccccccatgagacaatcaactcccaacacaatcaacatagaagcctatatacgccaagacaagccgccggatatcgacatcagagatacgcctagatcgaccctatccggtaccttcagaggccggtcgtagggatctagcactgtctctgattccgtcggccgcgagctcgaggagaaaggctaccctgttgtcgactacgagtcagaccttcagaccgccatgtcgacaacagttagatagactaccccacatattgtacttgtgtgattatggtgaataaaaagcaacatcggctccggccaacaggatgtagggctattagctgattgctcaggggcccaaacctgtataaaaatccctgtctccatctcttttacctcagtctcgcgtatatcctagcaccgacgatccccatactgttcaaataccgtagtcgagacatcaaacgtcgacagtggcgcgccaggtagggggattttggtgcttcaggatttcgacaagataggtttaagagatggattcttcgacaacaagctactcgacgacttcggctgtgaggagatccacccggccagaatacatctctcccgacgagactggataatcgtcatcaactatttgatccggcgagatcggacaagctccaaaatacagtcgccgtgaaggataatgattcaatatcgtcagatacgggacttcggttcgtgctgactacacggtgaactgacttccgtcgccaaaaatcgactactgatacgaccaggtttaccgttctaattttaattttactcatatcggtattatttcttttggctactaattgtatgttcgactggtgttttcctgtttatgaatgcactgctgctgactgagtccgagtcatgatcactagttacgcatacatatatgtggaatccgaacacctatagtcagatcaataatttattatgtttatctagagcatgttttttatacaatatctattgcgcggatgtttccgacgttaaaccaactacggtctaacgctgggggctcgctctgttatcttctgtataaatcatgcttgtttacggtttacataatgccctgatatttacatctgctcgttatatcctgataatgctagaagatccatgcagtttttgagtacatactcgatattatctgctatatgtcttgtcttctagaaaataattttcaggaacaactgagcactcgagtaggttgtggtcgagtacgctccattatcaagaacattctcgacaaatgcggagttatcgcacccaacctaccaacgaagaccgacgacctatctcatagcaccggccatggctggactagtcgagaaaaggttgttaacggataattcctcgcgaacgtcgtcagcttgatcacccgacatgattgcgaacggacatctggatatgctataagttgggtacgtgagtcatgctggccacatgagatacacatgcaataaaccaactctagcacttccattggtgttcgagagataattccgctcgctcactggttttcgcaccaatacgtagcaatctctcgcaccgcaacttccattggtgtttgagagataattccgctcgctcactggttctcgcttaacttcagatggtcaaggtacgactacaacagcgtagcggtcctcgcaccatgacttcagatggttgaggaacagctacgactggtctttgaccggcagcgtagcggtcctcgtaccacgactccaaatgatcgagggacacctactcaccggttctcaaccagttgatcgtagtgatctctcgtacatttgcttcaagtggtcggctacttccactttaagtggtcgagttacgactacagcctggtcctcgaccagcgatgtagcgtctctccgactacttccactttaagtggtcgagttacgactactgcctggtcctcgaccagcgatgtagcgtttctccggctacttccaccttgagtggtcgagttacgactactgcctggtcctcgaccagcgatgtagcgtttctccggctacttccaccttgagtggtcgagttacgactactgcctggtcctcgaccagcgatgtagcgtttctccggctacttccactttaagtggtcgagttacgactactgtctggtactcgaccagcgatgtagcgtttctcccactatttccacttcaagtggtcgagttatgactactgcctggtcctcgaccagtgatgcagcgtttctcccactacttccactttaagtggtcgagttacgactactgcttgattctcgactagcgatgtagcgtttctcccactatttccacttctagtggtcgagttacgactactgcctggtcctcgaccagcggtgtagcgactctcctactacctctatttcaacaaagttgatagcaggtacacaatatcgctaagtgttttacccagagatcccttaccacgacgacacctagtgttgaaacctatcctactgtccctttacgccctcttgacaaggcctccgaggaacctaagggaacttcggctggggatgctcagagccgataaggccttgtcggatcctgtagagacaaaagaccatgtaagatctggtcgtgtaagagttctcgccgtgcgtattaaccaagccgtgtaatcggaaattgacttttccaacttcacggctgggggttaggatcagtgcttattcaaccaaggcaggtcaagggtccaagagccttatcctccgagaacgattctccgacgacaaggctgggggctagggagagtgtatgactctacaaactgactgatcgaagtcagtaagagagaagacgctcatacacaaaacattggtcggtaaatttaattcattttcaatttaccatacatattataacatgtcaccctttgggcattcgctcgggggctatttctatttgatattcttttctgagtattgatttcaggaaaattctattcgacattgacgaacactccatgtctctatggttctacaccaagacaaagctccttcgcagactctacgccttctcgatcgctcgagaacggttgctggatctcgacaaggaatacggaatgaagagatggtgtacccgccgagatagaatttcttgacttcaatccaaattctcgattacagcaagacatgagacttagtcgtacactctgtactttcttggttgacatcagagattgactcagacaaaccctttaggtacccgcacgaggctgacaaaggaagtctaacgttatctctgaactcaccgagaacggtcacatgagctagataacagttactccaaggtctgcgcgtggttgagaatatgaattcgttcatttgcattgaagtcgggggttactgtcagggttatggatacaaaatacctaatagtagttgactacatctcggcaggacccaccacataccatgtcctatacggaaacaaccttcggatataggaggagttatgataaggaaagacaaccagagttcttcatggaaacgacaaggactattcggattgtatccatattggtttccctagttctacttggacaaggggacacctatgggtataaatacaagaccccctaggaggggaagagggcggacacctaccagggagaaccaacacaatcaacacggtcaccacgatcgagacccaccacgagacaatcaactcccaacacaatcaacatagaagcctacatacgccaagacaagccgccggatatcgacatcagagatacgcctagatcgaccctatccggtaccttcagaggccggccgtagggatctagcactatctctgattccgtcgggcgcgagcttgaggaggaaggctaccctgttgtcgactacgagtcagaccttcagaccgccatgtcgacaacagttagatagactaccccacatattatactggtgtgattatggtgaataaaaagcaacatcggctccggccaacaggatgtagcgctattacctgattgctcaggggcccaaacctgtataaaaatccctgtctccatctcttttacctcagtctcgcgtataccctagcaccgacgatccccatactgtccaaataccgtagtcgagacatcaaacgtcaacaggcgcagattggacggaaccctaatgacgatggcattttttggacacacacttgtcaatagcatttcttggattttgacatttgtcaattgcatttcttggattatcacatttaattaagtttgaccaggaaaaaaatcaaagtgacatagagtattatattttaggatggacgtagcattaatctatcttactaatgattttttggacgacaataatccatctccgaggtatgtgacctggtgccagtcagccggtttagcttaatatgttcagcccccacctcctccccacccacacaaacttttctattttattgttggatccgcctctgtagctactgaagtgtaacagcagcagcactaggccaggatgccactgaacagctgcagcgccggtggcagtgtcgatgtaatatgtgttcccttcgtcttgaaaaaacaacattgataataattataggacataaacgaatatggatatgagccatattcagattcactcatatctagttttgatgtactaagttatattccatccttaccaagaatagttttcacttttctttgacggagggagtactccggagccagagctgcaccagtacacgatagattttcgtggacgctatccccttttgtttccatgcgattcgtaagtggaaccgcacgaaaaaataggggaactggcgcctggctgtcgcccacacgggaaaatcaattttctcgtgcggtcctcctaaacggaccgcacagaaaaatgagccgattttccagtgcggatctattaagagagccgcacgcgaaaatagtattccctcttttccctctcacccacttcaaaatttttcctcatttatctcttttaatttctcctcacacccctcccctcttatctctcttctctctccccctctctctgtcacacctctcctctcgtctcctttcggcacgcggggacagtggcggcgcggcggcggcctcagctccacacggcggcggtggaggtacgggatccggcgggcggcggccgtccccgcacggatccggtggccggccggcgttcccccacgcgggatccgctcccctccccagatccggcggaggggaagggcgtcggtggcggtgcggccggaggggagggtggatccggcgggcagcggaggcgggcggcgcgaaggggagcatagatccgtcgggaggcgggcggcgcagatccagcgggcggcgacgcagaggccgccaccgatgaggaggaggaggaggaggcggcggcggcgccgccaattctagatattttattttcttgaaattttattttttttcggtttttttcccgtgcgggtgtcataagcggcacacacgaaaatcggatttttgcgtgcgggaccgcacgcaaaaatcacgattttcccaaacatctgggtgcgtacaggccgtccatccatacacaaaaatcattttagccgcatgcaaaaatcggtcatgtagtagtgctggaggcacccacaactagagattcatcgtgcatgggtgaggtgtgtgtgcacctatgtgtgagcattattttttttttcaacgagtgatccgactggaagaagggttatgcgaggactttgagatcaacagatttcgctttggtcaacccttatttactaaattttcacattggattagagttagacttatattttcacttaaaaccatatatagttaccatcatttacactttggaccgggtttcacaaattacacatacacatagtacaatgattgtagatctgatctcatttcttttttgtgttagaaaacttagaattcaataatttgtactaacactacagttggatattgtaaaacatgtaatatcttttctagaaaaatagttcttaaacttaatatttcttcatttttttctctagtataagggctgtgaatgttcatatgtagtagtaatgaagtcccattagtctgatagtctatcatataacatgttgcaatcttgttcttgtgctaagcatagttgcaacggaaacttttctaggagaagttcgaatctgttccgttcggatattgatcggtcttggtttgacatggtttacgcgttactggttctcggaagagtcaatttctccattagctataccctttcttaccctacctttggacttggcaaatttccataccattgtctcttgtaaaatgctaagcacctagacaacagctggtgtgatggtacctataaaatccggtccaaagtgtaaaaaacagtaattatacgtggtgttaattgaaaatatgaacctagctattacccaatgtaaaactttgatcaataaagatggtccaaaataaaatttactcatatagagtaaattattatatcaatttagttaaccggtctgggaggttgttttatttagtctatgtttttttaacggatttagtctacgttttcaactttacctcccttgtttttcacgtgcatgcttcctatacactgctaaactgtatatttttaaaaaaaaatctataaaaagttgctttaaaattatattattttaattttaagttttaagctaatatttgttggatagtatagggagagaaatattgtgtaatgtggcttaacttgtattaagtatcagggggaccggtatatatggaagtacatggaagaggagataaggaatgattacagatatggaaggtatccacataaatcaatcatatcctaatatactaatctaaagctagcagtgtttgccagctttgattgggccacgtggcagtctttttctttcaaaataaatcctagaattatgtgaaagaaaaaaaaggaaaaaagggcttgagcgttgctgcattgaagctctcctgttatgaggtgctagatctcttataggaataactagcgattaatctagaagaatccagggcatctaaaatattttgaactaaggaccaaatataccaagagcctaaccacaagttgatccgagtactactctctataccaagagcctaaccaaaagttgctttaaaatcccgccgccttgtgcagccgtggatccatcatatattactactctctatacgtacactagctagagcgcacaattgaactctccctttgaattgccgcagtgtggcagccagcgatttgtacgagtagaaatgtagcggttggttggattcgttgcttgtgttgctgggtatatatgtacctctcctgtcctgcaagctacgtgcactggtatatattcgttgcttgggaacatccccccccccccccacacacacaccaagtgttaccaaccgggactaaagatggctcagccggtttagccatctttagtcccggttggtgttaccaaccgggactaaagatagagctgacctttttttttttgcatgcccctgttgctgcatgggttatatatatatatatatatatatatatatatatatatatatatatatatatatataaaccatgcatatatatgtttcaatacatatatatgcatacatatatatatatatatgtatttatacatatatatgttatgcaaatgcatatgtatataggtatatatatgaacaaaatatatttatattatagaaaatgtgtacacatgcatatagaaacatatgtagtcatgtattaattacaatccattatatgtcctagctagctacgatttcgacgtagtagtactcgctgctagctcagaagctaaggaccggtgaattgtgtttccgtcgtagtagaattcacccttgggatcaaggatttcttcgttgatgaatcccatgagttgttcttgaaccgccgcgataaattccttgtgtgtggtcaggttatccctcatgcgaataaactatatgaatgtatgaaattgattagtaattaaacaagaaatcgctacgtaatgaaaatttgaatttatttgtacgtacatcgagctctcttgtggtgatgatttggtctgcaaggcagtggcaatactcgcacacgtaatagccgcacaagttagttccctgcttttgctttgcgcactacaaataaatgacaaacaacgagagatctaattaatatacacttgtatgtatttgaatcggagaaatataaatgtagagcatgtgtactcacaggaaatttgaacttccgcctaagtctttctctccatttgccgcggaccaaatgacggaaccgataccaagccctacatggagtttaaagctatgattcgtagtagcaattaacataacaagattttcttaattaacaaaggaacttatgacggtatctgtctataagttcgaaaaccttgtcaaacgtagactcttttttatccattgagtcatatatgttgacggtgcaggcctccaggtcgatgagtaaaagcacccagtggaatctgcaatgtgcgtgggatgcattacatatgaaacacttagcaagttcgtacgggaatgaaatttggtatgtaggaagacagtaaaattaaactaactctgtgttgtatggcaacagtatgaacgtcttgtaatgctgcgccttcaggagatggacgagattgtcctctgtttcttgtggatattggtcgagcattgcgacgtttactttccgagggtcgatgaatccagtatcgaaaaccctccgccgtcgggccctttgaatctccattctacaacgataaaagggagtatattattttctatggtctacttatatacaaggacctaattaattaaaggagacgtatagtaagaaatctaactgaacgatatacttacaaaatccagcaactcataatacagacgtcgagggcgtccagctggtatagttcgtagattcccctgaaattgatccagagaatgtcatctccttgcaagaagtccgtgtccctgatcctcgctccgatcatctctctaccggtggcgctcatctccatgtacagctgatggaacttgtacatttgtgtgggtagggactgcagcagctcaggcttgacaagcggtttaccgagttcgtacatgtatttcacttccgccttttcgattggtgcgactcctagcaattgatccgtagttagaccggtgtcagtaataaattgttctatcgtcatttctttaccggtcaccaacggctcgatctcctggtttggttgctctccaagctgagggactggtttggactttccagaagatgctttcttcagcgttcgctcatagtccgatagcttgatggcctccttgacagatgcagacatacccctgaagaagttcctgacactggggtctatagaaatcttcttttctggacttcgaggcttgaattgtctcttgacttctgatgcaacgtaagcgtcaagctcctcttgcgtgcaatcgtaccccgggtccttgttcttgacggcgtcaactttcgccttctttgttgcccttgtgtgggcaagcggtggagctgggggggcccttgactttgaaggtgccggaagaggagcttgcgggggagtaggtgtaggagcacgaggaggagtcggtgcaggatcctgaggagtcgatgctggagcctgaggtggagacggtgctggcggagcatgaggaggagacggtgcaggatcctgaggaggagatggcggagccggaggagatggtgcacgagacgccgcttgtcgcccagggaggatgatgtaccgcctgcgccatagaataatggcatggcatgtgtctcgtagatgcgtacatccattgccgatccatctacatgagtcaaaaaaaccgcacacaaataattattcttacaataatgacagtcatacaataattataagatatctttattcatacaaaaatcataaaatatcacaccaaataattcttaaaaactatttgtaaagttttaaactaattttaatgtgttttacttcttttaatttttattttagtttgttttctattatttaatattaactttcactagagttttccttctcaactattttataaaaccttgtttagcaaatgaactaaatttcta

SEQ ID NO: 13953 - DNA, 7073 bp, Oryza sativa
  unsure (1)..(7073): unsure at all n locations
ggtccactgtgcccggcagcttacctgctgctggtttagctttcgtaggttgagcttggaagaagctagggttagggtttgattgggctgttgcgctgttttcttcgtggttgcaggtgtaccgccctttgctgaacatctcgggggagttcacggcggaggacctcgaggaggcgcttatcactcccaatagtactctagatgatgtgcacatgccactcctaaaggtgagtgagccctcgggctgttaagttcatgtcgaatttgttgctgctctataggctggaatactctgtctgtagttctacctccacgtggttcattggttcatcatcagagagaggatagaagttgtgtccttgtgcttgcaagaagtaataattataatttttttgggttctttgtgactttgagttttagcgctgttgccagttatagtgacgtttttgctgatttttacatttaatgtatgagaaaatgccataatagcagctacatgttgttcttgggcttatgcttactctgccataactcgaatatacctcgttaacatttctgtgtatatttgtatttgatcatgttgtttgtaactcctattttgatgtcttcttagacaatacacgctattcgattagagctatcagatagactctgcattatgcatctgtatgttagtagatattttatgctcaaataaaaatgtaatagtatgtgaaagttctccatggaatctcatgatttttattgcacacgcagtcaattcctccagtaacccgcatggctatgggacgtggaacctgggtgaccgtcctatgtagaaagctaagggattggtggcattgggtatatgattaatattctatgtttcagacaactttgataaataatggttgcagattccattcaattggtgaggtattaactgtctgaactgcaggttgcagaaggtgatataccaattgttgcatcacatgggttagtttagctcacaagaaatcattgtgtaatctcctgctacaaatgtatatttttttcctcagcattgttttcccaactgtttcatcttccacagaactgaaattgaagcatacaaggttctagaaccggcgactcgtttaattatcttgaaagcaatatgcgatatacgtgtcgaggtacgtgcttatttttcttgtcctttcctagtataaaaccgaaggaagtttgtctaaatgacttgattttttgaaattttctaatacgcgctgtagtatattgttataatcatgttgacattcttctgaataaaatctcatcccttgtcatttgtatcccgttatcccacattcgtgtccttgcaatgttgaaaacaacacttgaatatgatgactggtatttcatccactaatccgcttctgcataatattgttgaaacattttcatcgacctgtacaattctggtgccaaaggaaattcttcatcaattcattaaaaagggaacaataataccctttgtctattcctgcatatgaacctgccagaagttaaagatacattgttgctaaacgattattcctttgaaaaatgaaagcagctgttacttttctatgatgtgcattctgtgtaagggataactactagttccaattaaaattgtagaatttctttttcaagatacacttcctcttttatacatatgtgtaggatattgcctattgtccctttctccttgcacaactgtagagtagaggattctgcattaaccctgatgcttcatagtagaaaaataaaattgaagatgatttgaactacttcctgaagtttaataaaaatacatgcttgatagttgatagtgaacacataatttgcctgctctcttgggcaattaaataaagtggagcaagagaggcatgagcacaagtctgttgaaatcttaactcaccaaggtatgcaaaaatattaaaattttatatgtgaaaaaaacagaggtactatctgcaggggacatgctcgtaatagctaggttgggattattgttgttttggatatatctggaaaaaagagagaggcaattttaggttttgaatcgcatgagcttaactagatgactgattcttaagcatatattttgcagcaagaggatatccggaatttcattgacagttccctaaagcatggctatgacctttctacctttcgtaaagaacgaatagggggtgatgcctatggaatctcatactggtgggtattttttcctagttgctatttttgaatggactgtcctggaagtttcttgttccgatcccattaaggggtgtgctgatcaagtctttcagaacaggtatgaagatgatccgattctcgggcatagattatatcgtgaaattagacgagtggaacagctgaagaaagagccaggaaaaagatctagggggaaaggagggtctataattcttccagttgtgtcctaccagtgggaaactgtcgcatccaactttgacgagtttgatgatgttgcagtaagttgagttcctcatatgtggtgtagaaagtgagttgtagtgtttttcctgaagacttatctttcgacaagggtaaaatgctatgtaacctcaagtgtaaaatgagcatcgttattagaaaaaatgaggcaagagtaaatgctccactatcttataatatggatatcttaacttgcacagggttatagcctatatgattaacttggttacctacacaccagccatgagaattaagtatgtaattcgaaatataaatttgtaatctcgtcaaattgaattaaaaaaaatctagtaaggcatttactggtaagaatacaaaaaattggaactccatgtttatccaggtaatctggctgcatgtggtaaccagtcaggccaagtgcctaggtttctttggtaaactggcttttgaaacctttgcttatatgcatcttttcattctcccatactgtgctgccatctagtgtttaatggttgatcacatgttttcaaaagtatgttgatagtagatagtggtgtaaccaagtcgacttaattataatccccaaccaatagattagtacctaaataatgttcaaaaactttcttgggtcagaacggagttcatttggaataagtgctgatatgaaccattcaactaaagctactttggactgttattgttaaccttgtggcttgtgcttatatttattaagtgtagtgacatctaatgatattatatacttctgccttaggaaaaactcttttcaagtcggaacaggacagaggccaaccttggcaagaagttgaagattgaatatcttccagatattgaaaagatacataaagtatgtagcgtgtttaacccagcctgttttgccagtgaaagctgtttcaagcttgttaattaatgatttacctattttcttattgcagaagaaggagaggttgctcaaaaagcaacaaagagaagcccttctcattgatagcttcttggctccagatggatttaccactggtcgctctcttcgtgatagaaagccagtaacatacacttttggtaagcaccaagagtctaaggctgaacctcggtatagttatgaagatatcccagaatggaaataccatcggtgtggttctgtcatgtggtccagaggtccccacttgtcagtctcatgctagatggtattatccaatcatatatctttgtgatgctactttgttaatttttctttattttgatagcagcgatgctttgttgcaaatgcttcacaattattaaactctctcatttatttccttcacattttagatatccaggtgatctacgtcacttgctcactgttttatttccctacgcattgatatatgccagtaaaaagtcttatttattctcagcagcaaattactgatggaattataacataactcctgaaaattttaaattgaagtgaatctatgttggctagtttaatacagatttatctgacttccagctgtaagataatatagtcagtaaacttccaaaataaaggctgattgttaaatagaggttgctaattgatagccagtaccatgtggtggaactgatctagcttccacattttgcattcactatctatcattcctccattcatgtccatgacaactggagtatgttatatctatttcattacttctgttcagttaacttcattgattcaaattaaatgttttgactctacgtatggtgcagatgaatatgaccgctcaataagtgaggccataaaaataacgaagtaggtggatcgcatctattgctcagtaattttcacttggaataaaaaaaacttttttagagacaccaacagtttagcatacttatgtgcccctttcatgtgcaggaaaggagaaaactctgctgagcctgctgctccagccaatagaaggatccttacgccaagaccggaggcatcgagcaatggcaaggtgaatggcctctcaccgactaccaatgaatatgatggaaattcttcaaagtcagatgactaccgagatagtgatggtgaagaagaaagtgagacacttgatcggaggtacatctttcatagcatttggcatttatcacttgccccattggaatatatgtgttgatgagcatccatggtttgtattgtagcaaccgccggaggaggagatctcagagatatacacgggactttgtcgaggctgtctcagatattgacccgaactttgacagtgacgatgaaatcatgggggaggcagtctatgatgaggaatatctgagaactcgaaaacagcagaagacatcaagtgcttctgaagaggatgaagagttccgatatagacacgaagncantgnnaactgggnaatagaagagagaagagagaatattctttgaggataccagtggagagatttagnnanggaggccacnnanacagacgcnaaaagaaactgcaanaactcgtggcnncggcgaggggccaagcttagatctgttgatgaaatccaaacaggtcttaggcgcagcaagcgttcttctcgtcaacgcattaattaccaacagtatgattattcggacacagacacagagggaggaaaggaaggaaaatccgatgcatcagatcctgatgctggttttgatgcagaaaatgatacggaactctcgacatcgagtcaagagcaagaggaagatgaggatgatggccctgaggaacaaaaggacaatagcgacgacaataaaatggatgaggatcatgtaatggtggaaaataaagaagagcaggaggagcagccgcagccacctccactgccaccacagcagcctgtggaaaaaatggaagctcctagtagagagattgaaactgtagggagaacatttctagatttaaatgagcttgcacctggaggtggctttgacgatgggccaagcctgactatgaaagatgaggatatggataacagttaggaaataagttttgtaatacaatcgagtttagtaggcgctgcttggagcaaggtgtaactgcgtgaagtcgtgggccattgccatagatgaatggtccactagtaagatgacacagcaatatctgaacagttttagatgattgctgttacatcgatttacagtgacaaaagaggcgaggttccaccgaggttgtggtgaaaagagcttcaaatgtaacagattgcttgtttgatacttgggggccatccaaagggagtttttcattctattgttgtacactacacgaagggcgcgcatcggtcgctgctgtattatgtccagactgattgatgctgtgttgctgccagatacaaacttgtagcctccatttgtttagctctaggcgcgatactgttgtcgggaaattcttgcaacattcatatggtggaaacttgtaatacacctaagtgctgctcttctcggcatttcttacggctatattccacttgtagaatgtagtttttgagtctaagtaaggcctgtagctcttgtatttatatctgtcaacctgattagattggtacatctgtgtgcagttgatgacctgatactactgagctagtaggatttctccagctaagggtggtttgtttggaagtcgcctttgcgtttatttctgcctgagaagaacggaagatgcagctgaagactctttggagtttgggattaccttcccaagggatttctagagattcttgtttggattccgaaaatttttcatattcgtacactaactaaatagtttcctacaatactcctgtgaaattcccttgtttcaaacggatatataaatttattccttctaattctgaccacatagacaaacaattaataataattatatattattaaaaattgaagatgtttccgtggcctgtcattcgtgtttgagtcggttataaaaattaaagatgttttcgcggttcgtcatctgtgtttaagtcggttttaatctaatgttttggttttaatctatatctcttctcttctatatctatactattataaaaattgaaaatgtttttattatattttggtacgtcatctgtatatgagtcggtttttaagttcgtttgtttgtttttggaaatacaggagcaagcttgtagtaattttgcaagcatacggtatactgcttcgcgcggaacaaatggaggaaacacacacgcacacacaacagaacataagcaagaacaagcaaatcatgggtgaatcaaacatatttacgatggagcttgcacacacacacaagctagcagtaccggaaatcagtgataaatggatggaaagatggagaagaatgtagacttcttgttagctgccgttcttttgctttagttcgacatccgtgtatgagtcggtttttaaattggaaatacatatctgtatttgagtcggtttttaagattgttcacttttggtaatacataaggaatcatataagaaatctgttaaaatatctcacatgctaacttgagacgatcggactcctaactgcagctcatgattttcttaaaaatatatatatccaaacgaactcccacagagcatttcatcttaattaaaccatataacaataata

SEQ ID NO: 13954 - DNA, 631 bp, Oryza sativa
cagcctgctgtaacacctgatcaacgctgcggcgcactgcacggcttgtcctgttcgcagcttgcctatgacagcaaatttaccactcccatcttccgtgtattcaatgccaagatgtatatttcgcccagttgatatctaggtcaaaagatcttttacctgaccattctggtgttgtgattcctcaatgaggtgtaagggtgtttgcctgtgttctagctctgttgttagttctgaattatgcttcaaaactcttcttttttagctctgtgttcgtcagataagctgatggatttgctcctgtcatgtaaacaaaccttctaagagacagcagtatctgattgtctgaattcatgattgtgcattactgaagatttgtcctatttccccccatgtgcttcactcaagattcccagattatctttgtttgattatatgctagtactactattattcgtgagaagactggagtatgttccgttgtgaaattgaaatgggattcacgggaaaaacaagattctgaattcaaatatgtggtggtgtaaggacaataactgacgacaatcaatgtggtacagaatcaaatggaaataggactcaccagtaccgctgcagagagcgtacagaaatg

SEQ ID NO: 13955 - DNA, 5042 bp, Oryza sativa
tcccaaacagcaaggctcctattgtgaatttgtgattgctgaataattgaaaatgccactaagatgtaaagcttgtacagctactgtttattcatgcgtgggcagtgactgtatttctacgaaagtgctctctgtctcagtggtggcaatgacaccatgtttagaaagttgcaaatgctttgctgagagaatattcatcatggtgtagctggcaagcatagttcacatctttttatgctctgatttgctgctttctttacgggcatggcactggcacgaagatatgtgttctcatgttcctacaccttttgagctttcctcccctctccatggtttacgaggtaagcaatctgaactaatccattgttatacagtaacatcgattctaatgcagtttaatggtttgtttgtgcatgcaaaagcaggtttactggcttactgctatgtaaagttcttcagattatggtagctgatttgtctcttgattttgttttcaggaacctgagctatctgccagctgaccaagaaatacttatttcatcattaaaaaaactgaccaagaaaaaaaaattactccattgtctaaaaaaaaattgaccagaagtagtcaggtcaacctcagcatgtgctgcagatgaggtaggtttttaccaggtcgacctggataatatattgtataacttgctgctcagaaagaaagctctgttgttgatacgctgttcgtttcagtagttatcgctgttgtgttggcatttgtcttgccaaaattctctagtcccaactgggcgtgatgagcgattcaacactcaacagctatattacactaatgcagttggatggtcagatggtgtcattcttacttcttttttgtccatcatcatatggattatcgaaatcgtcgcaaaacaagatggatttatcgaaaataattgggataatatttgatgctgctcttgtaatatgagctagcgctttgttggcgagttggacactttggattggtctaagagccattgtcagctatggcacgtgcattcttttcagcatctcgtgtttttctgtcaaaaaaaaaaaaaactggagaattggtccagagtggcatgtattccagaccaagattctgtggccgcgtcaaaccaaaatcaactctggaaacctccatgattggaacccaacaattttggacgaaacaaaaaaaagaactttaattcaaaaccagcaaaggattgagagaaggcgaaaaataaatggtatcccgggagcaactgttcttgaaagctatggttccttttgaactaatgaatttcgtggaatttttataggaatttcactggataattaccacagattatttgttttgcacctctaataaagcattttcttaacttttcttaattaaattttttttcttctactgcattgcttcaaccacttatcttaagctatatcttagatttatttgttaaaatattcaatttatgcctataaaataaataaataatccgcgacaatgatcacaggaataccatctccggcctatttgccactcatagccagagtgagcaactgattggtaggcaatcatatgggatatgggatagtgatataacatatttcaactaaaatagatattcctgatttggcaattatgaaatgttgggcaaccaaaagacacagtaccaaaataccatttgaactaaaatagatattcctgatttatagggcagacgaagtacttacttgcatcatataaatttcatagaattttcatatcaattgcacacaaaaacagctcaatgattttgtgcaacatcccaaataaactagaactaaaataaaagagtactgctatacgtacgacccaattgtataattcatgtacaactaaaaacatataatcatatatcaataaaaaaagagcatgttcatacgccctgcatccgttaacaacacttaccaaaatttagtcgcacatgagtcggacagttggaacgtatgtatagcaatttccaaaacaaaattaaaacaccgcgggaatacaaatacagctctgagtagcacctaaaatcccgagttcaaatctctatatgagcgaatttcaggtcgggttatttgcagggctaagttctaaatttagtgtctgaatataaccgactggatgtagaggccgagtaaaaaaatatcattctctaaaaaaaaatacagctctacttcttctcctaacctcctttgatcgttcgttggtttgttttttttttcttttctcgcgtacagctggacgcttcgtttgcttctcccgttccgtctcttctcctctcctcttcttctcccctctcctctctccacttctactctcacctctcgctaccaaacacgcgcacacgcagccgagatcgagagcgagctacttgccctagcagcagcagcagcgaggagcgcgagggggcggcggcggcggcgtgcatggcgggggctccgtcgaggtcgcgcggcgacttcgaccacctcatcaagctcctcctcatcggcgacagcggcaagttttacacctcctcctcctccccgcctcacaaatcagagctctgtcccgtgctgtttcggattcctctatggctttttagttgcttgctcgctcgattcctggttgtactgcgctttctccctctcttctgctgattcgtgtggtggtagtactagtactagtacttttcgcatctcttaatgggtccgtggccgtggggggagctcgggggaggagcagtacgaggggttcttgttgccgaggatttaagggatgggatttccgtgtattggtttaattgttggagtggtacgtactacgtagcagtaattgggagctttcttggaggactgattagctgctgatttgggttttggtcggttgctaatcttgtcggggaacattctccaatgaggagtgagaaccatgctagtatgtgttgcatccataagtagctatggatagggatttctgtaccgattggaggttggtcatgtcgcaattggacaaggacttgtgaagtaatttgccgagattagcctgcgaaaatgtttcgtaggtgtgcaatgtctgtgtgcgatattgttcggatcataggtgattgtgttgtggttgtgcactcctctttgatcttctgtttattgcggttttcgttgaggcagtgggttcctggggattttcacgaattttgctctccagtagtttattagactaggatgatagtaattgttttggtttgataggtcgatatagaaatggaacaaaatgggttataactaacatgggaatccccaaaaggtgctctagtgtcataaaagttgagtaggtcttagattttcagcatttcaccatggttgacatattttgttagtctaaaataggtaggaatagagattaggacttgaagctatattggagccaaaagtcattaattggaagggtcctttaaatccaacttgtaccagctcagacaccattactgtttcagactagtagtgaaaatgaatcatcacctcatcctcatttatttgttcagatgctgaagttttggccttgtttcacagtcgtgccagaattgttcctcatcctactttaccaaaagtgctgaaattactcatcattaaaataggactaggtgtttttagaaagaaccttcatgcttgtccagtccttcattggattgaaattgaaaattgttagttgatcatccctttgtagtgatattgcaattcctcaaggcacatctgactatctgttatcaaatttatcggatgaccacatgattgatttggtatatctgatgggtctccaactccccattttctcattgtggtgtttgacagttttgttctgtctttattatcttcagttcgtgtgatgtctagtggcattttctttctcagataattatgttatcattcttatttggcacttatttgtttaatgggttaatctgcaggagtaggaaagagttgcttgcttctgaggttctcagatgacactttcactacaagttttatcaccaccattgggtattcacacaaccattaattcttctatttttgggcattcacttatggaagccaatattctaaatatgtttatttttctttatgtaaagcattgatttcaaggttcggacagttgagcttgatggaaagcgtgtaaaattgcagatttgggatactgctggtcaagaacgtttccggacaattacaactggtatatttttcacttccttttctgctaatgactcacatatggtaatatggggcaaattatgaaaggcgacaaattcctgatatatgacctaaggcttgaacactgacagaaatttgtcgtcgaaacgaatatgaacatgaacaattgtcaaactgatgcaatttcaaccaaacaatatgatatattcttttagattcaaatctttattttttttggaatagcacataaagttacccttttctatgtgctccaatgaggaagaaatgcataataaaaatgtccctctttgcaaatgtattttgcttggtttctgaagctgtagacattcaatatgcatattcatatgcccaatttttattggtcatctggaaacctttaattgatgacgacatatataacctgtgaattagagaatgggcatttatataagcatgatggcagtttctcatatatatcctcatgtacttactgaaaatctggcactataatgacccgagctattcagatttacccattgattgctaagcaagatttctgcaccttatttgatccttttcctttctgcagcctactatagaggtgctatgggcattctgcttgtttatgatgttacagacgagtcatccttcaacagtatccatcatacttgtgcatcccatttgttgacagagtgcaaatatatatatttttttcttaactgatgtgtagacattagaaattggatccgcaacatagaacaacatgcatctgataatgtcaacaagattttggtgggcaacaaggttgatatggatacaaa

SEQ ID NO: 13956 - DNA, 3094 bp, Oryza sativa
tatttcgtcaaaaaatatgattgatggctgattcttctgagcttcctcaaacagtagcttgagctgcctttcagcctctccaacccacttactaagaacatcagctccttttctcatataaaagctaaccttctgaccagctttagaggcagcacacgctaaggcacgagcaatcaatgtcttccctgtaccaggagggccacagagaagaacacccctaggaggagtaatgtgatagtttgcaaaaaaatctggataaagcaaagggaagaaaaccatttccttcaatgcatcaatgtaatcggacagcccccctatatcattaaaactcacactcccgtcaacctggagaggctgaatatcagctcctcccttggaacttggtccagcagtttggatccctggcataagtgaagaagtactcactgtgttgtcaccctgatgaccccaaccggatgctccaacattcagaccccatgctcctggacaatgcatatccaatccacctaaaaaccacggcatacctcctctcccaccacgcatccatggcatggatggaccttcatctggctcatccacaagaagagaatcatctgaatcatctggcaatgagaatcgagggcgcttatgcatgcgtgaaccaccctttttcaaatatttgctgttctttggaccaattccatgtactagtactctacggggtgattgtgttctgtgcttcccttccttccgtggggagggtctacgaacttctgaacgatccctgagatcatatctcctcctcccttcttgttcttcctcaccatcttcatcatctccatccgcttcagcttcatcacctccatcaacttcctcctcattgccatcctcttcgatatcattaccattttccctcctatcttgtgcaggctgttcttcagagctttcctggtcatcctcagattcttggtatggatgaagtctttgtcctcggatagatcttctaggccgtaaaccctcacggcgaggaatggagctagagttggacagcttcttgcgctttggcctagctgacacttcgtcatccactttattctttgaagatcgatatctgggcctctgaaaatttcaagagaagaggtgagcaggtaaaaacaataataagcaaactttgcatgtactgtgcactagtctctgaaactccacaaactcaccataagatcatcatcttccatactagaactatcggtgtcatagtcctccagatttacagacattcttcgctttcgtgttgaacgacgtagatttgctgcaatagactacaaaaagaactattataataaagccatatgagaataaacaaaggaactcttacgaaggaaaggcaatacagttaaaatttgcaggaaatagatttttcataaaggagcatgatttgtatcaacttgaaaccgagcaataacaatctaacaagggtcaaagctccatatttaagcaatcatgctttctggttctccaaatattcaacggaaatctatggtcatggatacaaggatgggtgcagcattcataaaagaaaataatgttctgtagataaaggtgctagatgagttatataaatatcaaccattgccttaccaactgtcatttgttaaatgcttggtaagaaaaggctcctgtaagaacatttttaaacttagagcgtctactaaatctacagcaacaaaaaatacataacccactttagaactttgctgtaacattacaatgatggaaatgtggtcacctctttgattgaacaatgaaattactattttctaaaagtagcaacagctaatgctcttagtaaaaatgttgttttataaaaagggctgaagcagaacaagaaatttgattaggaaggaagttaattcaagtaggccatgcaaatgcgcaagctatccagtttatttcagaggcaatattgaattgaacttgaacatccatatagttatatacagataaatgaacaaaaaatatagcaaagataggacgattttgaccaaatacagcaacggcccaacaaattcaaccaagttactaacataacaccatcaaagtcaacagtaatgctgaactaagcacaacagcctccgtactttatatcacaaatatttaacagttacaaaatggaagtctgatttacttacaccaaacactaacaataataccaagcaaatccaatatcactctatcaaccctctcaattatctcaagtgcactcttcaatgcaatgaaagaccaagaccaccactacctccatcagcttgacaacaaattaaataaagtggcatgaacacacacataatatggaaacaaagttcacaggctcattaaacaaagaatgacaagcatgcttacatcagcaggcggtgccctggcagctgacttgcgaagcagcttcttggcaatctgtgatgcagccgctctcttcttagacttcatcttcttgcgtatggctggattgtagtacatataattgcgaccgaagtacttgggccgcttacgcagccggtcactagtcctcactggtgtcaccgatgcatcccccttcccttccatccccaccatcgctcccacctcacgtcctcatccacaccacgccggccattgctccctaagtcaatacaggtacaccaatagcccgtcaattttagtaaaatccccaaaccctagcccccaaatccaccaagttcaacaatcacggataagatgtaacgatggcaaatttcgcactcgcacattgcgaaatggaacccgctcctcattccccacacattaaatccccagaaaatgggttgaaaatgacaaaacgatggaagaaaaaaaatccgaatccacgccgccaagcaccgatcagacagccacgacccctcgaaacccacccaccacgaacgaaaccacacacccccactccacaaaacccgaactaaaaccctccgaaatggacggaagcgaagcgcgggggagccccggaaaacccggggggagggcggccgcgggggtttctaacctcgaaggattcgatcggcggggagcggggagcccgcgcctagcccccgcccggattcggcga

SEQ ID NO: 13957 - DNA, 2839 bp, Oryza sativa
cctcgtgtaccgttggagaaaacaggtagtacgtcgtttcttgtctctctgaaacctagcactctctggaattcaaaaagaaggcattatcttcgaacaaaagtcattctctaagacccttctatgaaaaggcagaacattttttccttttaaaaacaagatgagaaaaaaattaattgtcgctatcgatattcctacctttatatttttaatcctataaaataaatgtgaattgtaacggtcaccatctcgacccattcacaactatatctaatagagaaaaagagttttgtaagtatataccttcaggtgattctgaaactaatccttcaattccgttatataagacgcaaatgctttggacacaaagaccaataaaagtttgtgtgactaccattctacgcgcaactggtttgcttttcctaacgacgtctcacttcgccagtgtgacacacgtgtgcaacgcttaccacatccacgtgcttcgttcgcccttgcatgttgagttctatagacattgataggccatgcagccatgcgcacatcccttgaatggatgcggaatgagaattatatgattgcttaccacctattatgttgggacttttgaaaaaaaaatattacatcttgtataataggatatatggagtaacagaagaaaaggaaagaggatttttcatctcaaaagtttgttcaaatcgaattaagaaattattaaccttacaatataaatcaactataggccatgcttacggaattggggattcaagcagaagttgatgaccagtagtttattatattggtagttatgagttttagaatctttagtaaaaatttaactgttttaaggggtagagattatagaaatagttaccattgtttgatgctatcgagcaacgcacagtcgttatgaatataacttagaagcatatgccatctatattttaacggagcacggcatcttccaccatgataactttacaacgtactaatcgttgtttcttttaaggacacaagagtactattccacgcccaaaatccacccaacaatattttatagccagtactaattattactccatccattccgttttaagatgtttgacgtacgtcgtaaaaaaatagtattttttttgacacaatactattccacacccagaaatattttttgcacgctttcatgccctatataaccgcccaaattatgcttttgacacaatactattccacagccagaaatatttattttttgcacgctttcacgccctatataacagcccaaattccgcgagtgacgagtgcgcaatgtgacaaggcggctgaggccagacaggacaaccaccaaactgccccggttgttgtacgattgtccttgttccctccgaaaccggcactgcgttccagtttcttttggtctttggaaacatcctagttcactggggagctagagaacaagtagcaacagacacagaggtacaagagttttttgtcctgtaactctacatatagaagcataaatgacacagaaagttgcaaatgtgcagcatgctggattggtagggataaacagagtcggttgcagaaattgacacattgatctctcatgtttccaggcccaaaattgacttaatatttcagcgatttagattttggtggatcagctatacatgtatgccgaaaccatgaaaagtactagagcactagtttctgatgattgttgcttgagagtgtgaaggtgatacaatgattgacagcaatttgtgttaatcatcatagagacaggaaagcacatgggtgcaatttaagtcttgttctgctaactaggcatccatgccacttggtgctttgggttgaatcagtcatcattgttttggtcattttcgtcatgatgattgtcaccatagtcaacccacgggagcagtgattccaggaaaaccaacgcaggattgcgccctgcaacttcacggggggcacggggtctgacctcaatccccagttcttgttcagctggcggcatctcatgtgccattccaggagcaaccatgaatggccgcaattcttcaggggggagtgatggtgttgtgtcggagaagtctgaaacaagaagatgagagtacctgcaaaataagaaacaacttctcaaaactcaaaaacatgttataactccaaagattaacagataccaaaaattgggatataactacaggcgtaggtggattttgcttagtgtcatgtataaatatttaagtccaccaaagcaatatgtgaaataaactgcatatctgtagtgtttgtactccctcttgttttttttgtttgacgttggttagttcattttttatctaaccaacatcatatataaaaggaaagaggtaatattatatatcactatcgtacatgctaagactacagatccaacattgccaacaaattaagaatggagtcagtaaggtagacggctaaaccatatattgttatgtgaacgttcagaccaagataaaatttacaactcaaattgcaacaaagaaaaggtattggtagtcagtggaaagcaatatcataactaaataagccttcagttctgggcaacaaaaatcatattgaagtgctctccttaaaataaaaagggaagatgtaatcgaagagcagacagaacattgacactacgcaaaaaaatttggagcaacttactcattcttatctgaagagaatgcttcttttctaacacatgcccagtcctgggcctctctgttatcctgttttagtgattcaatcaccaaaagagcagcatctttgagtaaattctgcagttctgggaacctccacatgatgtaatggc

SEQ ID NO: 13958 - DNA, 1232 bp, Oryza sativa
ccatccctcttgtttatagacctcgacttttgatgtgcggtggtgtgagtgttggactggtagggcccctcatcctcttttacatagatatatcaccattttgtgtcctttcatatcattaatgtattttacgcttagcaggatcatgttgggccagctgttttgcacgaacttgagaaattttctgttcactccttggggttgccgtctcttctgtctgatccaagtgcaaagacacctgaagaagctcttgtgcacatttttggggaagctaggagaacaaccccgtcaatactgtacttgcctcagtttcatctttggtgggatacggttagtaagctccaagctgtatataatttagtgttgaaatgattgttggtaaatattgaataattgattatattcttcatctttgatgtaacaggcacatgaacagcttagggctgtgctattgactttgttgaatgagctgccatccaaccttccagttttgttgctaggaacctcgtcagtggcctttggtgaccttgaagaagagtgtgcttccatattttcttctcgtaatgtgtaagttcctggtcagatgctgttttgcttgacttggttcttctcaattgccaaggtctaaattatcctccaatattggtcttgtctttcattgagaaaatctgtttgtttgatagatatgaagtggatcaaccaagtgatgatgatagaatgagatacctgcatgcactgtttgagtcattgctctcatttcaaatggaagagtctaggagtaagtctaaagaccagaagtcttctgttgatcttcccaaagcaccaaaggaagtggatggtcccaaactttcagagctaaaagcgaaggcagaagccgaacaacatgctgttcgacggatgagaatgtgtcttcgagatatttgtaaccggtctgcaattcactcctttgttgagttccatatatgttcaaattttgtttctctgttctcaccattcattgctgttagcactgtggttagtttttacagttctgctaaagaacagtatagtttcatttatattctacaaaaacaccgcctagtttacacccatgaccatttttagcctatgcctatctatgctattcccgtctcagctccatatttattcagttgaaggaatgttccagatggggatttggttgcgttctaaaaatcaggagtatgcatttgcttgataaagcttgcatgcct

SEQ ID NO: 13959 - DNA, 1692 bp, Oryza sativa
ttgtttcgactgtttcttccattagtagtgggcatttttttttgatagtagagcttggtcgtcttcactaattgattttattaatgccgctactgttctcaactctcaatccagcatttgcttgctggctagtatgaactatggtctgttctatctgttattctatcagtacaatttgcactgtcagtgcttgagagttgagtaaaaattgttgcttattgattggacggggttacaagtttttattaaaagtaaacacaacctttcttgaaggtttcgaactgctaactttgcaaccaatcttctgacttgtaatgttgtctcagtactcatcttttgtgctttgaagaatacatcagggttttacactttgttccttggaattggaaaaaaggtgaatccttttgctttgcaatgtactaactgaccaacatgctagttcttcagtttgcggaatgttcctagggagtgtgtttggcatgtcatggaatgtgagctatttacaactcgtgtaatccacattaggcatcatttacgttaagctgcctttacatgatgttagctctgtctgtgtgcatgttctcctttctacaatgtttgcacacatgttctgtatattaacttttgacctcatatgtggtgttgagatgtaatattcaagcatacagctgttaacaatatatcagacatatttaaactttgaagagatttatctagcaaatgcacaaaaggtgttttaccatttcccatagtcttgattgctgaatataattattgcaccatatatagtaacacgattattttattttgtatttgttctatgctaaatattttttcgttacattcaacctcagaattcaggtggctttggtaggcatattgcagattcatcaacgaatcatcagaagttaaatcaagcaaggaattgtacagcacaacctttttctcctggaagttacagaagctcagttggggtatgtttgtatatattcttatctgctgtgatccatattcttatctgctgtgatcctcttggctgctttaatattttggtttgtgggcatataacaaaatcttatggtactatatggtaatgtgtgttagtaggggtaagattttctatcttgtgattctgttgcgtttttcattacacatgtttgtgtctgatggagaagttttgggagtgtaacagtatgctttatcaagacaagtcattgagtagcctagcagtctaagctaatgcttctcgactaaaaataatcatgaatgattgatagtaattaaataatacatttgtgcatcgttttgtctgctcattctttatttagataaacagaagtatgaatttatttgctaggaaaaagaaagaacaatgaagtcagtcccatagtattttgcctgctgtctattgtagataacttgaaacttctctatatttcttgatgcaactaaatatgtttcccagatgtaacaaccagcacaacaagcacattctcaaaagaatgtttcttttttcttgtattttacaggattccagtataaatcaagcgatcagtccagctcgctctttggatatcaagggtagattcaggggggctgattataaccttaagacatcaacagaactcttgaaggttctaaatcgaatctggagcctggaagaacaacatacagctgatatgtcagcgatta

SEQ ID NO: 13960 - DNA, 4554 bp, Oryza sativa
ggagaaggaggagatgagggggaggggggagaagaacgcgagggaaacctcaccggagacggcggcggcggcggcggcgaggagggcggcgcggcggtggccgcgggtcgtcgtcgagaagacggcgagcggaggaaggaggaggaggattggaagcgctatgaccttaatccagccattggttgcttcttcaacggctggatggtgatgactgcgctgctttgacttgcagtcaaggctgtaacttcagcctatatctgcacccacttgtcatggactcaatgggttccatataacattgtcacagggtgatagtaacaaactaaagagtacaaaaagagtaatcagcagaattcagaaacgaacttaaaaacagtgcaggattcaggttttggtcctaattactccataggattcaggttttggtcctaaatactccatagattatttacttcaaatataaattactccttccatcccaaaatatacgtttgctagtagtatgttttttccaaagaacttttatctattagattgcttacaccacttataacatatttgttaattttttaaaaaatatttaacccataatcgagaggataatccattgcaataatctggtaaataaatcgtttgaaatagagcctataacccacaaccaaacaaacttaaaaatgataataattcaacaaatcaatactggtgataagtgataactcagcataacaaactcaaaaatatttggcagctgaacaacgaatactggttttgagttgtcatgaattttcatcataataataccacacttccgagggggaaaaaaagcccaaaaacgacacaaaaaacatggctggaactctgaaagtatattatgtacagaactggtgatcatcgcagcttgtgatgaaatttgcagcgccacaccgaagaactactagtttactactacttgaagaagaacttccagatctccctctctgggggctcagagacgaggtgcgcgccaaatgcgccttcttcatccaccagggatcggagctgccgcaccgcgctgctcgagccgatgtaattcttccttgcagcaaggtacatcaccccatatggcggccttaggcactgcaagaaccaagaacagaagttttagtgcggagtacatgttaaggctatgaagcaggttctgttccagagcagacggcaaattcggacaatgcatttgatattatctggataaacgagaaggatgagatgaagacagtcccagaaacaaggggaaaagagccttgcagcgaagctaagccaattcctaagtctaatgccaaaaaaaaaaaaaactcagttcttggtctgctgtaaagtctgatataaggaaattcgtctacccatactaatctcctgcatatcaatgcagagtgacctcagggaggagctctacactcattctgcgcttatcgctatcatattatgctagtcataagtcataacaatgcagtgattgtctgtatgctgtctatatatgatgtctcatggcgagaatttcctgaagaaaaaatgtatggagaacaaaccttttttacgagcaaatagaggttttgaagagagcttgcagaataagggatctcattgactaacagtatatcatatccaccatctcctgtggtagtctcattccccctctcccatgcacggcttcctgatagttttcttgatcgccttgaagaggtttcatggcaaatattgcttgcatcttggctactgcaaccatccagaaagtcatcttcacagaactctagtgctacacctgatgatgtgtccacctcatcctcctgaatcactgacagaacagtgtgaagctcctcccattccccggcatagaaatggatatcttgaggcaattgctgccgagatggagtaagggggcttccttgttgttgaccatgtttgtcttgagcatgctcaagatttgcaagcacattgggtattgttttgcaccttattatttcagcactcggatcctgaaaatgcactgttgaagctccctaagaacgtttgagaagaaaatgtcagttatcacagtagccaaacacagagcagaacacagctaatatataactcattgtgcacggatgcaacaactatgcaacagtaatactagatacatggattcatgctagtcaagatttaaggctacggtaaatctaagattaggctagcaataacacattctataaaagtaacgaagagatgccatggataactacagtaccttcaggcaagcaaatatcccaggaagcccatatccacagccaagctgcattttgggaaaaaaaaaaaggactgttacagtttgcccaagtaccataaactaatcaaaccaagctatgagtttggcatctgagggaccaaagaaataaataagaccaagaagtaagttataagtcaagaaccttttcctggaacataaagataacaattccatgtccaagggattaaggagtgcaagttggaatttatacaagttgaatcagaacataacattatctgaatacagatcataattcaccagaaccatggactaagccatatccttccattttcttttacatatgcgcacaccctttagagttttgtgtaccaagataacttaaataaatgacatatttaacaaataaacaaacagtcaatgacagagatggaagtcaaggaatgcatagcttcactagtactccctccattcagttttgatcatcatataacaactgtgcagcgagatcaaggagcaatcaaaacatggtagatgaagcaggcgacacatggactcctacatgatgaatggacttaattatgatttctaagctacgaacggatgcacacatggtgaacgacgtatgcatgcagcttgaataatgtgcatattgatgagaagccaagaaatcaacaatcacaccattagttactcatcaatactgattttttttttgttttgcatatgcgctcatcaatcacgaacgaagtgagtagtactgaacacataaaagcgttgtacctctaaaacctgtttgcttctgaatgtcaatagtccatcacggatctcattcttaagaacattcactaggtcaattgaactctcacagcacttcagaggccctataataaaaaccgttacttttagattctcagtgttttaggtagtcagtacaaaatgattatcattaggggtatgacacttaccttcaccttttggagttataacctctgatccagatagaccaacaatatcgacaacactgacctttccctgaaacaaggttaaaacacagaacaattaattccaaaagccacaaaagattaggatgctatatagcttatatagaggaaaataataatgtttaccatgacttgcctaccatataaatggccactatgaataaaaactcaactctgtaatactaattccatggttctatgaagtaatctagtaaaatgaaaaaaaaaagtagggagttaagaaagaattatcaccttaaatatattcatgccatgcatttcaatattctcgcctgcatacttgtatggatgaacattctacagtacaatgtaaagaatgggagattagtcagtagataacagtcctttccatcagtatatctatgcacaaagagccaaccatggccacacaactttgcaatgaacaagaaagtgtagacaaaagttccacctttgacgggacaatctcgactgctggtgacggagggtgtgactctctctcgggcacgacattaacgcagtgggctgcagctttttcatgcgacaggaagccggccaggcactgtgagagaattgaaggtgaccgcattgcctgaaacgaccaaatcataatgacggtgaaaagaaatgtaatgcagtagcactgtaatgatggtgaaaataaaatgtaacaattcttcgtaatgtcaatacaatcaaagtgacgacaaataaagtgtcaaattatcaaaatcttgggcatgtaaaatttctttctactgggataactcttcttgaacccttctcacttccaaaggacacagaaaatcaacaactggggcacaataggacacccattcctaccggatgagatttcatagccggaaaacttacagctacatcacacatcaagagtacccaaagtagaggggaaatcgcaatgagctaaacccccattgaaatgccaaatgccacaagaaacggcccaaagacctgttgtcaacagctaaaactatagagccaagaaacatcacatccaagttccaacatcacaaattcaagagaagatcaagacatctcgaaaagagggagagaagatgaaggaagaaacacttacttgtacgaacccccaagatctgtccccaagaatcacagacaggttccaaagaaaagtcgggacaaaaacgcaaaattaatcaatcaagattacgaacaggaggggggacagatgatatgagatgagcagaagaaagatagagaaaagctaatcaaaacaggatgcggaagagtggtggcgagtttggcgactgg

SEQ ID NO: 13961 - DNA, 2041 bp, Oryza sativa
aacaacaaaaacaacgacggcggcggaggcggatgcgacggcggcgagcaccagaaggggaagtcgtggaggaggtggcagtacaggagatgcggcggcggtggcggtggcgggggcgggaggaagaacgccatcctcggggacgcggccgacgtgaagacggcggcggggttcgcggagaggtacaggctgggggcggagctggggcgcggggagttcggggtgacgcggcggtgctccgacgcggccaccggggaggccctggcctgcaagacgatccgccggaagcggctgcgccggtgccgcggcgacgccgaggacgtgcggcgggaggtggagatcctccgccgcatctccgccctcggcgccggcgccgactccgtggtgcgactccgcgacgcctgcgaggactccgacggcgtccacctcgtcatggagctctgcgagggcggcgagctcttcgaccgcatcttgcccgcggccactacaccgagcgcgccgccgccagctcgcccgcaccatcgtcggcgtcgtccaggcacctccttaaccccccacccgccattgccattgcatcgaatgctctgccattgattcttgcatcctgttcaaccatcaacatcgccattgattcttgcatcctgttcaaccatcaacgtcacttggtgtagtgcatgaatcaatgcatgttgcatgcagctgtgccacgagaacggggtgatgcacagagacctgaagccggagaacttcctgttcgccaacaagtcggaggactcacctctcaaggccatcgatttcggcctctcggtgttcttcaagccaggtaggaaggaactcactactcaacaacacaattatactatgtgatcacgcactggacatgcagcaaagaacgcaaagaaaatcaaatccgaacgaacttaagtctcaaatctcaattacctggctcttggctgcaggagaaagattcacccaggtggttgggagcacatactacatggcaccagaggttctcaacagaagctatggcccagaagcagatgtctggagcgccggcgtcatcctctacatcctgctctgcggagttcctcctttctggggaggtgaatcgaaccatccatgctttctctgcttgttcttcaccacaatagctagcagaatgtgttagataaaaggatacttctctgataattactggtgctgatcgatcgctgatgcctcctcctttgccaacgatgtgcagacaatgatgagaaaacggtgacggcgatactccagggtgggatcaacttccagagggagccatggcccaaggtgtccccgcatgcaaaggaccttgtcagcaagatgcttgaccccgatccttctacccggttgacagcaaaggaagtccttgtaaaaacaaccttcatccagttcagattcttttttttaaaaaaacgaatctcattcagttcaaattcaagttcatagccatatcgaaatctagaattttgccatgtctttgacattattgcaaaaagggggaagtttaataatgtacagtaagtagtgttacattacatgctcagttgagattgtttctcctcctgcaaaaaacagagcatccttggctcaagaatgccgatagggctccaaacgtttcgctcggagagattgttcgatccagactgatgcaattctcagccatgaataagttcaaaaagaaggcacttggagtaagttgcagagaacctgctgctactattcttattttcttcaaatgtggtgtacttcttcactgtgaagcatttgccgatgaaggtcgttgccaagaatttaccggtggaggagatggataaatatactcagatgttccacaagatggacaaagacaacagcggtaatttgacgcttgaggatctgaagttgggcctccagataaatggtcatcctgttccagagacagagatcgaaatgctgttagaagctgtgagtgctttattatatccattcccatagcactatatttcgttattcttttataatttagagtttagaa

SEQ ID NO: 13962 - DNA, 8971 bp, Oryza sativa
agggctctgagtgagaattgtcaccaccggttgagcctagtgatgaattggtgcaaggagcaatgctgtcatctcccttattttgtatgtccacagtaatattcccagatgaagaaatggagttgttgctgtcatcttttgtcgtcaggctactgataaaatgagagaaatttccaggttcagaacgacaggtacttgaggggatgaacacttccttcttcaagctatcaagtaacattgatggagtggaattcagatcaacaacaagatcaagtccctcatctgacatgacaaaaaattcaaacgaagactttgcattttctgagatcttatgagatgagccactaccaatatctgtaactgtttcaacaacattaggtgcctggtagcttgtttccggagaaatttcatcatctaccttagcagttgaatcaagatgaattggatgctcttgagttcccaagttctttccaataccatcagcactttgtgaatgtacattagaagcaatcacttgacgaggaggtgagtggctaaagcagtctacttttccattgttgattgaaactggtgtagaactcactctggttccagagtcctgcttcaagatacatcaatagaattaggaaatgcatttgcattatatacagacctaaaagcaccaagggctccatgcatatgaggaatgctgccgtgaatgccagaggaaaataaactagagtaatttttttatataaatactagaatggaaaactgacccctgtaggatttctaaccaagcaacccgactacagcagtatatttgtcatggagagcgtaaaagagaggattttgagtggcaccatttgatcaggtgaaatacaacatgtcatgaatgtggcaatttatacaaattaagaataccatcgccagctggtctatactgaaggaattccttatattattaaaaactaaagagcttatatccagcagcctggaattagagaaatactagggaaaaatcacagattcttacattttttttcaatgtttcatctgttggtgtttgaggtcctttgtgatgttttacatgcagaagaggtctatcaccatcatctctttcactttgcggacctcttttatggctaccttggcaacctgcagttgtttcggtttcattagatacacacaccatatattcatgtcacgtctctgtgagagccataaaccattgagtaaaaattggcaatcttagaaactatgccaatatcagaaagttcctatacatacgggtggatacttctttggcatttgataacaaggagggcaaggcaacaagggatgctgctgctttcttttcaggcgatggatttattcttcccttctgagaaacaaagatggtacagattattaatttatcctctgaagagaaatgtaatgatacactcttccgaccaaattagatgcagataccaaacttaaaacagacaatatagcttacctcaagaaacaaggcaagcgagcttgctagctgagagtgactcttgtttgcaggaagattatactgtttgcacaaagattggagctcatggtaattaaggccaaggagatgcttttggctttcctccaaccccatcagattgactgtggaagcacatcaaagacaacaacaacattagtccctcgtcagccatagacaagaaggaagtgaacacgccatatatatgtatatatcataaacgaagcgaggcaggcctatcgaaacatgacaatcagaggaagctgagctcaccgcataactcaaactaaaataaagggaaagcactagtcactactactactcgctagtacacatgcgaacgaaaatggcatccgccatttgtccaccggtatctgctcatcgcgtccgctagcgcacaaacaagcctgggcccatatgccaccccctcgtcgaacatggagggaatccacgatttcgaaattcccccaacggatccgaacgaaaaccgagggaaaccagatctaacccagacggcgaacccccggcggcggcggcgattagcagatcaatcctactcctactcctaccctaccctaccctaccccccgccgccggaacgccgcaaccaacaggagaaaccactcgaaacataccgaaacgccaccagccagctcacgccgaccgccccagcgaacaaacacgcgcgcgacgcggacgccccgacctcgccgcgcgtggcggcgccgaaatcgaaaaacgagcgagcacggagagagagagagagagagagagagagagagagagagaggagcgcgcgagctttgcttaccagcgtcggcggaagcggaagcaggagaaggagaggtcggcggcgggcggcgggcggcgggcggcggaggtggaggcggattcgccggcgcctcgcgtgattttggggaggcggcggatttgggggggaatgagacacagcacgcgcggcggcgcccgggggcaaagctgatgatttccttctagaggatttttgctttgccgccttgggggcttggggcttttgtctactctgcaccgtcaccgcgcggcgggaggccacctcaccttcacctcacctgtcaggtcacgcgcgcaacgctacccacgctgctgcttttgccgggaccgcggggggtggggggtgatggacccacctgacagtgtcacgtgtcaggtaggggctagccatccgccccgtcgctttcggttctccgctcgctggcgggtgggcccgcgtggcgtggcgtgtgggccccgccgcaccggacggctcgggtcgggacgggggtggggggatcagcgcgtggacttctggcgataggtctgtggatggatgatgatgacgtaagttcgaatttgaatttttggctcgctacctgtcaaaatttgcgtgtcaaattttcgtcatttggctggttgcaatctcaaagggagttttcgggaggacggttgggaaatgggaacctctcctctttggcgagcaaaacgaatcatgcattagtgtagtcttaattaagtattagctattttctttttaaaaaaatatgatttttaaaaaaattatagaatttaaaaaaacacaaacaccgtttagcaaattacaaagtatgcacggaaaacgataaagttaaagttagaaacattgacttgtgatgtgttcggaaggaggggttgagaacccctcactccggcacgctaaaagaagcatatattagcatatgattaattaagtattagttgaataatttttaaaaatatattaatatgattttagaaagcaactttcctatagataaattttgcaaaaaaaaatcatttaggctgagttctttccctaggttcccaactctcctctctcgtttttcgcgcgcacgtttttcaaactgctaaactgtacgttttttgcaaaaaaaaaatctatacgaaagttactttaaaaaatcaaattaatccatttttgaaaaaaaaatactaatacttaaataatcatgcgctaatggatcgctccgtttttcgtgcatgggacatgggtttccaaccggaactagcgaacacagccttagtcatttggaagacatgcgcgcacaaaacgaaagaggcaaggatggaaactcagggtatcaaacataacattatctatcttcaacttcccttcccttatatttattcttttcattagactttgtcacttttgcttattggtttattggtgatagaagaagcgcccgttacactttaatagaggaatttgttgtgaatgggaggttatgatgattgtgttggtgtttgttagatgggagttcatggaatgtggcctctaggctctagggattgtgtttctcttaatttcttttcagtttccaatcaacaaaacataagatcataaattactatcccaaactagtgtgaatcccctaaaatttcgaacatgtatttttctatgaaacaacttatagtgtatatttataagagtttgtgtctcattgatctaaaattacccctcttattcctatcgttgtcaagttgccataggaagcaattttttagaccacttaatcaagttgtactttgtatttgtttctcacatttacatgaagtagcatgtttggtttattgaccaaactaccataaaataaccaaatccaaacattgagcctaacttgctagtattttggtttgttatgttgtggaaccaagccatctgtcatcaaaccgtcctccctaaccacaccatacaactctttcttgtgactatatatggggagagaggctattattagccaaactccaacctcataatcaatatttacctagctttaggaacacttatgaagctaaggtcctaagtctagcctcagggattcgtcaccattgttcatgttcaccattaggttccaagagctcgataatctcatttcacactaactataagtctagaacaaggggattacaggaacgagaagagaaatcaagttgtatcaaaccttatattgagaactgaaaaggtagggggtatcatcgatcaagaccttctagatgagagagacgacatttatgacaagggaaagagaggcgatacttctctgcagtacctccacaccgccatgaggagcgtgcctccgttttgcacagtcatgcatgtctttacagttttgtgcatgctattttgtgatttgatagaatacgtgaactgaattgagtggagcatgtccatcttttgcacatgtttgtgaacattggaaggtcttacacgtgacaacaaaggaatatggagaacaaacgaatatctagcgtgtctcgtaaatagggaatatcttgatagaacatataaagatagtatgcccactgatagatgaattacaggcgtgctaatcgtgaatgggaatggtggtgcctatgatgggtaagtatagtagtgatgtggttccaaaaatcacaatagcgtgacaccccacatctcacatagaagggagcataatagaaaaatggtccaaccatccaagactaccgtggcagcttctcagcccaaggctagccaacactgaagtgaagcattggtagccaccggatcatgtcacggcctcataagcatatatacactagagaacgactactctagttacagtaatatttaccaaaccaatacaatctgtacaatcttaacttatgaaaatgttactcgtacaaaaattctctaagatttaacatccaaaaccatactccctccgttttacaatgtaagtcattttatcatttctcatattcatatgataactagattcattagcatcaatatgaatgtggaaaatgatagaatgacttacattgtgaaacggagggagttgtcacttaactactctctccgtccgatagaactcaactggacacacagtcacagacagtgggccctgcataagtttcgtacgcaatcaggtagggcccactcatcagcgacagaggtgcacttcccccttcaccctccaccatctctccctctctctctccattccccctctcctcctcagatctcccacctcgaaccctagccatggcgatcgcggcgcgcgccctgcgccgcatccccctccacctcgccccctccctctcgcgggccttctgcgcgctctcgccggccgcccccgccccggccgctgcctccgccaaggtcgccgaccgcatcgtgcgcctcctcgccatcgacccggacggcgcgcgccgcgaggtggtcggcctgtccggccagaccgtcctccgcgcgctcgccaacgcgggcctcatcgagccggagtcccaccgcctcgaggagatcgacgcctgctccgccgagtgcgaggtccacatcgcgcaggagtggctcgacaagctcccccctccttcctacgaggagcgctacgtcctcacccgcgcgtcccggaaccgggagctcaacaagcacgcgcggctcgggtgccaggtcgtgctcacaccggagctccaggggatggtcgtcgccgttccggagcccaagccatgggacatcccgtaattgcgagccgccgctgcgatggtgatgtgagacttcctttcccccaccgtctccctcggcgggtgcgttcgtgccgcgccaacgctttttttatgttatggattcgatgaaagaataatgatttgatgggcaaaactttagtgctgatgtttaaacttttgtttactttgaatgtggtaacatgtggatgatgtaatgtggaatcccttgaaattgcctcggttcagttcaattgatgaatggtgttggagccagagttaagattcatcctgtgcatttccatttgatttttactgctagtatatgactgcatgttgttactgattataatcaacttgctagaagggtaatcatgtctttaatttagttacttgtaatgtgaagaatgccttttggctgttgcaactcaatgctaactactccctccgtttcacaatgtaagtcatgtttagcatttcccacattcatattgatgctaatgtatagctagattcattagcatcaatatgaatgtgggaaatgctaaaatgacttacattgtgaaacggaggaagtaagtagtagatggagagtttgacacagtggcagagcgccttgttttttttgtttaattttggatttgggaggatggagtatataaggtgaatgggttgtttctgtttcatctaggatttgggaggatggagtatataggtgaatggattataggagtgctgatgttttgaggtatcaaatcataggaaaaagaagaagcttgctggcgcatcaactggtactgaagtaacataagcatgctatcgtgaataattatttcactgttggtatgctcccatgtttcttatgttcatgaattggttgtttatttgcaaaattagaatataacctagaagaaggctagctgtaatggtcagaattctgtcactgaccttggtgctgtactgctgttgcatttgtgatgataatgctactggtatacttgatgggaacacgagtaaagaagtttgagaaagagttgatcttccgttgagtgactcagaaatcaaaattttgcagcaactgaggtagaatcgttcctattgagtattaacaacaatcatggagtattaacaacaatcatggatcacacgttgggcactttccagaatttatcgtagcagctaatcccagatgatccacatttgcctgacaatatttataccagcctccttagacttgtttatttttcacgtggtttggccaggttattgcttgcctgggggaagcataagcagttcactcatatactgaaaattcggagttagtgctacacagtatttttcatacttcagaactttcagatatctgaaatggaatttggaattgctgcacaatactgatcagacttttagaacttcaaatagttggaatgctacaagcttatgtaacttttcaggctcagaactacagatgaacatgttgcagtttgtcttgctctggtgcaaaacagtcgtattatcgtttttcacacggcactgttgactgtctgaaaggtgaagaaggcataggaaatgtggcagttagtgtcagatttacaagatgacaagagatggtttacgttaatgctttatgtgcgctggttccttgatcatttttcacgtaatgcaacctaaggtctggtttactcttggcacattaacgtccagattcttcatggttgatagtccaaacaatgccaatcactgctaaagacgtttgcaactaagcgccacactaccaaaatcaatgcagaagatagaacaaagcagctctaccaaaatcaatagttcaatacatgcttctggaacaaagcaacagagcaactccaccgaaatcaagtactactacaaaagatgggaacaaggcaaatctaccgaaaccaatgtcaataatagagaagagaagatggaacaggaaaaccacaaaaagaaggggtcaacacagaggatggaaccataatcaaacaggtgatggaacaacacagctctaccaaaatcaatacagaagatgaagcaggaaaaccaaaccaaaagaaagatcagtacagaagatggaaaaagaaagccaaaaggtggaacaggaaaaccgaaagaagcaagctgagccaggaccaggagggtcaatagctcaaggtggataaccaaacaaaacttccaaataacactatagattggatatttaacgaaaaacatgacaccaataacaaaactagataactgcggacaaagcctacagcaaaaccatgaggcagaaacagacatgttcaccaagatctattgtttaaaatgactacaaaattcacactgcacctgcagcgtcacataatttgcgaccgaagaattattaaaaaagcaacagctacagtttgaatgacaagagtaaccaatgtaaggtaaaatgtctaaatgaaggtgatgtctttcagaaagttcagtgctgagttgcagctttgcagctacctgccgtctaccaattttcaggtgtttacttcagtaatcttgcgtcaggtgtgctccctgttggcatcggccttcttaagaagctcagccagcaggttggcagctgcagactcccgtgcatcacgagggtttgtctttggatcgccaaatgtcatttggctgaactccaggcatgcaatatgtacattggccacgtacatgcctgacaagataggaaaaccttgtaaaagaagtgcttgacatgatgtgcaatgcaacggcttaagaacaataaagatagggagggagagagaggttgacagttgggcaaacagccatttctgatcatcgctaactggagactagaaaattattaccaagtgattgcaaggctaaataactgatctacaatacggatcacgacatcaacagaatgtgcaatatcgtaacaaatgcaaggaaaaagttcagtttttgggttga

SEQ ID NO: 13963 - DNA, 501 bp, Oryza sativa
agtgtcctgaccagcccatctctccccgtcaaaaatttaaatacacggccattgtacttttcatctttgtgactgccagccaagttctattgtatgggatccaacaccaacctcgaaccattgagcctgatccattacattggctgcatctgattctggcgtcaagccgtagtactctcttgtcgcacgggatcgtcgctattctagtacctgaggttctggtgaagatctgggtgtacctaaagatcataactctcgataccagtgcacctgaaactggtgttcttatgtaagtgctgattctgctcacctccaattaatctaacggcaatattgcatatggagagatggaatggtgacagtcgatctgctatgctttgatcggtttcataaagaaatgaatattcttttgggtggtgaaattttgtaaacaacaaattgcaatttttgtttgctaattggggcctttatttatgaaattcaggaatagagcacaaaggt

SEQ ID NO: 13964 - DNA, 590 bp, Oryza sativa
aggaaagaacaatgcaggttgcagcagagaaggggaaatcataccaatgtcgcactccgtcccaatggcgaggaccgtggccaggtacttggtgtcggagccgcgcttcttaagcttgacctgggtgtagtgctccacggagtgggcgtttgtgaggacgcccggcctccgatgatgaagccgctgctgctggagctgtactgccgcttcctctgccacggcagggagaagttgggctccgtgtgcacgcagaacaccttcaccacggcgtccatggacggcaccaccctcgcgacctcgtcccagcccacgggtccccccgcctccaccaccgcgtcccctcctccattcgccacgggcttcgcctccccgcggcggggcggggacggcggccgcgacccgtccgcgtcggccggggcctcgtggcgccgcgacttgcggccccggcggcccgcggcggccggcgcggggttgtcggcggcggtggaggccacgggggacgcgggcgcgtggttttcggcggccgccttgtgcttgcggccgcgcttgcgcttgcccttggaggtggaggagggatcgtccatggaggc

SEQ ID NO: 13965 - DNA, 3991 bp, Oryza sativa
tatctctaatctgattcctacgttttttctgtagtccaatcaaacggttattgctgtgtttttttctgtgttttacaatacttagatttgaacatgtattatatcacctatgtatttcctattcctcggtcttttttcattcccgctattcaaggaaccctaaagttgctgtcagcccgtgacatccctgtgatttccaggatgtgcatttttccgatgcaaataactcgtctttgatagttagcttgatagattatcatccacacatccaaaacttaaattcccagacgttactttattttagagagttatttttggtgtttactcattgtatgttattttctggattgacttttaaatcactactgatattaagttttctggtaacttttctggattgacttttaaatcattactgatattaaatttttagaaaaaaatatttatttataagtgtttaggtggtatggatggaaggaacgagaccctaaccaaatgcaatactgtacagtttgttgttgggagatcctcgtgagttctaggatccacttttccgtcgtatttttcttcttcctgacgcgaattataacaacacgagagtacagtcgcccatattcatcccatcgctaccgtccgagagctttctcgctcggctgacggcgaccgccggcgccggtgtcgccacgcgccggcgcctccgcccgcttgctcgcacgcgggccggtcaagaggcccacgccgcgtaggcctagctagctagctgtatcccgccgccagcgcgcgcgcgagagagagaatagctaatacctcgctccccaatactattttgatcaacgatatctataaaactaagatgttttaaataaaaaagagctatatattatgatatattatttaataataaatctggtagcattaattttatattattgatctttttattttcttatgctattaatagtcaaagttacaaatatttgacttgacactatactaaaaatatatattttttttggacggaggggtagtaattaagaacatactccctccatcatataaaaaacgaatctagaaccgaatgtgacgtattctttagtatgtctagattcgtagtatatgtcaaatctaacagtgaagcaagcaaaaaaaaatgtgtataaacatgacctgtgttacaactagagaaacaaaaattaaatgaaaatcatgcagcacctgtgcagtgaaaaaaattgttatttttttcttcataaatagattgaatttagacttatatacaacacacacacatactcgccatagatatacaaaatactttccgggttggaaaacactcccctagaccacggaagcttcaaccccacccccacctcgcgcgagacgtcagcgacgacgtccgccgcgcgccgctaccgctacgtcctagcgctagcgcggcagctcgtgtcgcggtggaaaacgcccacttcgccaccgctcgcgcgcgcacgcccacgccgctcctcccctcccctcccccgcctccgtataaagccgcgcccgcgccgcgcacgccggccggccaccgaggacgagctagagcgcgcgcgccgccgcgaaacattagctatagctagctagatatagccggccggcgatcgaggagatcgatcgatcgaacgccgccgcgcgcgcgcggtcatgacgccggcgagggtggtgttcatctgctgcgttgttctgctcgccgccgccgccgcggcggcgtcgtcgtcgacggcggcggggatcaccagggccgacttcccgccggagttcatcttcggcgccggctcctccgcttatcaggtagacacgttttttttcccttttttagcgcgaactcaaccaccaagcaaacctgatcactgccgatgcatgcacagtgcacacacatctatctcttgctctacaaatcatgcaaaaaagaaggaaaaaacaaaactgtaactagatacaaatcggatggagttgaatctgttgcacaaattaattcgaaacattaattatatttctcgcatcatcgatttgctcgttagaatatcagagagtacaaaattttactgtcaacgcctgtccaagactgcaacctgttcgtcggtatgtccaaccgccacactatctcgttcgctattcctgtccatgtgttccccctgactaacacgaaccatacaaaataacaatataaaattcgtcgattcaacgagcacattcgttgtgccctttgttcaattcttggataaaaacagacggatgaaattcagagtgacttttttgttaacctctcgctttcctactgaactttaatcacagaagtaggctttgcttctttcttcgtttaacctttgtgctaaccagtgtcactctctttatgacttgttgtttcacgttagtactctggtaatatgcaatatatgtcggtatgcaagaaattcattgcatcgacgcaacatttcagtacttgttccgtctgtggttaactgttcagctgttctttagctttgttttgtacttaagagagtacaaattgtgaactggtgatacactgatactaaaactcctaaaagtcccggttttgcttgcttatgtcatggctagtccaaattcagccatcataataaccttttgcacaaagcaagggcataactccacaagagtcagtgtgcctgacgagccgattaattatacctggtacaatttatattcaagtattgttcgataggaaatatgtacttattaggcactgcaaattggtaggagaattattgaaagctgtaagatattgtcttctacaccaacttggctccgagaaacataagaaaagccggcgctgcataagtcaatttccccaagtactagtccatgcatctggcttagtttaatctgctagccgacaccttgttcttattgtttttctcgaaaaaagaattgctagctcttctggaatcggtgccctattttccatttttactgatttcatgttgcgaattgtgatgattccttggtcctttggtcaccgctaacctgcaagcagaaacaatcaaacaacgctcaccgaatacgactctcggcgattggtggcctctagtgcacaatcttgctttgtttctgacgaagatgtgtttgtttccatcgtcttccactaggaacaaaaaaccatacatgtcgttttctttccggtgtcacttgaatggtcttttctgcatcttccgtttggcatcttgcctttagagagagtgcataagtgtatcttgctaagtacaagtcgcagtggaggcctgacatttggcagattcagagaaatgcatggcctgaaacctatgttgttagaacagggaaaagttgtggtgaggtgagatcagtagatgttactatcgttgctttcagctgagttggtggtaaggaattggggaaaatgcattttgccaaataagtcagatgtgtactttgatttgattctctgagggaaaattagtaatcgcactgcattagtagtcatgcagcaatttcagtatattggttacaggtagaaaataattagcatcatagtaccctcattgataaggttgtgaacggttcaaaatggtgcatcataagaagttatgctactcgacatgttgatcaagatttggagtgttgtatagcatattgtactgacctgaacattcacaaaattgcttaggttgaaggtgcatttgcagaggatggaagaaagcctagtatctgggacacgttttcgcactcaggttagtttggtctaagatttacttgtgaaaattgagtctgtgtctacgataaatttcaaattcttaaaattaacgagaactttctaattctattttccacaggctattctgttgatggagcaaccggtgatgtaactgcagatcagtatcataagtacaaggcaagttcttgggacagttctggttaaggttttttttttcagattacgagcatgtcaatttctgaa

SEQ ID NO: 13966 - DNA, 10377 bp, Oryza sativa
cctgtgcaggcagtcaaacagaatatccttatatgggagtatgtgatagctctcagcaacaactgttgttgtagggtatggatgtttttcaactacaggaccaatcatcctgttaaacaggaaatgaaataggaaaaaaaaatgaaaacgttagaaactgttatactgagaacagtagaagctaccagcaattgaaagacagctacataaattaggctgtattcggaaggtggagttgggaactccacctccccgcatggaatagcgagtgagtgatcaatagattttttaaagcaactttcgtttagattttctttgggggggggggcgcaaaaaacacactatttagcagtttgaaatgcgtgcgtgtggaaaacgaggggagtgagttgggaactcacacaaatgaactcggccttaggaagtacaattagccaatattttcatgattagtataataataacaaaagaacatcaagcatgcatgtaatgaagtttagtcaaaagctcaaacgagaataaaaagaagagctttagcacctagcaagcacagcattcaatacaatagaaatgtttctaaacaaactatggactataaaggatataaatttacatcaatacagtaatacacagtgagcagattttgtttaataaataaaaccattgttgatcagagagcaaattcgcaagtgtgtaaacagcaaacctcttgatcaattcttcaataggcatttccgcgaagttgccttttgcagtttgctcgtactgtaagatgaacagctttgtagttgtcccttttttagtcaatgagtatgctaaatgctcatcaagaagacgcaagcttgaccgcttaatctctattaagaaaatcacagaaatgaaatacattaatttcagttatatgattcataaatgaaaaataaagcagataaaataatatagtcgaacagagaattggttgatatcagcccatatcatttacaagggaaattaaacactacaatgttcctagttatttattgatgtatcagcaatgctataaattcatgtttcgggaccaatagcttttctggttggtaattttcaactaaccaaagttttcaagctacataggcatggtccgaagctaattgaatagttcaaatcgaatgaaactaacatactgggggtgcaaaagtctcaacggatgaagcacactgataatgaaaaaaagagggcaaaatttgtttagttaagaaaatagccacacatggaaaacaaaatagagcaaaatggtatagtaacaacctgttctacgctccacctctgaaaatgctaacttttggaggacatatggtccagtctcttcattttctaaatcttgtccttctggcttgttgctgccatgctcactagtgctagatgtgtcaatctctttctccaaaagggagcgaacatttttaccgacagaaccactctccagcagacatcttttcctagttgaatcaagaagaagcacagcgacctttgaaattggccacatggccatgtctggagagtcttggtttgcgtcgagggcttcagcaattccacacgcatccacgactgctttgtcagtcacagagagattcacaccctccccaggacttccagaactcttctcatgttggtggaccatattggagtacgcgagcaaactgtcaccaagagtaagagatgcacatttgaagaacctcattgcatcagcaaaagcaagctgtgggaactgcttccggtggtaatagttatacagaatgactgccatatgaacctgcaaaaacaaggtggcacaacgaggaagtattcagccgtgtattacaagttgcctaaagagaatgcaatgtatgatgcatagggatacagtacagaatgtaagagataaaaaatcaggtaacatggcactcaattttgccatatttgcacacagctacattacagaatataagagataaagttaggtaacatgctactctataatgctatctttgtacacaactataatacagaatataggagatgttgtcacgcctcccacgatcctgcaaatttttttaatcaatgagcgcacccccccccaccccacaaaaaaaaaccaaaaaatttccatatattagaactcccgagatttcctagaggtttaatggaaacatctgaattccctttcctcttgaaatttgaaaaatcccaatccctcctcggaatggaaaaaaaaaacacaattgccagaagagggaaagccttcccgatctggaacgtcccagttagtttacgtcttccctcttttgaaatccgcctccgtctattcgttggcacctacgcccgcagccgccttctccgctactctcgggcttgtcggaactcggaagcccatgccaaccatcacacgctcacggcgcgccgccgccacaccatcccgctggcgcgtcgcggcccaagccatggcgctcgctccgcacgccgcgccgcgccgtcgcagcccgcggcgcggcgcccccacaaaaacaagctaacaaacccgcgccacacgccctgatcgcgtcgccgacggcgaccaccacccgaaacccccccaaacctcccatagaccccgggacccgaaaccccaccaccaaagtccatccattctcgcatcgcaggctcacctggcgcgcgacgtcggcctggttctccggcgtcatcctgctccccttccgcagcgccggccgcaccaggtagtccaccagtatccccaccgcgtcctccatctccaccaccccgttcacctccccaccaccacgacgctccacctccatcacccacccacgacggattaaaatacaaacaagagggaaaccaaaccgccgccgccgccgtcgccgtcgccgcctcgggatccgcctccgcgacggcgaggcctccttttatagagagagaaggcgaggcgagctgtgtcggataggcgcgaagggacgcgaggggggtaggggggtgtcgaggcggaaatgggaaacggtgggaggggggtggagtggggcccacgcgcgatgatctgggccgtccgattgtcgcctgggcggatctgggccgtccgttggcgccgtcacgagaggagcgtgcagtgcagtgcagcccagcgaggcgagaggggagaaaatgatgagcgggttgaaggctgggttgggttgggtgcgcatcggttacggcttacgaggcctttggagctgggagacgacgggacgggacgtgtcacctttggccctgttcagttctcacttaaaaaattttcaccctatcacatcaaatgcttggacatatacataggttattaaatatagaaaaaactaattataccgattgcgtgtaaattacgagacgaatattttaagcctaattgcttcatgctttgagaatgtggtgttacagtaaacatttgctaatgatggattaattaggtttaataaatttgtctcgtggtttatatgcggaatttataatttgttttgttatttaatctaccgatgtgacacgctaaaaattttcaacgtggatatatattgtgaatggatgttgtgtgatgggatgcgatggacgggagatgctgaattgctgatgaatggggccggtaagcaggggtttcttttcctcgtttatttcatttgtatttttttttaaaaaattactactttcttcgtttcaaaaaccttgtctaaattcatagcgaaaagttactatattttattttagaatgtaagcatgtttttttcttgtttatttcatttgtaatttttttaaaaagaaattactactctttctgttctaaaatacaagcatttgtccaaattcgtaacaaaaagttattatattttgggttagaggtagtactatattctctctgtctgtccaactgaacccttagatgctacataacgtaaccattacattgttgctcacatgggtgacatgaatgttactctctccgtccctactagaaaatatttccgatcctatgttcttgtattttatgataaaaaaagtagatgaatagatggatgggtcatgaactggtatcgagggttccatttgaacgtagtaccacaagtttaacatgatttattttttaaaaaatagtttaattttattttgaaataattagaaatttcttcgttttttaaagaggcattttttttcctgttcttgatgtggacacttacacatctctttgtgttaatgtagtttgcactctttttttgatggtttgctgctgagttggattctttgctggctaggctagaatttatgataaataaaattattttataatttacaattatgtttgaaatgggtgtaattaattgtgggaatatttcaatattggatcctaaagagagggttggataggcactggtgtgaacaagttcatatgaatttctattcttatgtttttaggaaatggttgattacttgaatactccaggctgtgttttgcacatgaacatttcgtacgaacctattgttcacaccagtacgtgtcaacccctctatttaaaaacacagcctagcatattcacgtaacataattagtctttcctttaaaacataaaaatattgtttttatttgaacctattcatacccagggatatccagccctcttttaaaacaaatcctaaaagattcacacaattaattatacccattgaaacatagttgtaaattataaaatacttctattccttcctttaaatctttcacgggaacatgttcacaccatacatgccaacctctttctttaaaaacacaacttagaatatccatgtaattagtccttacttaaaaacatataaatagaaatttcataggaagttgctccagggtttacaaaaccggctgcaaacatggtaaccggcttacctccatggtatagtaacagttaaactacggtaaccccactaaattcaaataaaaattaaaataatttaattttttgataaaattttgtacggtttctcatggcaattactgtgcggtaaccatgcaaaccgccaaagtgtggtaaccctgccctggacagtaagggaaaccttgacgtgttcatagtagagcatatttggcctctttacaaacaaatattaaaagatcacacaattaattatagccgttaaaacatacctgtaaattatagtatttaataatttacatctatgttttaaacgatataattaattgtgtgatctttcgagatttgtttcttaaagactagcgcaaatccgacccctttggaaaaaaaatctcgaaagatcaagtaattaataaagctgtaaatactataatttacagctacaccctccaatcccgaaagagtcaacttatagtgatgaatctggacaagcatttgacaagattcatctctaaaagattttttttaaatgaatggagtatgctttaatgggtataattaaccgtattcgagatttgtttcctaaaggacaacacatatctggccagccctctttagaaacaagtctcaaaagatcacacaattaatatagccattaaaacatagctgatcttttgggatttgttttaatggctatattaattatgtgattttttgggatttgtttctaaaggggtggatgtgtgcgggtataaagaggtatatatgaaatttttatttttatgtttttaagatagggtaattacatggatattctttgaagagaagggttggcatgtattggtgtgaacaggttcctatgaaagatctaggagtataaatattttaataatttacatagctatgctttaatgggtattggtgtgaatcttcctatatttatatctaaacatatggctaaatatgcactagcatgaacatgttcttatggaatttctatctttgtgtttccgatgaagggttgatacgtggatattccaggatgtattctaggctgtgtttttaaagagagggttggcatgtccaggctgtatttcgggttgtgtttttaaagagagggttagcatgttcaggctgtattccaggttatgttttcaaagaaagggttggcatgtgctggcgtgaacaacaaaacaagttcctatggtaaatttaaagtaagtgttcaattatgtagatattctaggattgtgtttctaaagagaggtgttgaatgcattttaataaaacaacaaaacgataaaaagaaattcaatcatttaccttaggattctaacttgttcagttgttcccatcttcattgttagggaagttgattctaactattgtttaaagaaatggttctaacaatcgaatagaataatgtaaaatagctaaataaatctacaagtcaacacatgtacttaatttactaacctcaagtgaataaaatttcttgatctaacctgtgagatggatgaaacacaacttgccgatatgccaccacaactaatttaaccgatgctggtgtttgacgcctagctttactttggcgttgaagatctgccactggtagctagtttcttccttatctcttagatctagatgacacaaaaagattgagctagtcatatcatcataagcactaaatcaaatacaaggaaaagaacattaacaacgaatccctctccttacccataggtttcaggatgcatgccatctacgccgatcttgttgcgttaggaagtggtttggtgggaagggaaataacagggagacaatggaaagacgagagggcaagatgtcattttatagtgaattattgggtctcgtagccatatcgtgaggttaagcatagcgaagtacagtggacccatcacctcatagccatatcatgaggttaaacatttcttagtacggtggacccaccaccagtctctcacgaggttaagcatatcgaagaacggtggacccatcacctcatagccaccagtctctccgatgttccgttaaaagaatttcatcgaaaatgcccactttagttagaattgactaagcttaaaaaaaaaattggctcgacaagtagagtcaagagctaaaattaaaataaagcgcttgtttggcactctaccgcttctagagttggagtccaaccaaacaatttcagcttcaccaaaaacagaagccaagcaaactaaagtgctctcataaaataaactagcaaggtggagcaagatctagactgctctacaacttaactctaaatccaactcctttgagataaatttaagagttagagctatcaaataggcttgatgtgacttgtataacaggtggtgctcacatgctaatgcaacgtgtgtaacacatttgaccgtttcaacaatatttctctaaagtgagacacgcatttcatcatttgtaccaaatacgtatcaagaaaattaaactatgttcacctctacctgaaactctccatcgctttctcttctgtgtacatgaggttaggttagcagtttagcacaccttcaccttcaccgttgcccctatccccttccattgacacggccacaccgcggtggcaacttgtgaagcagtgtaattgatacatatacggtacttcctccgtttcacaatgtaagtcattctagtattttctatattcatattgatgttaatgaatctagataaatatatatgtctagattcaataacaacaatataaatgtggaaaatgctaaaatgacttacattgtgaaacggagggagtacatcacaaggaattgcaacccaatataatatctggaataacatacgatgcacaagaacacaatattggagtaatatcagtgatcagttatgcccaaggaaagttcataacaaatgtagctaggcacctcaacgcccagaatcacacgaagatagaagatatctccattatgacctcatggaggccactgcatgcttcaggtttgagaagaaatagtggtcctgtaccaggaccagtaatttatccgcaggggatcacatctctgcaatattgagcagattgcagtcgcaagatcagcatctactgcttcatctgcttcaggatcagagttctttattgcttcgatagttcctttgagttcatctgaaggttgtaaaccaatttgaagaagatcgagcagcaagctcaaagcaaatacgcaggtcgaatcatgtttcaggaccttgagacaaacatcagagatgcgctcatcagccatcagcaagttattttcacccttgtacaggcctttgaggtatctccaggggctttcattctgagggttagccagaatagccccaactgtgtaatccacttccgagtcacgcattgctgcaaggcctccaagaagtggtgaacttgttattacaaggtatctctgttgcaaaacaaacataacatacttcagtgtaatcatttgatcttagttaatcagccaaaaaaagtcagaaaggagacagtagtaggacaaaataccacgtaaagcaagaagagaaagaatcaatgaatttagttaataaatcatgaaccggcatatggattttcagactactattcaagatgggacgaattaaaagtgaaattgtataataaactagaaattttaaagccaaacaagcatatcaactgacctgattccaagctgaattattgaagacgtcttcctcaagcagctggttgcaatactgtagttcagtctcccatccacccagtgcttgaagaacccactgcagcagtaatgatacataaattatattattagaactcagctttccctcaaaggtttgctcagtgcagcactcaaatatagataaatgaactcaaacgagtatcaacagcctaattttagcgcacatcgagaggaaacattatatacctgcctatgagaccaagcatggtaatttttagcatccatagaaagtatcttccttgtaaattcgtgctctttatttgcaatatctggtcctaatttctccgcaagccatctcttgtgatgcctgagaaaatatatatagtactgggacgttaatcaagatttcccaacaaaaaagcagaagaatgaagttttaattacagaacgctcagaattaatgatagcaagtataaacttcatgaaaaactccacagctaccaaatatgggtataaacttaatgtcactcaccagatttgataattttttgggttacattcagcaattcggtccacaaaatccatttcctcacgcagatcagcatccagtgcctctagaacaagacgcctaaaatgccacacctatcaagcaaaaaaagatcattaagttcaaaactggcatccaaatgaaatgcatgacgctaaacacataacaaggaaagacaattttacatgccaccatgttttgttgcttgttaaactcagaactgggagaaatttgcacattctgcatgcaaaatgccaatgaggcaacaacagatggctgagtacaaatttggagggagcaaacaaagtaaaagtcctattatggatatggactaaaagccccaaacataatttggtacagtactacagtatattttaattatatttatctttctgatcatgaaaagtacagcggaaaaactgaaaatttgataagtctgaaagagacaccaccacagtatgcagattaaaatcaaacactaactgttttctcctgctctaccataaatctagacattctcaatgcgtccacaagaaaaaaaaattaatcaattttcctaaatttgtcttgccgcgttgtgtctccaaaacaacattatatatgctagtcaagcttgccatcacagttatacttttataatcaaattccgaaatagataaatccgccaagataccactagctaagccggaatttgccaatatcccaacatgctactcttactataacaagtgaaggctagttctacatgtacataggccttgtttggatgctccgagctattaaatagccctccggaatcttgctatttagaagtattaaacatagattaccgataaaaccgattccataacccctaagctattttgcgagacgaatctaatgatgtatattaatccacgattagcggctgattactgtagcatcactgtagcaaatcatggattaatatacctaaacagggccatagttctaaatgagcaaatctcctgcactgcaaattcaatttccaacatgaaaaaaaagggggaataacacgagcaatctcaccgtgtagttgccgggattaaggtcgatgacctcggcggtgaggtggagggcgcggacgctgcgctcgccggcgaagtagagggcgcggaagtagtccatgacctcgcggaactcgtcccggtaggcgatggccaccacggggtggggcccgtcgtcctgcgtcacggggaccacgtccgccagctccggccgc

SEQ ID NO: 13967 - DNA, 782 bp, Oryza sativa
cgatcgatacacctctccgtgggttgttgatcttgccggtgcagatcaaccttattcctgcaagcaaatcgaagaaacaagcaagaacaagatagaagcaatctgaattgcaaataggaatgaatacacaagataagttggggttccgaagaacaagcagatggacggtctagccgacacgcgcgctgcaaggaagtagcaatggctaaactttcatctaaacaaaacccaagaaactctaaaggggtacctaactatttaaggaggtgggaggacgacctaaggggaccctagggtcgtgctccacctggttggggcgcaccccacatgggccccacttgggccggggttccagacgaagttacaagcccataggcccattataggtgacgcagcaccttctttttgtgatttcggccgactgggatggaatttggcgatgaagctggatccattggaaagatgactctgagagctttccatcaagtactcatggacctaaaatggagctcgcatgcatatttggtggccgtttgaagttgacactgtagcaggtggccgaactagattgcagaacttggacggcttgatcttgatgtggacgacggttgtatctatagtagccatggtcacatcatcagtcggtgttgagtgtggctgggcccgacgtcgaggttactcaatgaagcttgggcagcctgtgtggtcgtcggatggcgccgtcagtcttgctccgccgctcggtggagtccggtcattgtgcagatggtgtgaatagtgca

SEQ ID NO: 13968 - DNA, 520 bp, Oryza sativa
aatcgacttcccgggcggtttcggaggcggtttttgtcccacgtggcatctttgaccccgttgaatggctgagtcatcaggtgggacccacatgtcagccagccggctgctggtgctgcgtggcgacagggtggccttttcctcctcgtcatcgtcgttctcgcccgacgccgaactcgagctggcggcggcgggctggcggccacgttccgcatcccgccgcagctagagtgcacgcaacaggctgggagggggctagcggcggcgttctgcatctggtcctcttcgtcgctgtcctttcccgcctccccaatcaacgccgcctggtccgcacggtggcgagcaacgatgacggcaggaaccccatgggtgtcaacacggggtcctcgatggtctagcgatcgtcgtggaggcagtgtgcggaggcgatgatgtacgtgccggagatggagaactgtgccaccttgacgctgagcggcctggcgacgtcgacggtccacgctgtgccaccttgacgccc

SEQ ID NO: 13969 - DNA, 683 bp, Oryza sativa
ctactacctctcctcttctctcctccatcgtcgttggcatttatccgtgacgtttgatcattttttttattattagaaagaattatgtacatataatttattttgttgtgatttttcattagtaaatatttgaatataacatgttttcatagttacgattgtcagggttatggataccacatatctaatagtagttaactaaatctcggcaggatccactacataccatgtcttatacggaaactgacctcgagggagttccggataaggaaagacaaccagagttctacatggaaacgacaaggactactcggattgtatccatattggtttctctagttctacttggacaagtggacacctatgggtataaatacaggccccctacgaggagaagggggacaagacaatcaacacccaacgggatcaacacccgacacgatcaacacccaacacaatcaacaaagaagcctacatacgccaagacacgccgccggatatcgacttcaggaataagcacggctagtaccctacggtgtctccggatactgtcaggagagatgaaagcgctatctctgacctcgctgggcacggattcgaggaggaaggctaccctgttgtcgactacgagtcagatcgtcagaccgccatgtcgacaacagttagataggctaccccaaata

SEQ ID NO: 13970 - DNA, 1271 bp, Oryza sativa
ttttcatttgaatacccttgaattgagttggcccacccctgcccatgaccatgacaaatagagtaaggccctgtttagttcaggggtgaaaagtatttgtgtgttataacggatttacggacacatatttgaagtattaaacgtagactaataacaaaacaaattacagattctgtctgtaaactgcgagaagattttattaagcctaattaatccgtcattcgtaaatgtttactgtagcaccacattatcaaatcatgacgcaatcaggcttaaaagatttgtctcgcaatttacacgtaatctgtgtaattagttttttttttttttgtctatatttaatactccatgcatgtgtccaaatattcaatgtgattggggaagctggagtaggtaaaacagtactcatcatagaattaattaacaatattgctaaagctcactggggctgggtgaaaattttttatttaggaactaaacagggcctaattaagctgtgtatagtaagcacaatttccacgccgacgcactgcaattttcacgcaactttcaccgcctatttccttcttttacccccacaaccacgaccacgacgacgaccagagtaaacaagtcttattataaccacccccctctccttttccatctacctcctccaacgaagccttccttcgcccttgtcgtccaaccctcctctcctcccctcctcgtcgcggggctagggttacgccccctcctcctcctcctcctcctcctcctcgtgtgggggcatggccgggagcgaggcggcggcggcgcaggaggcggagatggacccggacttctcgggcgggggcggtgggggccccagcttcgagttcgccttcaactcggtcaacttctccgaccgggtgctccggatcgaggtcgtcgcgggggacgacgacgacgacgacgaccacgcgcccggctccagccgggacggcggggccggctcgctctcggattgggcgcgccaccgcaagcgccgccgcgaggagctcctcaaggagaaaggtgcgttgttgaaaccgcccaaattaaacgcttgtttcgtcaattttctttttaattttcgaattgtggacgatcgttttacgaaaatttcggtgccttcgatcatatattaggtggtcaatgaaaagcgaccagggtaacggagaatggatgaaaggggattttatttttctccttccaatttttagatgctctcgtgtacttgtaacagataccttttcagaatttgatatttt

SEQ ID NO: 13971 - DNA, 957 bp, Oryza sativa
ttttcatgtgactaaaaagcgcagtaaagaatggcttgtttgtgtcatggctatatttcagctggcagttgctgtgcagtgggctaaacaatggatgccaagcacactccagagcaaatagacacttctcaacagcatctgctgacgattgatgttctccagaatatttgaaaagttcagcaaatgttaacaatgattctgggtgataagggtactttgctaatatagctgcaatagcattgagatcatttgcagatttggcaacttcaaacaagtcttgcacatgactgacagaaggatcatatatgtacctgcacgacatgaagagtttgattatagagaaagttaaggaaaagcacaggcccattgggagttaattctgaaatcttacatcaccttaaagtttagaaaaaaatatactgagaaataagattgtgaggaaaagcagtacagtgaacacaatatacaatataactaatggtcatagttgtaagctgtaaccaaacaaaatagtgatgtgcagagatgataaacagggatacatgatgcacaaaaaatacgaaatggcctcacctgaaatagttgaaaccactctttgtctccacaatatccattgacattgatttatcccatggtggccagtagctagatggagtaacaagaagggtttttcttggattgtgggcaacgcgcctaacacctcgtagccttgatgttgaactgctaggcacattccgttgattttcaagtgaatccactacttttgatccaaaaatgcgcctcatctcattttcagcttttagatgtttgggatcaattgagagaatagatgatgtcccaggagtggtttcatctatctcaatctccttcccagatgctctttcattttgattaactctttgctgcatgggcttcttttcaatagataaatcttccagaattgaatccagtgacttt

SEQ ID NO: 13972 - DNA, 8067 bp, Oryza sativa
atcgcgctgagtagcactggtcacccgtccaacgccagacgaggtgatcctcaacacccggcgagagctgggtaggtagcaccgcgtcccagactaacaggaactgagagatgaccgggacagtgagggtgccatgtatgtcaccaacccaggagttgttcgctaacccagcagcaactgtgtgcgatccccggaaacgtggaggcacggcgtggaggaggtcaggagctatagaagctatcgagcgaccatcgatccaccgatcagtcctgaagagcgtggactgaccatctcccaggatgctgcgaatatgttggagacgctccgctcaacaggggccttcagatcagaccagtaggggtgtcccgagcgctgaagccagagccagcgaactctcaaggcaaagccagccaccctgagatccggaatgcccagtccaccgagatccctaggacgacaaaccctcgtccaggacacccgtcactgtcccccattggccgagtccgtacccatccacaagaaggcgcgacgcttcttgtcaatggctttgataacccagcttggcaagccgatcgccatagaaacatggaccggaatggaagagagaaccaactagactagaaccgagcgacccgccagagtggttagacggcccttccaggggggagccgatgggacactttatccacaagcggttgcagggccgcttttggcagcttgcgaactgacagtggaatgccgaggtaggtgcaggggaactccgagatcgagcaaggaaaagaggactgaaccagctccaggtcaagaaccgagcagcggatcggagtaatcaagcacttggtgaagttggtccgaagcccggaagcggcaccgaagacagagaggatgccttggatgaactcaaggtcttgccgaacgggggaaaggaagagaactagatcatcggcgtagagggatgcacgatgttgaatagcacgatcattgaggggaagaaaactacccgagtcagaggctttgcggagcatcgcattgagcacatccatgactagaatgaaaagcatgggggaaagaggatctccttggcgaagacctctccgatgggggaaccgtggacctggcaccccattaaccagcacccgggaagaggaggcactgagaatgagggagatccaatcacgccaacgttgactgaagccaagctgggctagcacctcaagcaagaaaggccagctgaccgtgtcaaaggccttcacgatatccaccttgagaagaagtcggggaacgcgtttggcgtggagcgcccttgccgcaagctggacatagcggaagttgtcatggagagagcggcccttgatgaaagcgttctggttaggcgccacaaactcgtccaggcgaggggagagacgagaggccaagatcttggagaacagcttcccaaagctgtgaataaggctaatcggcctgaaatccttaacgtcaacagcctcgtccttcttcggcaagagggagattagggcgtcgttgagggaagcaaaaccttggccgttggtcaggaacaaggagttaagggccgccagaatttcgaccttgatcactggccagcaagacttgtagaaacggcccgtaaaaccgtcaggaccgggcgccttatcagagggcaaggacttgatcaccgcccagacctcatcctctgtgaagggacagtccagtccctcaagctgcgcagggcggaggccaagagagtggaggtctagggcgagttcacgcttgacgctcgtccccaagatggcgcaaaagtgagaggaggcaagctcttgcagcgcattatgggagatggcaagctggtcaccatcacgaaggcgtgtgatgaagttcttctgcctacgagctctggcgtgcatgtggaagaacttggtattggcatcaccctccttaagccagaccaaacgcgaacgctgacgcgcgatagtacgctcaagcgaggcaagaccaagacacttcaactttaaatctcgccgcagccaggtctccaagggggaaagagaccgactctcctgcgcaacatcaagccggaagacaagttccttcgccatctgaagctgcagacgaacactgccaatgtgacggtcactccagctctgtaagcgcttggctgtggtagagaagcaccaggcaagagcggcaagagggggtaggttggcagggggatgccaggcgtcctgcacgacttgaagaaagccatcgaacttgggccaaaaggcctcaaaacgaaaacgatgcgctttcggggaggtgacgcaggtatgaaggagaagagcacagtgatcagaggcgatagaagaggccgcttggaggaggcaagaggggaaaagctcctcccaatccgcagagaagaggacgcggtcgagcttaacaagcgtgggcgactcgcgctcattgctccaagtgaagcgacgtccgtgaagcggcagctcccggagttccaactcgtcgacgagccgacgaaaacaacccatcatacgacgattgagattaaggttgtttttatcccgagcttcgagaatgaggttgaaatcgcctacgacggcccacggccccgtgcgagaggagtgcagcgaacgaagctcatctaagaaacgaagcttgtcaggctcctcctgtggcccatagacgatggagagccaccagggggcgacatcagaagagtgtcgaaccaacgcggtgagagagaaatccgcaaggtgaacatctgagacagaccagacagtcgtccgccaggcaagcaacacccccccactccgaccgaccgcaggcaagaaggaataatcaaagtcgaggcctagcatttccagaatagtacgagaggggattacatccataatagtctcctgaagacagagaatagagacatgctcatcacggactacatcacgcacagcatcccaacgggcgcgcgagttcagacctcgcacgttccacaccaaaacgttctcgttgcatgatcccattgtgggggaccacaccgagagcagaagagaagaaaccgatcagccgcacacgaccaacgcctctgcagccttggccgggggcaaggagctggagaagagcgaggagagcgtgatgatgtgctcttgggaaagtggcttggagaagagggcgttgtaagccgcgaccgcctcggccgtgaccgggcccctctccggaactaggccgagcttccgcatcaggttgcgctgggcgcgcgacactgcgtggatcgacccctcaagcgcctcaagtgccatcttagcagcgatacgctcactgcgcttcggcacaacctccaccaccttggcggcgagaggcggcagcggcaaaggcggcgggaggagcgcaggagggagaggcctagagcagctggtgaggaaggcgcgaagagcggcgttgtctgccacagaagatggaagcgagtgcgccagcgggcggccatcgaggtcaaggacaaccatcggcacatcgtagaggacgccgtcgggcccatcaaccaccaaagttggagcctgctgaggaagcggcgactcaggcctcaaccactccccaccggtaggctgtgtgcaggcagtccttggcagagaagtgccgcatagggtgttcacatataaagttttagcatgttaaatcgggtattatttagagtgtcgcatagggtgttcgggcactaataaaaaaactaattacaaaatccatcagtaaaccacgagatgaatttattaagcctaattaatccgtcgttagcaaatgtttactgtagcaccacattatcaaatcatggagcaattaggcttaaaagatttatctcgcaaattggttgcaatctgtgcaattagttattttttaagcctatatttaatactttatgtaggtgttcaaacgttcgatatgacatgttgaaaaattttgttgtgggatcttaaacaaggctatgaacaaaaaaaccgatgtgagatagttggctgcatcaaccaaaaggctttctagcttgtgcactctgttcattcgtgtgtgtgtgtgtgatgcaagtgaaaaatacgtgagtgtttgcgataaacaatacacaagagagggagtgattccaacaatcaattctattagcaaatagatatattcatttttagcctttctaattgagatttgaataatggatttgagtatctaaaagtattaaaaaaaagttaactagaaaatcataaatattgtcaagagctacagttttcatataaaccttatcataattcgaatttgtataaaaaagttaagtttatatcccaaaccgacacggatgcttattaagacccgacattgatgactttttccatcaacaggctagtccatcccactctaatcgacttgaaccgacactgatgattaaccgatcaatgtcgggtattcttataaactggtatattggtttgtatgtagaataaccaatattggtttgtatatgacccgacgctgatgtcttcttattagtgttaggtgttacctctgcgtagtgctagagtgttagggcggaaaaccatcattaatgttgggttttattgaaccggcactgataatagtgacaccgatatgctattatatactcccttcgttttaaaatagagcaacttttagctatcaggatttgtcccaaaatatatcaatttctccaccaacattctcttcccaaccaataacaaccctccatcattcactttttccacataactccactactcatccaatcacaactctccaccactaacttctatctacttttttaataaccgtgtctaacactaaaacttcttatattctggacggagggagcagtatttatcaatacgcaggtaagcgcaaaaggtcagacctaatccctaaagaacttaaggttaagtttggttcaaacttttgctagatacgtgatacgtcactcaagtaggtatatactccactaaagaacttcaaacataataattgctctccaaatcacagtcaaactaattatcccacaaaacaaagttaaacctgcgcctaacaagtcgacgtggggcgacacgagtggggccccgggtcatcaaatgcaggcatgcagtagacagacacctacgtgccctgtacacgtccgtacatgaacattttgatggaaagataacgacagcgacagggtaatgcaggtggcacaaaggagtacagcaactcaaattggtcgccaactctcaccattttttctgaattccaggtgtttctgatctcctctgttcgtgattctgtccgatttttccatttacatccatacacattctctggcctccttctagaagacgatgtcgcttttattatttttggctattgcgtggagggttggaaccttccactttcgtatatagtaaaaagaaaaaaaatattaactgcatactttttttaaaaaaaaaacccaacctaaaaatgtgacccctcctagtataattcagaatcgttgtactgggagaggattggcttttttgggacggagagagtagtaagttgctcatcttctagtctacgtctccggattaatatcttcccgattcataatgcgacgaagggtttcaccggccggagctcgccgccgttgaggaagtcggagtaccaccgtgccgagctcctgacgtacctcgtcctcgccggcgcggtgaagtcgacgcagcacaggccaaagcggttgccgtagccggagaggaactcgaacccgtcgagcagtgaccacacgaagtatccccgcgtgttcgatccgttcctgcatcgcgaaccaagaaactaaattaactagagtgtctctctctgaagttccaaagatttctagactggacattaatttgacgttatagaaattagtttatttttcttcaaatttagccatattcgaagaagtttaacttagaataaaaactgaaacaccttacaatatggaatggagagtaacaagcagggagagtgagcacaccgtatggacaggtgcagaacttccaggtagctctgcaagaaatccgatctaaagtcgtcgtcgtagtcgatcttgcccggggtctccggtgaatctgcgtcgcctgagccatcgagagggaaaaaataaaatcatattcacatcacattgatcagatttacattacgtatgttcagaaatagctcgataattcagaccatccattctcgtggatcatgactggggggttgccatacttgagcttcagtgatgtagcatcttgccaagagcccaggatgaagctgatagtgctcctgtaaagggagggagcattcaagcaactgtcaagactgaatttctgatgcattgaaaaattttctgaaacaactctgctccactgcagcatgattatctatatattaccttgtcgaatcctcctccaccattctctgcaccaggtgagcagcaagtcagctcggtttaatctcatatatggaactcaaaaaactaatgcagttgactgtagaaaaacatggcaatgcaagattaatttgcttgggaacatctggcctgtggttgttcagagatccttaccttgaacacctgcatcaacgtagtagtcccttagtttctggtcatgatttgcgtcgctggattgcacaaagataacgaagtaatggttgatgccgatgaagtcgaacgatccccgtattttctccgaatcggacgccgttatggatggcaaccgagcgcctacgcggctcctcattaccggagggtagtctccatgcaccagaggattcataaacctgcattatttcagaggggtacattgtaaattcaggagactgacaaatagccaaactgaatgtattttcgtatgaacatcgttttgagtttgaaaaatctgagtatgaacatcgttttgagtttgagacagtagtattcgactacaatttaagtagttactaccgcaatttaagtactaactaaccatccaatatggaattcattcatcctgattgcagcagctgcatctgccaccgcgtcggtgtagggctcataccaccagcccagcagagtgatccctatctgacctccttgaattgcctgttgccaactttccatgtccaaatccaattttcagggaccattttatcttggcacgtgaaagaaacacaaatgcataatgaaaagtattttgtataatggtgaacagtaggaattagttatggaatttaatatgacctgatacttctgtctgtagatggacactgccgaggcatgagcaagcagcaggtggtgagccacgatgtacggctccgtcgaggagtcgccgccggtgcagttggtgccgaaggggtaggagcaccgccgcggcggctgaacgccggcgtcgtagccgccgatgggctctatgttcggctcattcactgtcacccagtgcttcaccctgtcaccgaagttcttgaagcaaacctcggcataagccgtgtaatcttctctgaaaatatatggtagattacaccatgtcaggctgtcagcatgatcccctcaaagagaaattgcctgaattcttcaccatttcgatcactttgcattgcgaaaagccgaaaatgttcagcttgtcagtttgtcacacaggattttgtggatttctcagggtgcttacatgaatctggggctgagtattccaccgtactcatcctgaagggcctgagggagatcaaagtggtagatggtgacatgaggttgtattcctgccaaaacatggcagaagatgggtcttgattgatcaagattttggtaattaagaatagagctgcatggatcatgtaatgtttaccgtgcattatcaattcgtctatcagattgttgtagtattccaagcccttggggttgatctctcctcttccatctaatccaattgaagctccctgtcagaaatgttctgaagatattcaatactaccttatttatgtgattatgtctacctggaataactacgaggccatacaatggagaatctgtacgcatacaggcccatgtcatacataagctttacatcctactgaaatcattga

SEQ ID NO: 13973 - DNA, 3094 bp, Oryza sativa
attcctgcagcccttccacttgccatattcttccaaggcttctatattgtactgcctgtcaggacacggcgtaattttcaagcctactgccacatcaagctctcacatttcttgtatgggcctgttgtcttgcaccgtttactgctcccacttccttatgttgcctcaaaggtgcttgcctacactattacactttataatgtgatactactaacactgctgaggcttcctatgtaaaacatgctaactctgttttttgggttgcaggtgctgtacaagaaatacagtggaaacacactagtgaatttgcttggcaagtgggatggattgaaccattttggacagtctatccctgttggagggatagtgtactacctaagaacgccccctatgtgagtgcacatacttgtggaaattatattgcccacatttctgatttcaatttaaaagtatgacttgatacctaagtcctaagtgttgcctttttttttgctttgccttatgtttcccttttctctcctgcagcttggctgatttgcacagggacccgttccatgcatttatatatgtcgcattcgtgcttatttcatgtgtgtttatctcaatgggtcttatggtctgtgcatcttcaaaaggagttttcaacgggtttgttgtgttaaatgtatgtatgaaaagaaactctgcgcagcattgttgttttaccctcttcccctgttacatattagcaagttaatccgtttactttgattgattcaatgcagatgcaggaggaacgaagactgaggcttgcccagcccgactcaatacatgcgaacgaaattcggcgtcatgtcatgagggcagcttgtgttggtggtttctgtgccggtgtactaataattttcgcagatctcattggggtgttttgttctgggactggaattatgcttgctgtgactgcttcatatccttatgttgatggcagagctagtgaggtcgggtcctttggcttctgactgatcgagatatctactcctaaataaagatgagatacagaaagcggctacttgtaacgagagttaaatccatggatatttatttattatgtagtctgcaagaagctaatttttttttctttttacaatgtatatatttgttatttgctgaaaaccggtgtttcagtgaaacacactaatctgttttggtcgcaacgatcagggttaacaattccgacgaaaaccggtcgaattctgcgaaatttcgaggtttcgacgaggctcgaaagtagaagccgttcgatgagtttaatccaaattcaaatttgaattgataaaaaaggaaaaaatcaaaaaaatcttataaacaatatgatattcatataatctattgggatataaattttcgaaaaaattgatgtattccgtatatttactgaaatttacagtagaaaagaaaagtaacgaattaaaaaaggaaaaaaaaatcagtttacctctttttctagttaccgattgaaatttcaatgatttcgcttggaattttgccaaagccgaccggttttcgtgagcttatcggtaaactcaggaaatttgttttcgcgggtttatgaaatttgttcgaaatctaccggttttccaccaaatttcatgaaaaccgtcattccgccagagcccgaaacagaaggccatctcggaatcgtaaacacgggcaacaatgttggaaatttggaactaatgaagtcaaggtcctgaaaaaatccccaacagctactgataaaccaatggaaatccccaacagagtcaggtcctaataaaaggtcctgaaaaaatccccaacagagtcaggtcctaataacaggtactgatagaccatactgatccaacacggtaataagtcctgaaaaattatccccaacagagtcaagtcctaataacagctactgatagaccatgctgatccagcgtaatccccaacatagtcaggtcctaagagcacccgccagatataggcccagatgggtaatatcatgcggagaccgagtcactgctcgtacggctggaactggatccttctcacctgataatgtaacacagaacattttagcatgcaaacactcaaaaagcattgcatgcgcaaacaacattcatttcggcttagaatttgcagagaattaacacttacccccaacgaggccgatgataagggccacccagaacacggcgaatacgctgccgacggcccatctgagtataccagatccggcgccggcgccgtgatccacctctacgaatccggcggcgtcgcgtgcagcaatatccacctgcatctgcgtgacgagctgattgaagcgaccatgcgcctctagctctctagcggcctcggggactcccccaaggaacgtataagtctctgcaagtacacgcttgatcagtgcactcggtggaagccgacagacaaatgtacaagatgtgattgcgaagacaatgttcaaagatctagatagttttatatacaccataaattacattaacaaatgagaaacattaatatctactaacacattaatttctgaaacatatatatagatactatgtgctagacaaaaaagcaagattaaattacttgcatgtaatgtttggcattgacactacagacttcgagtattgggaaataattgagctagatttcagaattctattattctattattgataaggaaaatgcacttgattctaacaaacgaaccacaagttctgcaaaacgcaacaaacatttaaccaaagatcacagaacaaaaaataaaaagaggggacaagaattatccttcttcgctgctaagaaatctggtgctgaaggaactaaagaaatttcctaaatctatcttgtaacttttttcctcatatatgatctttgaaattaacaaatcacaaattcacaaagatcagtgtgatttaagaattttcaactgtaaaagaataggagttaccagatggaatggggagacacagcaggatggctagcggaagaagataatgccatcgaaccatcgctgagcggcggcggcgggcgagtgcagggtacacggatcgcgctcggccaggctgcatccgga

SEQ ID NO: 13974 - DNA, 629 bp, Oryza sativa
agccatccgccgcggcggccgacgcctccggcctccttgagaggctcatctccgcgctgttttctaagatcaccgccaatccggagacgcccgtcgccgcgggggcagtcgggacgccgaaccgctcgtcgtcgtcgtgctcgtcgtcgccggacacgctcgggttcggccggtcgtcgtccaccaagacgcccgagtcgatgaagccgtgcttcgccagggagtggtggttcgacgacatgacgtcgctgtgcccgcagaccatcgagaaggcgatgagggtgctcggctgctacggcatcgagaacaagaacctgatcctgacgcggttcctgctgcactacctccgagccgccacgcgcaggccggcgctgtgcagggagggcggcggcggactcgccggactcggcgacacggccgtgcacggcgtggcgctcgtcggcggcaccgcgttctcgtgccggggcctcttctgggtgctccggatcgtgtcgtccgtggggctgagcaaggagtgcaggcacaaactggagaggctcatggggctgatgctggaccaggccacgctcgacgacctcctcgtctccggcgacgacggtggcgtgtacgacgtgaacctggtcatgcgg

SEQ ID NO: 13975 - DNA, 1224 bp, Oryza sativa
  unsure (1)..(1224): unsure at all n locations
cgcgtgtttccggggagtaaagagttgtcgtctgggccccacatgtcagtagtactggttgtccgctacgaggggatgacatgtggggtcactgatgagtttcacttgggttcagtttgctagtgccacgtgccaaggataggggcttttccgtcgggatccgcttctatcggcgagtgtcacccccgtctcttgatcgtcttcccgtcaacgtagcactagctcgcggttaaatttggcaaatcaaccgcttgatgatagatacgagcccggaatttgacgaccaaatgcccaaaatttcacgaaacatcgtcacacggacacgtacgtagtgcaaaatcacatggcaaccaaaaaattaccctggcaaaaatgggtgaaaatttttagcgtgtcacatcagatatactgacacatatttaaagtattaaacgtagtctaataacaaaataaattacataatccacatgtaaactgcgagatgaatttattaagcctaattaatatatcattagcaaatatttactgtaacaccacattgttaaatcatggaacaatttggtttaaaagattcgtctcgcaatttatacacaaactgtgtaattagtttttttcgtctaatatttaatacttcgtacatgccttaaaaaaaatttatcggtggatctaaacaccccccccccccctttccccaatcaaacaggccatggctggtggtgctgatatatcgacagaaacatgccatgccatgacaatgcggaatgcatcagcctctgcctgcaccagacatttctgctctgtgactctgtccgagtgaagaagacgacgacgacgctaaaaagcaagtgccacatctgctggctagatgccgctacattttactgttgcgtttggtgttggtgcccgtggtgggccccatcttcttggcgatattccggagcacgtacttctggatcttcccggtggacgtcttcggtaactcgtcgcggaagatcaccgtctttgggaccatgtaccgcggcatgcgctcccggatacacgcgaccacgtncgtcgccgtnaccgcgccgccgccctgcttgaggctgacgaacgcgcacggggtctccccccagaactcgttcggcggcgccaccaccgccgcctcgttcaccgccgggtggccgtacagcacggactccacctccacgctgctgatgttctccccgccgctgatgatcacgt

SEQ ID NO: 13976 - DNA, 517 bp, Oryza sativa
tgcgcgcgtcgagccgcgtgttgatgctgtccagcacggcgccgctcatcggcacggcgaagtgcatctcgtacatcgccggcacgttcggcaggagcacggacacctgactcaatccagcttagcttagcaacacgaggaaggtgttcgacgaaatgaccgtggaaggaaaaaggatcgatggatgctcacgacgtcgccgcgggagatgccgagggaggagacgagcgcggaggcgaggcggaggcagcgccggtgggtctgcgaccacgtgaagacggtgtcgtggtagacgacggacgggcagtcgccgaacacggtggcggcgcgctccaggaagcccagcggcgtgagcgcgcacgagttggccgggttggcgccgagcttgtccatggccgccgcgtcgatcgccggagcacgagctgtcgcctgtgtgaacgccggtgactccagctatcgcggggtggttggagtggaggcgaggaaagagcgagtgaggaggctgcggtgatataaa

SEQ ID NO: 13977 - DNA, 830 bp, Oryza sativa
aatgcatagatgaaatcagtttgttagtccaattacatgaaagatatgctcacacatatacatctccctgcaaaaaaggctcaacagatggaggccaggaataaattcataaacttcacaacattcctgttgaagcacacctctgtgtgagtgaacgtgaacaccaggatttaaaccctagtgggtcaagtcttgcagtcacaactcaaccaacacacaaaaggtgcttccctagacgaaggtagtaactattactgaagttgagattctacagaaaatgctatctgaatttaccttcggtgattctttcattttaacactttttgctttgatgtcaacaataccggaatcaagctgtccttcacttcgtgcattctgaatgactatgtcaagtatacttgtgaaaagatcaaatagcctgataaatgaagtacacattaataaggtatcaactgaacaggtataaatataacaaaataaatttgttctaaaaaaaaacttgcctgttctgaatgtctggagccaagcctagaatgcgattgaggaaacggcctatgtcatgcagatcagaatcaaaaatcctaccagtaagctttcctccattttttccattgcctatgtgcacaataaacaaataataagatttgaattctacacttgaaactacatatagtagagcatcttgttctgcaagcatgacctgctgcatgcattttgcaaacatagttttcattcctaaaacattaatcagcacttcctttatcaaaaaaaaaaattgatcagcaataaatggataactgtatacaaaaagatgcataactctattactt

SEQ ID NO: 13978 - DNA, 3918 bp, Oryza sativa
ttcacccttgatccaatccactcttgtgagccatgtgtaagttttgagtgtggatgtcgaggcaatgaaatgactttgacaaattaaacttcaaaatgttgcttacacgggaggcccacatgtaagtggaaataagcttctttgttatctattagcttcctttctaaccttctctcctctccccacttcaatgagtctcccctgtacaaactgtttgccgggcacttgtgttggacgcactagatcagccagtggtccagcctgggagactttgtcatgctgtaggcatacctctagtcgaaacacacttttcagaacctcaaaaaggatctcaacttcttgattcaattttggttcttggaattagtatctgctgagatgcaactcgtgatgagcattttttttttgtttttttctttgggctctcctttttgttcagtattcgaaaattttagttttctaacagtgcaaaccaaaattcatgtcgaggaaataaaccacactaaaaatacaaattggttcagtttgcggttaaaaccatatattgatgttagcaattcatcagttctgcaaagaaatgagaagaggatgaggagagatggggtgaggatgacatgtccatggggatccaataatttttttcattctgttttctgagtatttgccattccaacaaaaccactgataagtcataaaagatcaccataatttgtctggggggaaaatgcacagttttaatagtaaaaaggttgtgtagtagacattttaagttaagttttgataaatgaacttattcacagtttaataataatgtttgccatcctttacaagctatggtaacctttctcaggtgctcttgagaaaggtggtgtgggtgctcttgaacttgttgctatggacatgaaagccaggttagctcttcctggaacttctcggtggttcggttctaccttttacacacatcgtagttgacatgaagagcccttatgcattgggtgtatatacaaattgctctttctgtacataggtaagccaattacctcgttgatacatttcctcttctaataatgattggtatacctcttgttcaacttgtcccaggggtatgtatgtttgcagaacgctaagttataagggtgctgcttttgctaccgtggaagctcctctagaggaaagaatgatggtaagattgatgctccttattttctgcttttattttggtggtatgattagtttactttgaaccattttaaaaatctttatagtttacaatgtgatttcacataacattaaaaaccaatgttatgtttagccttttctaatcattttttgtgtagtgctggtgttgatttttatttcacattttgttatctcatgatgcagaatatgtataggaaagcagctgaattttgggccgagttgcgtgttgaactcctttcagcaattgaatattatgcagaagacaagggcaattcatctcagatttggcggttatactgggccagccatcaggtggttctctttcattttacgtaacaatatgtttataaccataacaccctagccaattatgagattatggttccccagaaatcatattgcttccttttggtataatatatgatctttgattggggattaaattctgattcagtggatttgaacatggcaatttgtttgaccttctgaaaaactactacatatgattaataactaaataacagtatgctatgtatatatatttttgcagcgtttctttaggcatatgtgtatgtcggctaaagtacctgctgttgtgagattagtgaaagaagccttagcagaagaaaaatgtgtggtgattggtcttcaaagcactggagaagctcgaacagaggaagctatcagtaaatatgtgtgtttttcatgcatagcactttcatcctgtatacctaaagagtgaacttcacaatactacaacttttttttttttgtcaaaaccatctcttcgctgcaactttagccagacatttcacaaaactgcaatcatagcacaatattttgtcagaaaatcaccactgtcccttgtgtgtatttaacatgagtgtccaacttgtagaagtgagtctgactagtgggcctgacctatcggacaggccctttctgacgaagttgcagttattttttggttaaatcatcagttgacttttctgttttctgaaatgttcaacaaaaattgcagcaaaccgatggttttgatgaccaaaatagttgcaattcagtgaaatttactctattctaaaacctattttggtgaattgattcttggaattattttcctgtttactgaatgaatgtggtagggtgttgaaatggaagactttgtttctggtccaagggagttgcttcttaagctggtagatgacaattatcctttgcctccgaaacctgattgctttcaacaaggtttgcatctagacaaactttgtagatggatcaaaatgctaatattttggtgtttgggaagctggcctccaatctaaacaaacatagcatgtatttgtcatgtagaacttgtgtttgattggctggtaattaaagcatttctaattttttgttgtttcttatttatgcatgctgtagtaggtgatgaaaaagttgcagaggttcagcgtaagcggcactatggacctgatgtatgctttaaaggacaagctaggaaactcgcaaaaatggaagatgaaagtgatgatggaactgatgaatattctctacgtaggtttcttgagaacttttgttaatgcttgctaaatgcatgatatttatgtggcaaaagcagttatatttcccaatcttttaataactacttggaggttggaatcatcttttcgggttccatgacatcaaaagtcttagtgggattggtgaagattacctagccatctagaacccatagtatagcacaactagctggcatttagtgggtgatctcaacaaaattttgacataaatcagtgaaaatttcagagtttgtaaatatgccattattattcacctatttttaaccatgtcatcacaatttcataagtattggagatatgccactacgtaccccttcacaacattttctaaccttttttaggaccaaattacccctttcttctaccttcatccccttcttccttcccctctctactattttctagctccaactaacgagttctcgcgactgcaccaacagcgaggactgcaacgcagcctaatctcccagtacacagtcgcaactcacaagcagcatcgcatcggtgcgctccattcacaaagctaccaaaaatgcatagttaccttcaaaaataactactcccattatatgtagtggctatctctcttaacttatcttacatgtattggtatctctcataactccttatcattctttcttttacttaaatgttaatttgcactaatatttttctcataatcaaatacataatcaactgctttttcctagttctccactacggtgagcactggaaaatacagtgtaagattcaaaaattatagtataaatatatggaatttaaagtataagatatagcatagtataagatttaacctttttccttgaaaaatatgacaacagaaatatagctagccattattaaatattggttatccatgcaagcatactaccatcgaaaatatcagtcaaatctgccattcacaaatatagacatttcttcttgctacgcatgtagagaaatacttccttcatttcatattataagttgtttgactttttttaagttaaaattctttagttttgaccaaatttatagaaaaagcaataacatctatgacaccatattagtgtcattacattttacattgaatatattttgataatatttttgttttatatttaaaatattaatatat

SEQ ID NO: 13979 - DNA, 3473 bp, Oryza sativa
tgcagctgctgatgtattggacgccatggctgacatgcacaacgacatcggaagctcctagcggaatgtgttgttgctgctacagattgagtccgccgtcattgttcacatttgtggacaccctcgccacatcaatggacttgagtagggacaacgcttcatccaccgtgattctgtttagtgtggtgtgccacggctccagcgcatcgtcctgccttaccctggtgagcttgggtttgatccggtggatgcgcatgcatggcggtgtcggcgaactactgatgatcatgttcgggggacgggggaggggtgatgagatgaacacgagtgaaggaaacggagaaagaaagggtaatttggtccaaattttctaataaatgcagtgaagggatatgtactttgtagtggcatatctcgaatttctgtagaattgtaatgacatggtttgaaatagttgaatagtaatggtatatttcaaaatcataaaatttataatggcatagatccaattaaccatatatatatagctatcttctcattctcccatgtcagggatggttatcattcgagaaattctcttctagtattcacattttgatgcaatggggtttacctatcactagcatgagtatggtgagtaaaaataaaacattttttgtgttttcacatttaaaatgttaacataatcttatacactgaccaatggaacctggtttgattttgcattctaaggttgcatctgatcatttaatttgaataaggctggatcattttgcgtattcttgaggtttatgtacacacacattctttattacttgaaagctatacaacgccagtgaaatcacagagagaaagtgagtcaaaatggcccttatgcctaatgcacctctaatttgtcaatactagtgtgtatcccggtaatattttgtggtttcttaagtagtagttagttatggttgcatggcttgcagcagatgagctatggtatttcttactaattcctgaagtacttattgatatctcctgtaaaatgtcacagcagagtcagaccatgaatcaacagagtctgaagaggaattcaatatgtgtcagatctgcaacactgaggaggtgatttgcaatgttccaataaatgcttcattgttttaaccttattgtgatgtgtttattttgactggaaattgtgtggtttaaattgggcctgacatttttacctgccatttttttactaaatcccaacacattataagaaataaaagcattaacattttattccttgttttgcttttgttgtctcaatgtcatcctccttttttttagacatggctgaatgatttaccttcataaattcattgttgtacttggggatagagtgctagaaacctacaggcctacacaacctacaaaaagattcttaccttttcatatgcacggatgcaccacagctactcctttcgcaactctttttgctggtttttataatacttcagttgaatgccattttaggagaagacgatgttgctccattgtactggttgcgccgcacatgttcaccctggttgtctgattcctccttggactggtatgctagcagatgattggtcatgttattcatgcaaggagaaagtagagagttacttcaaagagagagatgcttacataactgaactctccaagaggtgcctaatatatcaataaccatttactaactaatagttatgctcatatggccgagttaatattcatttaccctggtaaattaatgcaggtatgacactgcagtggaaagaaagtcgaatattttgcagattattcgttccttggatttgcctaacaatcctctagatgatatcattgatcaggtaactgatttgtttctaatttggatttaggagtggtgaattcacttgttacaaattttttattgaacttataagagctagcctcagaataggcattattttaaagttgttacctggagcttgcagctggtatatcttaatttgtgcattattcaaaattctaacagagtactttcaagtttcaaacacatataactatatttcatccccactaagtgtatttagagccatgtctctcctctcttatcgagctacatcgcttcaattatttttagcccttggatgcttaatctacggtctgaattgtgtctcttctttttcttctgatgaagtcacattaccttagtttttacctttggacaatcattctatatttgatctaaattgtcataaagcacatcatcttaattgtttatggcttattttgatgattgatcacagatgcaaattatataacgttgcgtcatttagctacaaaacaaatgcgtcatttagctacaaacaaattcatctcatactttatttctaccttcttcatataatattcctgtagcaacatgttgggtttcatctagttaatttagagcagtcccttttattcaatatcagcaatagtttacccgatctagttagcgtctagtatatggcacatgatattatggacaaaggtgccaaactgctatacaccatcgtcatgttgaatacaacagatagtataacttaaatattttactttcttcagttcttggtaggcttgtttattcagttcttatgtatcattgcattaagaagagaaatatacgtacacgaagtcttactgcattaccaacgcaaatcttttgatagtgggatgggaatcacaatataagccatggaaatatggaacaagcgattgtgtaaatcaagatggattgcccactttccctcaagaaaagatggattgcctaccccactggaaggtggaactgtattataaatttataactgtaaaataatttgagggatttaaaagatttcggtatcttttaatttgttgtctaattcatccagtttttactgaacggccaagcttgcaagttttatttttttgtgatatgataaaatcaatcttttaatttgtcccatctagaactgccaggatagcataaacagaaacagtttcgctaaaggtattagctgattattttaagcatcaatgccttgagccattctgtctgttttatatttgtagctaggtggtccttacaatgttgcagaaataactggacgtcgtggtatgctagtaagagcatcagatggaaaaggtgttgtttatcaaacacggaacaagtaagagatttttccccttaagagtaaatttcaaagaaccaaatgttttatggttatatttgcatgaaaccctaggttccttggccagtggcacttaacccttgtttattgtcattatgtttcacaaaaccccaggcttaactaaatctcgactcgttagccttggaatgaattgctggagatctgtcaaagatagcaaagactgcttgaagcaggaatagattttgttatatggggttgtttagtgaaacctaggaccataaaaacctgggcttaactgat

SEQ ID NO: 13980 - DNA, 862 bp, Oryza sativa
caattgtatctattaattaggatatcttatgtaatttccttagagatatgtttggccaaaagtctgccgcaaagacttatggtatcttagagtttgttagagataagagtcgtgtccggcaaggacatattttgtatctcgggtataaatataacccgtacccatgtaatcaaatgacacacgttcaataacactttcggcacatcgccaccctttttactttcgttctatttcgacgagttcttacttttgggttgagctgcatcgattcgatcttcaactagaggtaaacttgtcatgacggtttgtgttctcgggattagtgcttccatctttatgacactataatcttgtttatgtaattcgtcgagttatcatatatgttttataatctctgttagtttcgttatataacttgccatcggctggtttttactattagaaagtagccgatagggttagatctcgttattaatctagattatatcgtatctctaccatctcttagaggttttcatcatcttgtttagatcttacagttatctttatgattaatgctgcatcagatgagtttgatctattaagttttatctataattgtgatatctagcttgttttatgataacccataaagatagtatcggagtttcagccgatcttacctgatttagctattctgatcttatatgcttgactgctatgctaaatttgccctttatattaagatcttgctacattaaagatagagaaaatcccctgtgtacccataaaagttcacctaatcccttttatacccctgaattttgctgaatcccttacatacccctgaattttagtttggatcccttccatgccctttccg

SEQ ID NO: 13981 - DNA, 628 bp, Oryza sativa
atgcatagtgaaagacactatgttcagcagacttgtttttacagaatgagtgcacttctgaaaatgcgtggtaaaattctagcatcatttacttctgaaaatacatggtaaaactctagcaccaattttaccatgtattttcattaattgaacactgcacagtgcactcattccataataatgagcctgctgaacataatttctttttctatgcatttcttttgacctgaattttaagctctagcatgtgagtgaacattattttgaacaggcattatccatgttgtgctgttggattgaaaatcccaattcagatgcattcaagcgtcatttggctagagtagctgattttctatgggttggcgaagatggcatgaaagttcgggtaaatataagatcagttcattttatacatctacatcggattgcaataatttgtgcgccaaaattggtaaacacaaaccattgtccattcaaaggtctgtgcgggtcaattatgggatgttgctttcgcagtccaagcgatattagcgtgtagcatcgcagaagaatttggaagtacccttaagaaagcacatggtttcataaaaacttcccaggtatttttggccagaagggctgcaggaat

SEQ ID NO: 13982 - DNA, 681 bp, Oryza sativa
ccaattttgagttcaaatggccaagttatggccatttgaagtttatatgctgtttaatgaatatttgcgaattcattcatttaaattttaatttaaaaagggtttattgcgtcagccgagggggaggggcgcgcggaccgggtccacgggagtggggcccacgcggcagcctcacggtccacggtggaccgggtgcacccgggctcacatcggacagcgccgtgggccccacacatcagccgcacccgagggcgcgggcggctgatggccgggccccacgcggcagccactcagcacgcccgaaggcggccatgccagcgcggtcggcggtagcggcggcgcccacgccccgatggtcgccgccggcgaccaccggctcggcggagcggcggtcgagagagggaagggaagggggaaaggaggcgacggtccacggctcaccccggggcgacggcggcgacgggggaggctgtggcgcggctcgggtcgacgaggacgacggtgctccggcggtcggcgaccgaaacagagaggtggacgaggtcggcgaggatgcggcgaagccgaaggagtcggcgccgaggtggaaggcggtccggggcgacgatggcggcggaccggagctcggcggcgacggtggagagagagagcgatgtcgcgagctcgaatccggtgaggatg

SEQ ID NO: 13983 - DNA, 1140 bp, Oryza sativa
gatttccaaggtttgagccgatcattgatgatgatggagaaaagatcaccacatgccgatgcatgtccttcggagaagcagcatcggtcagcattgcatccaaactatcggctaagcccttcagcgagtggttcaacaatttttatgacggggttccccagaaacaccaggatctggtttgcatacgaaggatctgctggttttgagctgccaggtgattttcggtttgaagagatcaattccgaaaaatatgacaaatctatagaagtatactcaacagccatcagcccttgcatccttcctgttggcatccaccaaggcaaaaacattcagatgacctacgagttctatcatccgataagtgctgcaaggcaattgggcatgggtcaactgccaattagcctattctttgccgataagatccaaagtagaggagagatcacatcaacactcatgatggatcggctgctgaacatagcaggaccacctttgggtagtatcaacaatatcaagctaaggatgttgagaagtgcagcctttgaccgatggtgggtagaatggaagaaacatttatctcaccaatcggcttcaatgtatctgacagatctgtttcctgaagctgttcctcaagtaagtatttagccccttgtcaattctattaaccacaagccgatgcattaatcttaatctcatgtaaattctttctttctctgcagacaatagaatcttctcctcctcatcacagcaatagtggtatggagattcaatatgctccaggacttctgcccaatggtggtgggcgatctcctccagtcatcggctataatgcccccaagacctcaacactgctgcacggcctgccccgtgtgccgatagcccctgatgctggtaggaagaagagagcaaagtcggctgctgcaccatcggctgcaaagaagaaacctaagaagcaaaagaccactgccgatgaattgccagccatagatccagatgtaacggaattcctggaggatgaagcaacggtagaagatgtagatgaagcggctgaacacattagtgaaacaagggaacaaactactccagctgatccacctgctcctcaaagaacaccatcaccttcagtacgtcccacatacaaac

SEQ ID NO: 13984 - DNA, 14460 bp, Oryza sativa
  unsure (1)..(14460): unsure at all n locations
ggaggggctgtgcgcggcgcctccaccaactcctccgcggtacgccaccgacgatgccaacgccgctcccctccgccggatctaggaggggagggcaagaaggggagggagccagagagaaagggaggggccgcgcgcacggcgcctcctccgctgatggtgtgcatgcgccacctcattcgccaccgtcgccgtgccgccacctacgcctctcccctccgccggatctaggagtggagggaaggaaggagagggagccggagggagaggaaggggccgcgcgagcggcacctcctccgccgacggcgcgcgtgcgccgcctcctccacctccggcgccgcctccgttcggtggtggacggcgccgaagccatttctagtagagggagagccggaggagaagaaaaaaaagggagggagagaagtggaggaaaaagtgagggagaggggaggcacggaactggaaatcaaatttaaaagtggtgtcacattttgcagacggaccgtgaaaatcatttttttcagatgggtccgcctgcaaaaatgaaggtagttttctactcagatctcttaagtcgtctggctggaaaaattaaatttcgcaggtggatgacggtctcatccccggttacctttttgtaggcggctgtttagctccgaggggcctacttgccttgaaaaaaaaacccacgtctagaaaaaatggtttttctagtagtgatcacatgcgggcagaaccatctccagagaagcgattttgtagtattgtttgtcagcttaaccattattgcattttggtttttcggtccgttacaacacatcgacacactttgctagtaattacaatattgaaaaaaatattttcaaatattgataacaatgttacaaatgcagcatgcatgcgatatccatgcgcatcacgcacttattacatatatatcatgggaattatccaaaatataaataaaaaaaatttagtggaaggtatatatagctaagattgaagggatgatcgatcgatcaatcatggctttatggcattgaggaggcggatggctgtggtcgtgagcaggtctatgacccaaacggtgggaaccttcttgtcaccgtacttgaacagatcacctaacttgcacttgctcgcggtctcatcgtattgggtctccaaattcttggtccacttgtgcacagtttccaggtcctccttactgcgtttaccttctccggcggcagtgaggcgctcgagcgcgtatagcgtcgagttggtggtgtccgaaaaggtttcgccaatggcaaagaaagacccgcagttattgatgttttcgtccctgatgcccatgtctcttatcgcgtacgcctcactagtgagggcttggatcttggtgactaagatgatggtggccacctgggtgtaggataatacaagtgagcaatctccgtatccgcataaaaacttgattactgctagtttcatttctcacatggtaattaatgtaatccttgaaagaaaaaagaatatgaacgagaagtggaataagcgggcaaaagaatatcccgcttaccatatagagacacacacacctatatacctacctgagtggccttcacttggttgcccttgaatgactcgccatacgggatgagtacatcgtagcagcgggcaccgatcatctgttccgtgaaggtgctagttccaaaatcgcagacttgttgggtgaaccggtacgcctccgttgagggttccttcccaggcggcaacggcggtggcagctcaaggttgagtttatgaagttccccctctggcgctgcagttgcaccttgtggggataagcagacgacgttgatggctatcaacaccaccaggaagacagcggccatgctcgacctgctcattgtatttatatgcgctctctctgatctctctccctctcagtttgattagaagctacaggatggattagtgcatctatatgatcaatcgatgaggtacaaattaatttatactagctagctaggctagctcgatcgattggtcagtactaattgtcaacctttctaatttcttcaatggctgtgatagcatcacggcatgcttgcattcattttgatacaactagctggtgatccgtgatcctctatgcgtttctaatggcatacatcagctattctaaaaatagccatgcaggggcaggcaacgcggccagcacacatgtggcaaggccgctagcgcaaccaacaccggcacgtaccctttaaacctggtacagttgggctggaaaaggccggagttgggctgcagctagcacctgttgatcaacccactatgaaaagagtccacgcaaattgaacaatgcatgttctgataagctcagtctgaattataaccccacctatccccgtgtttccgtcgcattccgtctcagaaaatatttatcccagtgtttcgcactagtaaaaaagggggaagtcattgccggttcatcactgcctacccgtagtgtcgatcatgccctgaaaaactcacttgataaatggaataatagaaattattagaagccattgaagaaaattcaaaaaataaatacgtccaagaaaaatcgaaattttcttccccgaaatttacgtcaattttgggagcacaataaatccctatctctactacttaaaaatacactacatacagtgtaattttacaaaattacatagttaaattatgcattgcgtttcaaaaaaaaaagaggaaattatagtgtagttatagtttaattatgcaatgtctaaacttagtaccgtgcttcatgtaataggttttctatgctttattgatgctaatttagtgttaatcatactgattgttcgcaaaattattgtttgtttgcaaagacactcacagctgttctatcctgtgatgctgtgttgtttttcagaagaaggatgacgcaaatgaacttttaatagctcttaaagctgagaaagaggaactagaagcagcacttaacagggagcaagtgcaaactatgcatcttaaagaagagattgctgaagcagaggctagaaatgcagagctgacgaaggtgagcctcctgccctccttgtacatattttagttgttctacttctgctcctagtggctcttttcctgcataatctttcaattatgcaatgaaactatttttacagattcttctgcattaaattattattgttacattttcatttgttttgtaatctgctatgtaacctatagtctgagtagtacacaaatcctatggcactatttaacacatgcactaggattgagcttaccctttactgaaagtgtgtgatgttcattgctagcggtatgtattatcactgtttctaacatgtcttggtcctggcatatagggaaaatatgtagtgcaaaccacatatgtagtggaaatctggaaactaccgttggataaaaaaaatgaacgcatgagatttgtctatgtcaccaagagtcatggttgaatctaggagtaaaacttttattctaggcaacttggacaaatctcatgtgtccaacaatagttttccagaaatgctatttgacggaatcccgtcccaaccgtgatggacgggataggacaacaaccaacaaatccaccgattctatctccttctacctcatccattctaccacatctctcttaaagcatgcgtactgctgcacgagctccggcacagcatggggtgtggatggcggagacgcgtcgccaacgacgagctccggtgtgaccactggcgacgagctcccggcgtgacatggctgtggatgatggaggacgcagccttcggcgacgagctccggtgtgatgtggcgcgtggacatcggaggacgtggccccaagcgatgagcctggcatggggcgtgagggcggcggaatcgaccgccagcaacaagcctggtgtggggcgtggcagtgaaggacgaggctaccggcgacgagctccgacgtggggcgtggacgacgcagaacgcggccgccggcgacgacctccgacatgaggcaaggggcgtggagggtgtggccaccaacgacgacgcttcggttctcagcttcttatacctggtaggaatcacctgatatctggtaggtatcatgtaatacctcacttgtatcacccgttacgtggtagaaatcatctgatacctgataggtatcacatgatacctcactagtatcatctgaaacgtggtaggaatagtcaaatacttgataggtatcacttgataccggttagatttcaggacatgataccttagaggtatcaggacctaatacctaacaagtattatcccgttcgaaaacgggattccgttgtataacaaccctctagttttcagatttccactatgtatatggtttacactatacattttccctagcacaaagtggaaggttttcaacttttcacttcaatctcattcaaaagtatggtttcccaaatttcaggagctatgtagtcaatatcatcatatcatttgatggaggtgtttcaacggttcaaatggagccgcatctttctgatgaatgcgattgataaaagggatagaaagcatatgaattaaagaattcagttagacatcacatacggaaatctatatccgtacgcatgaaggcaaagcaaaaaaaaaatcaactctctttgagtgtgtgttagaaggcgtatctgtgaatgtgtaagtatggtgtatgtatatagtggtggtagcgtattgtgttaacgaccaaatttggtaagatatgaaccaggttcgacattggaatcaaagcggattcggcaaagagatggattcgaagaacagagtatgtatcagctgcgagggcatcggctggagtatgcattggctgagatgggatcggacagaagacaggtgatacaaccgatagagatgatgcagccgattcttatggtgatggcttcaaggctgtttgtagaatcaatcaacgtgcttcacaaggattgccacgatggagataaagctctcaaaaaggcaattgtatctattaattaggatattttctataatttccttagagatatgtttgggaaaaagtatgccgcaaagacttatggtatcttagaatttgttagagataagagtcgtgtccgagaaggacatattttgtatctcgggtataaatatgacccgaacccaatgtaatcaataacacacattcaataacactttcgtcgcatcgccacccttttactttcgttctatttcgatgagttcttgctttcaggttgagctgcatcgattcgatcttcaactagaggtaaacttgtcatgacggcttgcgttctcgggactagtgcttccatcttcatgatactctaatcttgtttatgtaattcgtcgagttatcatatatacgttataatctctgtaagttatgctatataacttgccatcgattgattcttactgttagaaagtagccgatagagttatatctcgttattaacctagattatatcgtatatccaccatctcttataggttttcatcaacttgtttagatctcatggttgtctttacgcttaatgctgcatcggttgagttcgatcaattaagttttatctataactgtgatatctagcctgttttatgattatcgagagagatagtatcggagtttcagctgatcttacctgatttagctattttttatatatcatatgtttgattgatatgttaaatctgccctttatattaagatcttattgcattaagaaatattagacttcttgtttgatatattctgcttgttttgatatcttagtatagagtggtatccgagtattagtcgatacatgccagatctatctgatcggctatgctataaacatttatataattattgctttagtgtatacttcgacttaagtgatttatactgtctcggcgtggcgaccgatctatcccaatcacttagtttaaatatacatcgaaggaaggattatatatccttaatatctacagccgatcgaatagatttagttttatcttatttatttataacagccgatcgatttcaatatgacattggcttgaagataaatgatatgtcatcggcaactagccgatcggctatcatttatggatttaactatggttttcttgtctttctttcttgttgattgcaggatcaaatcaactggcacgctcacgaacctaaaagcaagattttggacgtgcactgaagttaagcagattttctaggccagtgtgtgtttttcgcatcaacacgtatgtatccgtgaatgtgtaagtatggtatacaaaacctctatgtaattaaaaaaatatagagaatttgtttgggtagaagctaactttttttaccataacctaacttgctaaaagtatgataaatcacacatagtatagccaaaaaattgttggcccgtatagcaatatttagctacaaaattatcctatgaccctatctagggaagctttaaaattatgaatacagcttatgagaatttagagatgttggtttctcagcttctggtttttatttttataactatttttagaatctaaactacaatcaagactgatcgagagaagttttgataaatgaaagattctaacaaaatgttacccgcttcaagctggagttacatctccctatcaaatttctaaaacttctcttattccctcttgtcattataattaatgttctaaaacttcccttattccctcttgtcgttatattaaattgtgctattctcatttgtgagcaaagagcagcaactgttctttgttccttatttctgttaatttattatgcaatcttttttttgcaccatacacctcaaattactttatacttcgtatatgcttttaactaacactatgcagatgtaagccaacgcggcgaaaagccacgcttgtacttctagtgatattatcagactaaccaatgactgctatggagatttttgaatttgtgaacgatgtagcactggtggagaaaccctttgtagtcccggttcgtaacccccctttagtcccggtttccaaaccgggagtaccaatccgggactaaagatcgagctgacctttttttttttgcatggccctgttgctgcatggtttttatatatatatatatatatatataaaccatgcatatatatgtttcaatacatatatatgcatacatatatatatatgtatatatatattatattatattatatgtatatacatgcataatatatatgtatttatacatatatatgttatgcaaatgcatatgtatatagatatatatatgaccaaaatatatttacattatagaaaatgtgtacacatgcatatagaaacatatgtagtcatgtattaattacaatccattatatgtcctagctagctagctatcatttcgacgtagtagtactcgctgctagctcagaagctaaggaccggtgaattgtgtttccgtcgtagtagaattcacccttgggattaaggatttcttcgttgatgaatcccatgagttgttcttgaaccgccgtgataaattccttgtgtgtggtcaggttatccctcatgcgaataaactatatgaatgtatgaaattgattagtaattaaacaagaaatcgctacgtaatgaaattttgaatttatttgtacgtacatcgagctctcttgtggtgatgatttggtttgcaaggcagtggcaatactcgcacacgtaatagccgcacaagttatttccctgcttttgctttgcgcactacaaataaatgacaaacaacgagagatctaattaatatacactagtatgtatttgaatcggagaaatataaatgtagagcatgtgtactcacaggaaatttgaacttccgcctaagtctttctctccatttgccgcggaccaaatgacggaaccgataccaagccctacatggagtttaaagctatgattcgtagtagcaattaacataacaagattttcttaattaacaaaggaacttatgacggtacctgtctataagttcgaaaaccttgtcaaacgtagactcttttttatccattgagtcatatacgttgacggtgcaggcctccaggtcgaagagtaaaagcacccagtggaatctgcaatgtgcgtgggatgcattacatatgaaacacttagcaagttcgtacgggaatgaaatttggtatgtaggaagacagtaaaattaaactaactctgtgttgtatggcaacagtatgaacgtcttgtaatgctgcgccttcaggagatggacgagattgtcctctgtttcttgtggatattggtcgagcattgcgacgtttactctccgagggtcgatgaatccagtatcgaaaaccctccgccgtcgggccctttgaatctccattctacaacgataaaagggagtatattattttctatagtctacttatatacaaggacctaatttattaaaggagacgtatagtaagaaatctaaccgaacgatatacttacaaaatccagcaactcataatagagacgtcgagggcgtccagctggtatagttcgtagattcccttgaaattgatccagagaatgtcatctccttgcaagaagtccgtgtccctgatcctcgctccgatcatctctctaccggcggcgctcatctccatgtacagctgatggaacttgtacatttgtgtgggtagggactgcagcagctcaggcttgacaagcggtttaccgagttcgtacatgtatttcacttccgccttttcgattggtgcgactcctagcaattgatccgtagttagaccggtgtcagtaataaattgttctatcgtcatttctttaccggtaaccaacggctcgatctcctggtttggttgctctccaagctgagggactggtttggactttccagaagatgctttcttcagcgttcgctcatagtccgatagcttgatggcctccttgacagatgcagacatacccctgaagaagttcctgacactggggtctataggaatcttcttttctggacttcgaggcttgaattgtctcttgacttctgatgcaacgtaagcgtcaagctcctcttgcgtgcaatcgtaccccgggtccttgttcttggcggcgtcaactttcgccttcttcgttgcccttgtgtgggcaggcggtggagctgggggggcccttgactttgaaggtgccggaagaggagcttgcgggggagtaggtgtaggagcacgaggaggagtcggtgcaggatcctgaggaggagtcgatgttggagcctgaggtggagacggtgctggcggagcatgaggaggagacggtgcaggatcctgaggaggagatggcggagccggaggagatggtgcacgagacgccgcttgtcgcccagggaggatgatgtaccgcctgcgccatagaataatggcatggcttgtgtctcgtagatgcgtctcaccgtctcctccagggtaatccagctcgaggtcctcgtacgcgccttcgaccaactcaacttcgaccttcgagtatcctgctggaatcggcctgcagtggtaagtacctgaagggtccgttgggatggccatgcccgacgccaccttcatgttgtgagagattatttattagtaatcaacatatataagcagcaactagcggaatggctaaatcttacctttattgataagttcttgaaaggaatatgcagctcacatggtgtccgctgagtgatgtcatcaacgggacatgtcgattcgtcctgtgtttgcatggcgtccatgctctgtgatcctacctgcctcgttgaggcgcagctgctacggtttcctgacgggctcaccattgcaggaggaatggtcggctggggatcatgggaccgatgtgcgaacatgcgttcatcaaccttccttgccacctcctcttgcatgttgagttcgtagctcgatacccttaactctaggtctgcaatcttcgcctcggtatctctcttgctcctcatccgactcctgtacgtgtggatgtcctccttgaaaccaatcttccaaggaatcacccctttccctcgtgttcgtcctggatgctctggagtctgtagggcgagtgtcagttcgtccctatctctgtctggtcggaacgtgccctgagaggaggcttccactgcatctgttagtcgtcgcgcagcctctcgtatctgatcgccgaagaccagtgagccatcagctgggttgagcgttccaccgtgagcatagtaccagaacttcgatcgttccggccaattggctgttgccggttcgatacccctctcaatcaagctagcctccatctcctcccactttggcatcgcgacgctatagcctcctgaccccaagtggtgatggtacttcttcttggcggcattttctttgtttctttccatcatcgcctgcccttgttcacctgtcttatatgcaacgaactcgtcccagtgatcccttaactttgggaatgtgtcgaagttcggtgtctgccccttcagtatatacttctggtacagatctcccttgaagctctgaaactgttctgccattttcttcagagtccaccttttcactttgtcctctgtacccgcaggaagggtgaatgtctcgagcattgtggtccacagcatctctttctccgaatctgggacaaagctctcatgatctccgcgtaaccttgttcttcgccagtacaccgtactgacaggcacgttatcccgcacaacccaaccgctgtgacgtacatagttcttggcggcttcggccggggcactaggacgtccatcttcttgcacttccgttatgatgtgtcgaccctcaagcttcttcgctgcacctcgttgcccgcgtgccctcttctgtccaacggagggttgactaccactagcctcctcctcctggttcccctccacatccctttccacgtgcccctgctggttcccctccgcatccctctccacgtttccttcctcgttcaagtactggtttggatcctcgttcccctcttcttcattccagtactggctgcttccctccgcgattgtatcgtacaatatctgttcctcatcgcggtcagccatctgttgatacaagaaacatctgctaagtcacgagacatttatgttttaacaatctaagtcatgtatgctaagtataaatgtcgtacattagaaccctacacaaccttacgtgctaagtctaattacaaatcgtgatataagctaagtctaggtgacgtatattgtacaaccctagctagtaaataattatatactaagtctaattacaaataaaaaaatcttatattaaaactcaaataatattacatgctaagactacaatagtcatgtatatgctaagtgtttcgtgcgtatatgctaagtctaattaagactacaatagtcaattgctacttgtcgcaccaattccgtagtcaataattacatactaagtctaattacaaataaagtaatcttatattaaaactcaaataatattagaacactacacaatcttatatgataagtccaattacaggtctaataatcttaattaattgcattacaaatataacaatcatttatattattacgtcacttgcctgctccaattccttctagggctagctcttccactcaggcttgacggacgactccgacaacacgtcttttctgcaagatacaaaaagatgtattaggataaatgcgaagtaacatatatatatatatatatgttacttgcgttacatcattggcaaggacaaaaggttcatccgagtatccaaccttgttaaggtcaacagttgtcatcccactgtcatcaatcattacgcctccatcagtcaacctaacccattggcaccggaacagaggaaccttgagaggaccatagtcaagttcccatatgtcctcgatggcaccgtaatacgtggcagttgttccatcgtgtcccatggcatcgacacgaacagcgctgttttggttcgtgctcttcatgtcttgggctctcgtgtagaatgtgtacccattgatctcatatccctggaatgtcgtgatcgacccagacggtcccctcgccaggaaggcaagttgttggttgattgactcgttacccatgagatgttgtcgtagccacgcggggaaagtatcaatgtgatgccgtgtaatccatgcatcggacttaccgatgttcctggcgcgaactagagccaagtgctcctcgatgtaaggagctaccaatgaagagtgttgcagaacagtgaaatgggctttacggaataaattgttgtctaccgtcgttattgctttccttccgagagttccctttccccgtagtctcccttcatggcgtgattcaggtaccccgattgggcgaaggtcttcgataaattctacgcaaaattcgatgacctcctctgttccataacccttggcgatgcttgcctctggacgagcacggttacgaacatacttcttcagaacgcccatgtacctctcgaaaggaaacatgttgtgtaggtacataggcccgagaatacggatctctttcacaaggtgacaaagcagatgcgtcattatattaaaaatgaaggtggaaatatcaactcaaaactgacgagacattgcaccacttcattctgaagggcttctaatctatccggatcgatgaccttctgcgaaattgcgttcatgaatgcacatagctttgttattgttgcccggacattgtctggaaggataccccttattacaactggtagcagttgtgtcatcaacacgtgacagtcatgagactttaggtttgtgaacttcttctccttcgtgcttattattcgcttgatattcgtggagtatccagacggtacctttatgctctccaagcattcaaacatactttccttctctgccttgctaagagtgtagctggctggactcaagtaatggcttcctttctcctttggttctgggtgaaggtcgccgcgttgttccatatgcttcagatcattacgtgcttccagtgtatctttcgactttccgtaaaaacccacaacccctctttaggngaaaagggccaaagaaggtttacgcaaaggttcttagtgaggtgcatcacgtcgattgcgtggcgtacgtccaagaattcccaatatggtaactcccaaaatatagagttctttttccacatcgccgcgtgaccatcatcgctctaaatatgctggcttccaggcccctttccgaacactactttaagatctttaaccatagcaaacactgttttcccgctgcgatgtttaggcttcgtacggtggtcggccttatgttctaagtgcttgcctttcttccgtaccgggtggtttgctgcaaggaatcgacgatgacccatgtatacaaccttcctacagtgcttaagatacgtactttctgtttcatccatacagtgagtgcaagccttgtaccccttgttggactgtccggataggttgctaagtgcaggcccatcgttgatggttaccaacagcagcgctcgtaggttaaaatcctcctgtttgtcctcgtcccacacggggacaccttccttcttccacaactgtttaagatcttctaccagtggtcttaggtacacgtcgatgtcgttaccaggttgcttggggccttgaataataatcggcatcattatgtacttcctcttcatgcatagccaggggggaggttgtagatacacatcgttacgggccaagtgctatggccgctgctcatctctccaaaaggattcatgccatccgtactcaaaccaaaccgtatgtttcgtgcgtcctttccaaattctttaaattttctgtcgatgtttcgccactgcgaaccatcggcggggtgtctcagcatcccgtcctgttgacgctcttcagcgtgccatcgcaacattctagcattccccttgttcctgaacaaacgccttagccgtggtattatagggaaataccacatcaccttagcaggaattctcttctttgttagctgcccgtcaacttctcctggatcgtcccgtctaatcttgtatcgtagtgctttgcaaacagggcatgcttctaggttctcatactcctcaccgcgatataggatacaatcgttcggacatgcgtgaatcttatgaacttccagtcctaacgggcagactatcttcttagcctcgtacgttgtctcgggcaatttgtttccccccggaagaatgttcttgacgagtttcaataaatcgccaaatgccttgtcactaaccccattttttgccttccattgcaacaactccagagtggtatccaactttttgtgcccctgctcgcaacctgggtacaacgaagttctgtggtcctccaacatcttgtccaatttatgggcctccttttcactttcgcagtcctccc

SEQ ID NO: 13985 - DNA, 2103 bp, Oryza sativa
acatttttttcgcttattaattagagtaataattgtactctattatcaatttgttattgtgtgcctcggctgattcctggacgagggttcacacacatgtaagcgtttggaattttggatagaaattccgggcgtgacaagttggtatcagagccatcttgactgtaggataagccaaatggtcaaactttaatgacgaatttttccgacaaaaatgatttgtgaaaatttctcctttcttccttatctagaattctttgcaaattatttcattgtctactcccctctctctttcaacttgagtagttctgagacattgaaacttgaagacgccaatgaggtctacttatggaggtcagtcgagtggatcgaggaaggaccgaagtgccaagtggtcaagatggaatgaagtttggatcctaccttagaacctatgccgccaaagtgtctttgaagaatagttagtaggatagaacgtttgttgcttgtttgtgtgtaggtatggttgcattcccatcattggagtggttcattgatgagtgtgtaactatactaggttgcttgcttaatcaacttgaacaatataatggtctacacacatcagatcagtgttaaactggttaaggtcttgtctttagtgtaacctctctccttctatcttctctaatatgcaacagatggtgaacactcgcgctagtggaagtggaaacaataataatgaagataacccaactcttgctcaagttctggctcaacagactcagttaatgaacatgatgatacagcagatgcagaaccagctcaaccaaggaaacaacaatgctccaccgccgcagaacaagttagctaattttcttcgtgtgaggccacctaccttttctagcactactaacccagtggaagcaggtgattggttgcacactattgagaagaagttagatttgcttcagtgcactgatcaggagaaggtctcatttgcatcacaccaattgcatggccctgcctctgaatggtgggatcacttccgcctgaataggactactgctgaacctatcacttggcttgaattcaccgctgctttccggaagacgcatataccatcgggagtggtgtctctcaagaggaaggaattcaggtcgctcacccagggatctcgctcagttacggagtatctgcacgagttcaatcgtctggctcgttatgctccggaagatgtgcgcactgatgaagagcgccaggagaagttcttggaaggacttaatgatgagctttcttacccactcatgactggagattatcatgatttccagaagttagtggataaggctattcgccaggaggacaaatacaatcgcatggagcagaagaaacgccggattgctcaattcaagacacaacaggggaataatcagaagccgcgtcttactttaggaccccagtctatgccacagggaggttcttcgtctgttgttcgtccgcagcgtcagttcttcaacaacaatgctggcaacaacatccgtaatcaagctccacgtcctgttgcagcctcgacacagcaacaacctgccaagagggagcaaggcagcaagcccgtggtgtgtttcaactgtggagacccaggacattacgctgacaagtgtccgaagcctcgacgtgtgaaggttgtccctgcccagagcaactctaccgcaccagcgccaaaggcccgtgtcaatcatgttgctgctgcagaagctcaagatgctccagatgtgattttgggtacgtttcttgttaacttagttcctgcaacagtgcttttcgattctggtgctacacattcattcttatccatgagttttgcgggaaatcatgggatagaagtagtgtttgccgtttcggagtgccaaaagagttcatcactgacaacgacaagcagttcgactctaacaagttcagagaaatgtgcgaagggcttaacctggaaatcaggttcgcgtcggtcgcgcacccacagtcaaatggggcagccgagcgcacaaatggtaagatcctagaagcactaaagaaaaggcttgagggggtagcgaagggcaaatggccggatgaaatgctgtctgttct

SEQ ID NO: 13986 - DNA, 5690 bp, Oryza sativa
gagcctcttaggatcaagaaagatggacaatccattgttggccacctcatcatgttctttcctcttcatgttcattgccacaagattagccatgttctaagctatgatgacagcctcaagacaacccaggacatctagtaatttggagtctattaattaacagaattcagccaacttatctcttgtgaacagaagagttgactaggcaaccaagatgacttggttcctcgaagttcagttgtaatttaactacaaccatggatgttattatggtgtatttgtgttgactaattcaagttgactttgcacgtttacaatgaatagagagtactttacccttagctttttttccccctttcctacggttgtttgtaggcaaaagaaaggccttttgtaaaacagaaaaggtcaaagaggctgctgggtacaaaagaataggaaaaagaccatcagtgatgcatttgacatttcaactcttcatagaacaaaagattgggaaattcatgggaatactatgagaagattacatgaaaatattttgatatttgcttgctggtgtttgagtagaacgagtgttaaatatcaccagaaattcaatataagcacaaccgaacaagcactgtttatttcatgaaattcttatggaagagattgtatcatgtattacaagtttacaacagcaaccacagccagataggtagaattaagcgcctgaacggaacatatggcgccttggacatttgaactcaattcacctaataggtaaaatgaaaagatagcctcaaagccgtaagttcagttcaaaactcaactcttctcaagcaatgaacctcatcccgttctaatcaatgattctacaagagaatcacacaatactaggtgccctttgcactattcggttgcgctaaccaggaggaactccccctcgcacactaggtcaccaccaacgtaagcttttccttccatcttggcaagaccaaatcttttctgatacttggtcagagtcattctcatgatcaaggtatcccctgcaattactggcttacggaacctcactttatcaattcctgcaaagaagaaattgtcccgagatccgccaatttcaggctgcaacatcaccagacccccaacctgggccatagcctgtgcataaaggtagcctcacatgagggaagttcagatgtttgtctacttgatgatagaacaataagcaattaaaaaacatccagccatgtcctcatctatttatgggttctaagttgcgccattggttcagtttggattatgaaaacatagttgttgcaaaacctttaccataaaacttattagttctacaagtcccacatgaaatcattggtcatggtaccaaatatccattacccacctagtgcctgaatacttggatatcaaaacttttcatcagtttgaaaaggacaagaaactaaacaaatcgattgacgcaagttccttattacttcatagtacttttcgacagagatgaaaaatgcagtaaaatggctttgagaaagtactactacttttttcatcaaattcaactttttttttattttgttaaatgagattggtaccctgaaaatggatgaattgagtatcaatatgctcagactgcaaaaaaaaaaatgatagaatgaggtcatagtaaaattaaatgaagaactaagtagcgtagcatggactggcatttctatagataatgtacagagaccacaatgagagatgatcaaacctcaggaaacaacagaggccatatatactaaacaatttgatcacagcacatggatgccaatatagtggaatcatacctcaaccatgagaacaccaggcattatgggtcgttcggggaaatgcccagggaagaagttatcatttatcgtgacattcttgatcccaactgcatattctcctcccttgtactcaataactctatcaaccaggaggaatggaaacctaacattcacattcaaatgcacaagttagagaaaatactaaacaattacatattcgtgaatcatcaccaatcatttctcttgcttgggctcatcaggtgtatatccacataggcgagcataaaaatatccaagatgcatgttagtactttctagtaaaaaagacaatgcctttcttcaccaagtgagctcaaaggaaatgaacataaagcttccattaattcagagggctatgaagcatctttttctttcatctatctatactgctttaatgatgctagtggtagtgtccgagtctgcctccaacgccacaagttgacatgtagagccataaaatccccacacgtgattgtttttgctttggacatggcattatatgcctaatcaactaactatgctatgaagttgcaatttttacttttgtttttatcttttataatatccgttgcaacgcacgggcctttagctagtactgaaaataataataaaaaagagtatgaggttaactctaatatcaggatattgttttttttttgttttcaacagattgcacgcacagttcatatgcctctcatcgaacttcaaaagggtataatttcgatttgtatcgagtaattcgaatggtttcgcattgccaacatcttacaagcgaaatgaaacacacaaggtaaggcaaagagctatcctgcagcagcagcagcagcggaatgcggttagagctcacctgtggggcaggatctcgcggatctggttgatgtccatgacgctcgggaagggagggaaccctgcgagaggcaaaataaacgaacatatctccctcagttaatggcgaacacaggcaaccgatgccatacggagcgagagagagagagagagagaggaggggaaccggacttttctcgatggggagcgcctcctgagcctccaccgcctggccgtcgcccgcggcgcggcgcgcgacgaggcgccttcccggggcggccgacagcgccggcgcgcgtcctgggcgtgctgcggcggcgacgcggctccggaaggggagcgcggatctcgcgggcgctgcggcggcggcggcggtggcctccattggcgcggcgaggtggggatgcgaatcgaggaggaggaggaggaggcgataggaacgaggctggtccaaactgcaaagagagtcgatggggggttttgtgggtttggcttccggctttggaacctccgcttccaccctgggccttttcagcgatttcagctatgctctctttccgtctctctcggttttggaatttggaaaccggtgtttgtctggtttggacctttggaacggcgattgtttacaaaattactacaagggaaaatttagtttcatgccattccaagttttcgagtttagctttatacatcaaaaggaagaagtatagttttactactactttcgtatggaatatacaatgttttcgtgagttaaaagaaaagttgttaggttgtgttcgggacggaaaaagatgttgcacattaacgcgtaattaattaagttttagctaaaaaatttgaaaaatagattaatatgatttttaaagtaactttcgtatagaattttctttttcaaataattaatgcaccgttcagtaaattgaaaaatgtgtgcacgaaagatgagagaggtgagttgggaaagtgataaaattgaactcacccttaggtggctcccaatatatattttttcaattttatgttagtttggtcataaactcaacatcatatatactgagttcttctatatactattctttccaataacgcaatctcaaatagcactctttcaaagaattttgattatttgctacctaggtctactaaaaattgttttcatttttaccattttagcttaaccaactcatcaatctggatgagaaacaaccttcttgccctctttttcttatctcaatctagtggagggggtggaggacaagaagaagccatggagaatatttagaatcgcagtgaataaaaatctggctcaactatctagttattatccttcctccgctgtttaaatcttttatttcctaaactaattattcgatctacgatccaaccacactgttatatttgttgtaattaaatatttacaacaagcacaagattatattctaataaaataaaaatatgtgtttcaaaccgtttaaacttaatgttttatacatgatagatacatgtttcaacgtatctttaccgtgtttcacaacagacatgcatttagtgacattcaaaacgatttttctcctaagctacttatcaaatttacgatctgatcacacagttatattcattgtaattaatctttataacaagatatcacgtgattatattctgatgaaaaaaaaacatgtttcaattcactagcacttaatatttcatacacgatagcgacatctttcaatgtgtgtctcctgtgtttccaaaaaaaaataaatgtttcaatagtgtttcaatgaaatgtataactgaaacatttgaccgtctaatttttttaagaaacaatcggacgtccagtttgaagtttcttccgtgtttttttgtctatgtaacatgtgaatatagaagctaaatttctatccattatcttaaaaaaggcaaagctttgagccccagatatcacaagttagacctggagaattgtgttgcattttcgctattgaatatgccacaatttttgacaatttgatcctttgcaaaaactatttttacaaatgaaccgccaccaaaacttatttcaaaaatgacccttttgttcagtaccaaattgtgtggtgctgaatatgcgttggcacgctgacttagcctcccatccgcggtggcacggcattcagcgccggttgacgtggcgctgagatgtctaagttcagcgccaggtgatttggcgctgaaaaaaagtgtcatttctgaaataagttttggcggcggttcatttgtaattttttttttcaaagggtcaaattgtcaaaatttgtgcgaatatgcattaggctctcgtgtacaggaacgagatccgtgggacaggaaggcaaaagaaccacaaatgatatttttcttttccacaaagttgctagcaacagcatatgatatacagaggtgatgctgctgttacaggacaccatgaacaactgcaatgcagaggtgagccgtgaaagaagcaacagatgctatacatacagttcaagaagctatatattgacctgcagagtcgatcgtacacacaaactagctgatgtacagaatcatgttgtatcctgagagccgccaagagaatctcttcctacgggaacccaagaagggagctgatcgaaaagatcagtgctttgtgcaaacatgtagaggcagaagatgcagagcgctggtcacaacaagttgggcaataaatcattttagacagagagaaagagagcacagaggtgttaagtgataaatataaagtatgcaggaataaatcggatcataagtaagttaatgaggtatatttaccggcgtaagcaactgcggcgcctgacaccaccctccccaaagctgctagaaaatacagagtaaaaaccacctgcaaggttgtagcttactgtaagctaaacagtgtgtatatatgcaccttttatgttatagctcaggtatgacagttcactgtaagctgaacaatatgtacataaagcttgatgtaattggccgagttcaata

SEQ ID NO: 13987 - DNA, 9987 bp, Oryza sativa
ggatggacggtggatggaagcaggtgtacgtactcctaggtgtatagaatcattttcatatatatatatataaaccatgcagcaacatggccatgtaaataaaaaaaaagataggtcgatctttagtcccggttttaaaaccggactacgggggttaccaaccgggactaattagggtttctcccccagtacatgtaagagcatgcatggaaggctatatatatatatatagctggattattaaatctttatgtgattgatgagggagctaacggtgttgaaagtatctccatgggttttctcggcggggagatcatcgctgttctagcacacctttctttctaatttatccaatggttatagcatcttggcatgtctttttggtgttgtgatgtagtgccatgcttgcaattgtaaactactatattaatgcaactaattgtccatatatagacagcctgctcgctttttgtttcttgtccattcacttagaaattggcgtctatattttgacaaatccttgcatttttcctggttaatcattaggtctagaaatataatgatatatagtttaaattttatttaatataatataagaatatctacaacaatctatttatcttaaccaatcacaactactactgctcgtttaatttttctcacataactactcatctcattcaataataactctttattcacatactcattgttaatctcccaaaaaaagcgccaaatatattgtgagacggagagagtgattattttggaagcaactgcaccacaggccagaagccaaattctgctaattaactactctctctatcatataatataatataaatgattttgccctttaaatttgtccgaaatgtaagatattttgtgatcccacgacaatattttatacccaacctatcaacttcgtgctactttttttctcatctactaatttttttactaatttattttccatctatcaattttttttattctctccgttctatattgtaaaactttctggccctgccaatataatatcaacccaattgatgagagagaaaccacataaaataagggactacttagagaactgtcgacagttttttaaggagacaactttcaaatctaactatagtataattacaatataatttcgtatgtaagtataatggaactcgtatataaatattaaaataatatatgtaacactatatctaaattaaattatatagagatgataatatagttacagttcagttacacagtagttacgatgcagttacgatgcagttacaatgcagttacattgtaacagggtgtaactggaatataactaaaatataactcatctaacttctcaaactacacttccaggatggaggtctgggttcgatcccctgcaagcgcacacgcgctgattttttccaaatctcacacgaatcacggcgcggatcgcacggtcaaaaaatcgaaaacccgatcacggcgcggatcacacggtcaaaaaatcgaaagttttcagcctcaaaaactgtcgacagctagctagcacaaccgcaaaaaatagttttgacttgtgtttctcccttcttccggtcttcctccgacactcctctaacgtgccccctgctgcgcgtatggtcataggccatgcacgcatgccccgctgccccatcctcactgctacaccgctttcgccgcgagggcgccgcggccaacaccgcacaatcacgctactgcttctcgcgcacgcgcgaggtaacaggccgcctacacaacggagtcctcaacgtttccgcggtgaccacgtcgtcaacaccgccatccacgatgccccgcccgaaggcctccgcaactgtcatcttgtcactcgggaggcgctcatgtccactgcatcatgcgcaattgtgaacgcgtggctggtgacggcggcaacggtgggcatcgggagtgcgacgagatcggcaaccagtcccgaggggcaccgcctatggaggcgtgcagctcggcgggcgcgtgcgcacccaggcaggccaaagccgttggagaagcacttctccttggtggcaatcactggtgcactggcacccacagtggcgcagacatgagggccaggccaaggcagtgctcaccggcaccagtgagggtgatgacgtggacatacggggatgcacttctccacggtgcacaagctcgccgtgtccatttgcattacttggtaggctacagaaacatttttttttctattacgttgcatatatagtcattctctttggaaatatcataattggaaaatttaaaagatctatacatataattggaaaatttaaaagatctatacatatatagaagtgagtgttctaaagaaacattctctcttatacattcattgtggattaggtgcaaaaagaggccgtaagtcaagcaattcgattaagatgggggaagtaggaagatacagtaaacccattcatcatgagcagagacgaccatttcatgcttatttagttcatagagaggaatcaaattagttcatttagatcaaacacaaagacaacaggccgtgtaggaaatgcaaaataggtgcacccattaatcaatcgttttatagagaggagtattgaattaaattatacagcgaaactattgtttcagaacaggtccatatcatgttgtgtggtaacacaactggatggaatcagaaaatgaaaaggagcagcaagactgctagaagaaatcacaagaagaaagatagggacttgactcctacaaatgaagggattcatcttacacgcagtgcggacattatgggtaccacatacctacatggcacatatatcaacatattttggttgtcatatttttgtgtagtttgttttgaccagaaaaaggttgctcaaaataaaaagaaagatccatgcaagctgaaataattcacacgattgataaatttgtcggtgatatgggcccgggggtatcaggtttagagggaggaggctgccccccgatgccacgtggccctcccccgaggggagtcaggcccgaggtggggtggcggccactccttcccaaagactagtcggaggaggctgccacccgatgccacgtggccctcccccgaggggagtcgagcccgaggtagggcggcggccactccttcccagagactggatggaggaggctgccctccaatgccacgtggccctcccccgaggggggtcgggcccgaggtagggcggcggccactccctggccgagactagagggagaaggccgccccaggcgccacgtagctcccccctgaggtcaggcggcggccgccccctcccgtgactaggggtcgggctccgccgaccccctctctatgtcaccacgtacggtgggttaggtgtccgcctccaggtgcccacctacccgcatttatggcgacccgaacggtcgcgccacgccgcatttaatgcagtgtgcagtgcactcaaccggtctgtgaccggtcgaatgactgatgggacccaggatgtcaggcgcaccatcgcgtatgtcaggcgacgtgcagcccgacatatcccatcaaataatgatggtgagaggttctcatcctcttatcccagccggagtcggtcctcccgctctggtcaaagcaaggctcccgtttcccggtgtaataggagcccagaagtcttcaccccttaaatggtgactgacaggggcaccccccgtgtcaggcggcaagatttgacaggccccatcatcaagacgacgtgcgcttggcttcccaagtcaagagacaagacatgcatttaatgcaaagattataatacttctccaccggagctaggttaggttgttgggcccatgtggtaaccccttgaggtataaaaggaggtccaggcctagtgatggagggggggactaccgagcgaactggcgcttgggtctcgcaaccccaaacacttgtgttctacactcaatcaatcaagcatagaagtagggtattacgcttctcagcggcccgaacctgtataaaccccttttgtctcatcgtctttgggggatgaaaccccctcaagatcacacaacttcgctcaccaagccctcgaatctcacccgctgcccccggccgaacttacaaagaggggcctcacggttccttggtggagttctttctccgacatctggcgcgccaggtaggggacgcgttcgtgatttttgaggttctttcgagcgccggcgtgacgtgcgtcgcaccgccaatgcgggggaaggcgcagcctcctcaggagagccgcgccaccccaggcagggggctagtctccctgcatcttcaccggcctcaccgaaaggtaccacggtagtgtcaaccactccgagtccctccagatccacacgacgatcatagaggcggcatggggtgacgaccgggtgaaggcgaatttcttccccatggccctctagggccaagcgcggggatcgctcatgaacctgccacctgcctcggtctactcctgggaggactcttgcagttgagctccgggtgccgtcgaagcccgggaccccctgtgctggctcttccgcagcggctagctttggtcccgccggctggctacggtgcctggcccggctcaactaatcgtcctttcaagtttcaagtattttcaatttttcaattcatcagcttgaaatcttatatttgattttgtcgggtcccaaaactaatgatttggtaaccgacatgtttagactgtattaagccctggatcagtagattgatacaggttcaacaatctggatcttcattgcatacatttgaacaaggctccagagaagataaaatatatggatatttacaaacttgtggctaactaatacagcaggagctatagaatgaaccaactctaatgttttgctatagagttaaaccatctaacaatactagacttgaagactaggtttaaagggaactaacttatgtgattgaactcccagcttcgataagaactccaaattgactctaaaaaaggtggggttgaagtaagggtgagtacaacgtactcagcaagctattatattcaacatgaatgtatgaaatagtagtatttgagtagggctagatttaattgcagaaagcagaggatatagaataagaaagcctgtaatgactttaatgcaacaatatttagtaaaatcttgaattaggtttctaaccaaataccatatgagtcccggtactcaattccatgagcacggctattcgaatagtttcatgaatattctactgcagtagatgtacactttacccgcaatccacgacttgccaatattcattagcttagtcatggcctagtattaggttattaacaatagtggcacctgttccatgaactctagtccccatgcgctctgaacgtaacgttatcagcagcgagaggagttctggcattcctggggtttttagagagaactggatgagagaccccacatcatctcaaccaggtttccataaaatcacacacacaactcatgagtaaaaatcaatatatttacctgcgcctcgataaatatcataggatgccctgctcggcataagattgcctcctgcgcgaggacttacaaaaggaaccactgtatagaggtaccatattgttaattaacataatatttaggtctgtccccattctagaagctgcagtcgtactcgttcttttgacataagtattttgtggccattatatcgaccgagacagtactagccacccgaaaatcaaccaaatcttacgtactgtcccaatctaagttcattatatttttatgcagtctaactaggcagggctaagcaaaagctagcatatctggtttgctatatgttcaggttatgcattcaaaatcatgaatggctaatgcatagaatagaggtatagaatatagggcatttatgctcaaaggagaggaataataacttgccttgctccaacgcaaataaatccgagataggcaacctgattatctgatcctcgaaataccacaggttgccatccaaaataaaatagactctactaagaaagacgaagaaccaaattcaataaaaatcatgaaatagaaagaaagtgatgaagagcaagaagggctaggtttggggtataaatatctcctttaaaggggtataaggttctaaagagttggaggctaaagggagagggaatcaggcaactaaggttgcttatattttatgggaatgcttggttgctgaaaggatagaatgtatattggataattgaactggttcagttggtatatggctagtattggctggtggtaggtttgggtagtataatacctagggtttggttatatttaagccgattgtggatagggcagcatatcgataggctctatattttatgtgtaggttctagttagttggagagtatgtggctgagagtagggtggatatgcgatactggtgggtgtgaaatttggatgataactggaatttgactggcaaggtattagctagggtttggttgtatgctagtcgatgctagagtataacgacttgatttgataccttctctagccggtgtcgaccgacaacatattggctagaggaataggaggttggtgtaggtttgggtggggcggaagtgttaatccgacaaccgtgaatggcagcggagtggctaggatcacatagagcccgagagctaactgtgcggcatgctgtggaggtcgagggaatagtgaagctccgaccgctatacgcatcaaggtgtggggtgacaggagcagcacttcgaccttaggtttggtttttgccgggctttacaaccaacggtccgacgtcggggatagtggaccacgcgaacgtccccatggaaggcgtaaagttccaaccggcagctttttagtggctaaaggttattttggaaataaaagaaaatatttgaaaagtaaatataagtttaaattgtaaattcaattataggattaaatcaaatatttattcaaataacatttgaataaatcaagaaaattcaaataaaatattaaaatagtaaatttggtaccaaaatgtagattttgaatttagatgaatttaggtccaattttcactagaatcggatctacggtttaggagatatgggcttctaaagaatggtatttaaattaaatagagaaaatgtaaaaagtcactgttgatggacccacctgtcaatactttttcctttcctttcttttcttttctttcttcttttctctttctctctccttcttcacgtcttcttcttcctcccgttacacagaggctcgagaggagggagaggagagggaggaaggggcgccggtgttccagtggtggaacagcttcgccgcgggcggcatagggtgttcccgggtgttgcgcacctagggagtgtggtggctggacacgggagtgagagaggaggccggaacggcgagcacaatggcatgaaccggagagagagagagagctccggtgaggctcgattgaaagtgggagtgaaggggaaaagggctaaaatgggttcttcggtgtacggggaggctggtggcgaatggatttgatttaggatgctctagggatggagatcgatcgatggccggcggtggtcgccataacaggagagagagagagaggagctcggctcatgtgtgtggagggaggagacctcgctggctatttataggggacgataggcggttgtcgaaggtcggtttggagggggaggatgaaggggacacggcgacgacggcgtggagaagaagtacacggcgtcggctttgatcgctgattggctggtgatggcggttcggctcggcggctgacgtcggcgagatgaggtgcggctgacgtcgggcagcaattccttggcgtcgacggcggtatagcggcggcggcataaagatgcgggcgacggcgtctctggttcggtgtcacgtctgaaaaattcactagtaatttccgaatttatttgtgcataaaaccctcgtacaggaatcagccgaggtatacaaactgacaatttaatatacaaatccatcataataataacattacatacttacaaaagaaaagaaaaacagcagcggaataacggtctagcgatggctttaactccactcctacaggcaactcaactggggtataagccaaacgttttctccttctggatcctttttcttcaactgaggttgattgattattacaagaatgagcatatgatatactcaacaagctacatagcaaatatgcaagtgcacaaggataccaaaggatggcataatatagggttcatttgcgaaagcagcatttagcaaagatttagaagtaaaacagtagagtaattaatcatcaattttaaccaacattgcacagcaccccaatgctgcacatgcccaaccatcctgaacaaccatacccagctgtacagatctaactccaagccaggagctaagaaaattattaccagttatagcatcaataattattgtgagaggtgtgagactaatcacgaaaaacatttctcaacccgcccatgaccgcgggcacggctattcgaatagttttactctggccagaggtgtaccactgtacccacaagacacagcctcaacatcatgtttaccatgtatcgcgatactggaaagtacccgaatagaggctgtgacaataccccctgcacaacacaactcaccacagtgcaccatacctggatcataatcaccccctctataaccagaggcatggactccccagcgacccccacggacttctcgccgcttctcagtctggcaccccgtaatgaaccatgctatacaaaaggtaaagtcgttgcccacgctggttgtggttggtacggttaatgtctcacaacagtagctcgcgaaccggtccttaattgtcatgagcacaaccttcaaaatcatatgctcacaacccaccattgtcaagttttaattatcaattaattatcataacacgattaaccatcatgagctaccattaaatataatcataagtgatagtgtaacattagttatcccaattatgtgataatgtttctaagcatggctaagcaattttatatatatatatatatatatatatatatatatatatatatatatatagcatttagctgaaccaaactaatatataaggttcaagctaattaatttattacccaaggtattaaagaatagggtattcaatgcaaattggccataataaaggaataggttcataccacccggtgacattcgaaaataaatgcacagttgaaataaatagagaatttaaatataggatcaacatgctcaaaggattgtgtttaggatctgtgtgacttgccttgcaataatcagtcttcaattaatcttcttgaacacttccgacgcactcacgaaccttcgcaacgacggaaacggcatgctaacacgcaaaacgaaaaaaaataataaaaaccaaataaacagtacataaaaagtaaacaaacatgtagatcatgattttagataaatttagagacttgaacggcctcattccgacttcatatgaattagttatgaattttacaagattaaactgattttaacatttatttttagaagggaaaagggctttatgacatcatcgatgacgtcatcacctgcgagaggctctgaaccatgaggtcgccggagctagaggactcggccgggtcttccgaggactccaacgcgaagaggacgacgatgcgaactcaccggtgcaaagaacaacgacggacgacgacgaacgacgaccggcaacgagctccgaacggcggcaaagtcgggacgacgacggcagtggctttcctgcgacgagcagcggcaacgtatgggtggacgggcttcttctcggtgctgcgatgccgacaacggtctcggggtgaaccagcgacgaccgcaacagcgaggaggatcggccggagatcaaaccgg

SEQ ID NO: 13988 - DNA, 1585 bp, Oryza sativa
aacagttactcggctatagaaaggtcatagtcagttataattgatggccattcatcatgggaaccagctcaaggaactaaattaacagccagaattcaaatacatgattctttttcttttcttttctttttttacttttgttgtccctggaggggacaatattcatcgctgaacaggtgctcagcaaaccactgttgtatacttgtatgttattacttaacagtgtgtggagtgattagagttgcatactccctaattgtatcaatcgacacttctgagacaatgagctgtgcgatgaccgtggtctatttcatttatttcatttgccctgtccgagaattttatgttcactttgtttaatccatcaaatttctgatactaaatcagggaatgctgaagatgaatttgagttttgagatgaaatatcattggacacatgacgttctggttatagggcagtagacgactagggctctccaggcttctgtccgttcaacagcatcgttacactaaacatggttttctttggatattttatgtaatttctcacaaaataatctatacacgaaactcatctggaagagagaatctgcagatgaatttcacatggcatactcttaaccatcaaatcagcatacattgatccgacataggctagtctggatcagcacattgtggcatatgacaacatggattggaatattggaaacactctatgctagtcacatgctaacatcaacaagtttagagcaacttgtaggagtttgtcatttttactccccccaattccagcagcctcttacagctcagaagaaacctgcatggtaggaaccaatcatttcaattagccaaaaaataaaggaaaatacttacaaattgatatttcactcgccaaatatttccaatatccagcccacatgtcttcatcattactaactgaagaaataaaaaatcaaaatcaagaacaccatggtcattcagcttgatctactactctactaaaaagacgcgaatattaggaatgacctaatatcaaataattagaaggggtgagtcttcaaacccaaatcatctagcccaccactttgcggagctagctggaagacccccgtgtgtttctcgatctactactctacttattactaccagaatcctgatccctgaaggctatttttttcaaaggtaaaatcatcaccaacatggcctagttagcatcgtctgctgttcactaacctgaccagaaatgagcctgctgacacggcggcgcctgaggctgccgctgccggagctgaacctcgacgtccatcggcgccgcggcggcggcttggtctgctctgagtggcggcgtttctgaagatgacatctcatatgcagtgttcatagtgtcatggatagtctcttggccctgagttggtagcatccatgataaggccatggttggcacagtaggatcaggttgaacacctgctgatggtttctcttcctccatcgtgtttggaatctcaccatcctgatgacagcaagaagagatgaaacattagagctcatggattaaatgtttcaattgccctcaaaacatgaactg

SEQ ID NO: 13989 - DNA, 933 bp, Oryza sativa
caaaatgcttatgagaatatgtatcttgatgatgaaattgatgtaaacccttgaactggatgattgtaattgatatgaacattttagctatgggctgtactcttttcctttctagggttttctcacgaggtgtgagtttttacctagaaaggtttttaatgaggcagccattgcacaatcacagcttatataaaccccttttatattctaactttctaaggtttgtgattctgagatggacttgatggattatagtagatgacttgatgtatgcatttgatgaattgatttgaactgattgtaaatctatgagactgtgacttgatgaattggtgacttgaagaattgttcatttgtttgtaaatctgtgacttgatgtatgcatgatttgataaactggtgacttgatgaattgtttgtgattctttgacttatttgatgaattacatgtgaatttcatgaatttgatgtgttatgtcaatttgttgtgttgaattgaacctttgaaggggttttttgccagggcgtgcctgggccggcacgggcacgatgggcttgccgggccgtcgggccagcccggcacggcccgaggctacttgggccgtgcctgggccgtggttgtagcccgtgggctggcacggcacggcacggcttgttcgtcgggccgtgccggcccgactgacctcggcccaggcccggtcgtgcctgggccgtgccgtgccgggcggcccatatggccaactataactggggcggacggaggatttgggtggtatccggaaaaggctagtgccgtccctggtcaattaaggaccgagccatgaagttaagcatgaaacgacccccgtacaaccgcgcttctcgtatgggtatagacctagcggagtagatggctgagcggaggcagtatccatgcatagtggtttcttgatg

SEQ ID NO: 13990 - DNA, 2542 bp, Oryza sativa
gcggactgcgtctactacctccgcacgggggcttgcggctacggggagaactgccgctacaaccacccgcgcgatcgcgccgccgcagcagtggtgagcaccaattccccctctcgctgctctactcctctttttttttttttcacctcctgactttagctacggtgacaatgaccgccctattggattacgtccggttgattttgaggtggggggcttcaagctgaaacctctcgccgagaattaattctacttatggcctgtgggatcttatcttgtgagcatagaagtgaaagttgattgcgcctttgctggtagcgatggtttgcttgattagtttggtgtctcggtcttatggttgatgtggacaattctgagctccacatgcaggcctagccacttgtctggtcctttttttttctgttggcaaacgcttccccttttcttttttaatctatgttttgcttatggatcaagtagatggaccatgtgctttgaactggtggtaaagattagagccttaggtagagtgtaatgattgtgaattcatgacaatggattgaaatcgaggtattttatcctgcttttgatttaaacattcatattgttatttgtttattagttaaatggaggtgggaagaccacacattcggcagagtatccagaacggccggggcaaccagtttgtgaggtaatttatctgattctcattttgtgcaagctctcactcatatgatcatatcaaacccaaaaaaatgtgcctatagaagtgggcaacctatttaggctacagatgatttttttttttgtgtgtgtcatgtgctggatactcttcgggttaacattttgtgataaaaaatgcagtactatatgaagaatggaacttgtaagtttggctctaattgcaagtatgatcacccaagggaaggctctgtgcaagcagtcatgttaaattccagtggataccctctacgctcagtgagataattcattcgatcaattcttattaaagtagtggcctgcctttttcattttctgatgaaatttcttatgtgcagggtgagaaagattgtacctactatgtcaaaactggccattgcaaatttggatctacatgtaaattccatcacccagaaattggtggagtttcagagacacctaacatgtatccaccagttcagcctcagcctatctcttcctctcatccatatcaacatcttgctggctggcaaatggggaggcctcctgttttgccaggatcatttttatcaggctcatatccaccaatgatgcttccgtccacagtcgtaccaatgcagggatggaacccttacattgtaagtttgtcatcattttcttctttgtaccacatgtagtggatcatcgagcaagggtgttattattatctctactactttaaaagcacaatcgtttacctttccttccctatcccaccctccacataaaaaaaacgtaccattccctataaaaccgcttccatccccacctataaaaaaacgttgtagaaaaggaccgagaaaaaacagggccacctatgttacgatcaaactaaaccatgtttcttagatcccattgcgacacagggggcatatgactagtaaattattaaatagatcttctaatctagtacaaactatctagaaagaaatttattttttcttattaaggatgtactttgaacatttatagtcatcacaataaaataagagaattggctggtaagagaattggctacagagtgacccagaaaatttaacgtgattcatactttgttgtaagaacaattcaggatgacttcttaattttgtgctacaaataatgctgatgtaagtgtcagaaaaagaaaaaaaaaagctgtattgacctctttactatgttttatgttcttagtcacctgtgaaccaagttgcgtcagctggggggcatcaaactgttcaagcagggccgttttatggcttatcgcaccaagggccttctgctgcagtcacttatggcagtcagtatgcaccgttatcttcttcaaccatgccttcaagtagcagtaaacaagaacctgcctttcctgcgcgacctgggcaacctgaatgccagtattatctgaagacagggagttgtaaatttggatctgcatgcaaatatcatcatcctcagtatttgaatacacctaagtctaactgtatgctgagtcctcttggtcttcctcttcggccggtgagtagctccaacacatatctgcttttatatgcttaaactatgtgtagcacgctgttgccaggatagtcagtccaaatgtatatcgcttgagtctggattagtatttgatatgttgtcccagataagtttgccatatagtttattgtattgagagaaccaaattgacgggtgagttttggtgtacacatgtaggctgtggttgttccagccggttcccaacaggaacagtacgcacggaaaacagaccggtccattagcgcgtgattaattaagtaaaatggatcaatatgattttttaagcaacttt

SEQ ID NO: 13991 - DNA, 923 bp, Oryza sativa
ctctccctctctaatcttttccttttcgttctttaggtcgtcccggtccccgtccgccgcttgtcgacctccctccgccgctcctcgtcgccggtcgtcgtcgtcccctccggtgaggactccctcccctttcctctccttccccgattccccgtgtgccgccgccacccacgctcgtcgtcgccttcggtcgccgtcaccgccggggcgccgtccgctaccgccgcccgcgccgccgcttcctgtcgccggtggatgtgcgcgtgccgccacccttgccatggccggccggccggctttgtgccaagccgagccgagccaggccgccgccgcaccgtccgatcggccccgggctgatccgggccgtcgatcccgtggaccggcggtggaccacccgcgtggtcccggtccacggtagaccgaccactcgtgcgccgctgccgagtggggcccgcttgccggcgccccttttccctctctcccgagccgctgaccggtggggcccgcttgccggcgccgcgcccccccttgattacgtcagctctgggatttattgcgcaataaatgatttaaggactttttgttatagtaataaacacagtgaatcttctaaaattcataactaattcatccgagctccgtttaagcccattcaagtctcagtaaatcaagaaaaatgtgtagaatctattaaaaatggttttgttccctgtttcagtagtcttatagcctgtttgcaatgtttgccttgtatgtcgctagattccggttcctccgacgctccggtgtacttcgaaatagtcgccgaggttcctccagcagcagagcaaggcaagtcatgcttgtcacttgaacatgttgatcctatattgcaaatgctctattgtttttcttcaaatattgcattgttttataatgttact

SEQ ID NO: 13992 - DNA, 799 bp, Oryza sativa
gaagatagcatcagttggcgttataacaggccggccgggcaggcggtgacaccagtcagcggcggatgcggcggccggtcggtgaagacgtagacgcccaacaacggcagcataataggccagccgtgcaggtggaaacatcagtcggcggcggtcgaggcggccgatcggtgaagacgtagatgcccaacaacggcggcataaaggccagccgtgcaggcggaaacaccagtcggcagcggcgaaggcaagccggtcggtgaagacgtagacgcccaacaacggcggcataaaggctagccgtgcaggcggaaacaccagtcggcggcggcgaaggcaagccagtcggtgaagacgtagacgcccaacaacggcggcataaaggccagccgtgcaggcggaaacaccagtcggcggcggcgaaggcaagccggtcggtgaagacgtagatgcccaacaacggcggcataaaggccagccgtgcaggcggaaacaccagtcggcggcggcgaaggcaagccggtcggtgaagacgtagacgcccaacaacggtggcataataggccagccgtgcaggcggaaacaccagtcggcggcggcgaaggcaagccagtcggtgaagacgtagatgcccaacaacggcggtcataataggccagccgtgcaggcgaggacaccagtcggcggcggcgaaggcaagccggtcggtgaagacgtagacgcccaacaacggcggcataaaggccagccgtgcaggcggaaacaccattcggcggcggcgaatgcaagccggtcggtg

SEQ ID NO: 13993 - DNA, 2271 bp, Oryza sativa
agcttcatcttaacctttcctgtagctggagctcagctaaacagtttcagcttcacctaaaatgagagcagagctgggtggaacgctatcataaaataaacaactccactttagacttaagctaaatttagaagttggagttctaccaaacaggtctttgaagctgaagctaaatttaggctgtgtttagatccaaagtttggatccaaacttcagtccttttccatcacatcaacctgtcatacacaactttagtcacatcatcttcaatttcaaccaaaatccaaactttgcgctgaactaaacacagccggaggagctaaatttagaagttggagctctaccaaatagttccttgaagctgaagctaaatttaggagaagtggagagtgcatttggcagctcgcctgtagaaatagtctagtagtagcgagtagtgacactgtagatgctgctggcttagtgcaaactgcttcttcattgccagtgtgtcctgatatgtgaagcattaatcagtgaagctaatctggacgtgacgcttgaaaagcttcaatgttctgctgtaatgcacacagtttcataatgtttagaatctagtacagttctgttttataatcgcagttttgttttcatgaggcatgcgtctctagctgccctttgttttgatctataggatccatttttgttgaaaagaaaaatgtttttctatttttttagataaaaatcggacattctattcattagcaggcaagtttacattcataatcagagtacgggaaggaattgagaacccccaaaaatgtttactagcgtagatacgctggaggcttcctcatacagatatcaaaatcttttgtttgagcagagagcacacttcataactttgtaggccaaatgatttttgatatttccatcagagcatgtaactaccactgtccacacaatcaattaattcgtacaactgataatgccaaacagaaatggctcattccgtaacaccgttatttctgatatttcctgttacaccatactgttatgctagcattcaaaatgaaaccagaaatgtagatgtaaggcagtgtcatacattagaaaggatagttttactttgtctgggaatcaaaagataatcagaaccaatatagctaagattatttctgagatgcagctttagcagctgaacacgagcaaggagaactcttcagaggtagcaatcaaatcatttgcccatttcccagacaatggcactgtcctctgcatcagcaagtaagaagagtaagtatatgtacaaaaatatacaggcaacaaacaaaaaggtgttacatgctttcaattgttcaacccaacattatccaagacaaaagaagagtaatgctttcaattgtataatacaacatcataagttttcaagaaaacagttactttgcaagaacgtaagttgaagagcactgctacacgtactaattttttcttactaaatttgtactaacaatcatatcaaccgtttgatttaagcagatggaagttataaaaaatctagatggactcatagcatgacatgtcagtgttagtaaaaatttagtaagaaaaagttagtacgtatagacttttcctaagttgaatggcccctcctgctaccaaataaaacaagaatgcacctttgatctttttgtttatccaaacctcaagcagcatccctgcgccaactccagcagcacacgcagcgccatagattgccaatgcagaaggcaaagatcgccgaggcagaaaatagcattcaggaacttgtctgattttcttcgggagacgctttttaacaactggttggcttgggtcggtgctcaccgaaccaccaactgttttccagtccacattcttcagcatatcttttgtgtcctcactgcccatcctgaaaacgcctgtatgcatcaatgttaatcagaaccaagctccaaacactatctgagaaagtgagtggcagctccaaacaccacgtcccactaggcccgaaaaccttaatccgcgaatgtctgaacgcggcaatgggggtttgggtttagggtttccgggggagaggaagtgggggatggattccatggtcttagagggatggcctgggaggcagaggaccggcggcggcggcggcggaggggcggggcgaggggatgtggaggaggaggaggaggaggaggcgcggagctgacctggatcgcctcaccgtcggggaggtcgagctcgtcggcgtcgtcaggaaggtcgccagcgttgttg

SEQ ID NO: 13994 - DNA, 7410 bp, Oryza sativa
gtccctggtttcgtttgacgtggcaaaaaaaaaaaaactaggacccacgtgtaagtgactgttcgactaaaaataaactatttatagtgggacccacgtctcctccccaatctcgctgtctcttgccgtctcctccttctcccaatgcggcgacccagcggcgggatccatgcggcggcggccaacctggcggcgggacgatgagcagtggccggcggggaaaaggggcagagcgcgccgacttggagacgcttcggcgacatcgtccacctcgacacgagcggtggacgcggcggatactcctcttcctcctcccctctcttggtcactggccagtggtcaccgctcgccggagaggaagacaaacttgtggtggtcgtcggccgattggcaatcattcggcaacgacgaccgatgctggttcagccgccgaacgccgacgcccagcacactgacatccccgacggccgctccttcctcggcgtcccccgctactaccgccacagcctcaccgtcctccagagagccgtccgctcctggaatgcccacaaccacaagcatccaatgacggcggcggtggcgccgtccgcttttgtgtcaacttcggtgacatcgtcgacggcttctgccccaaggacaggtcgctgctggccgtccaggccgtcgtcgccgagtttgaccgcttcctcgacgcgtacgacttcaacgccgtgggatggtcgcgcgaccacccgatggccgcggcagcggggagattcttggacaagaggaacccgaacacggacaagaacaacccgagcggccttgccggcgtggccaggcggttcgtgatgttcaacggtgccgtctgtgaggcgcagctgcggtggctcgacggcgtgctgcggggtcggtgctgtggcgggaaactgcggtggtgtgcaggcacctgccgctacacctcggcgcggcatcactgtcagggctgatgtggaactatgagggggtgatgcgcgtggtgcaccggtacggccgccgctccgcccacgttccgccgccgctccggccgccgcccgccccgcttcgcccctctcttcctccatccctctgctctgccgccgctccggccgccgcccaccacgctccgccggctggagaaagagaagagggagagagagagagaggggatagagagtagtgaggatgacgtgtgggcccacgtgggtcacaccattttttattacgattttgctatcgattttgctatatctcactcgaaagattttttcttatctctcactcgattttcttactcaaatttacagtgcattttcttgtaagttacagtgtaatttatgaaacttacactgtaacttttgtaagttacactgtaatttttgaatcttcgcatgtaaattttaaattttgtattggatttggtctttttattgaggatatggtaatttagtgtccattatggtgtttcttaattgctttttgctttttattatatctatcggattttaatctaaagattaaaaatctgtgtgatacgattataaaaatctttcgaaagatgtatagttactcccttttgctatatctcactcgaaagattttttcttatctctcactcgattttctcacttaaatttacagtgcattttcttgtaagttacagtgtaatttatgaaacttacactgtaacttttgtaagttacactgtaatttttgaatcttcacatgtaaattttaaattttgtattggatttggtctttttctagaggatatggtaatttaatgttcattatggtgtttcttaattgctttttgctttttattatatctatcggattttaatacaaagattaaaaatctgtgtgatatgattataaaaatctttcgaaagatgtataggtactccctttttattattttgtatgtgcaactgacatgtgggtcccgtaggttttattattttttcggatctaattgacacgtaagcgccacgtcaacgacatgtcagataagaccgaatcaaattagccacgtatgcgccatgtcagccaaaaccgctatcaaaaccgctgagggacctcgtttgcccggtttttgtaagttgagggacgtgtcgtgtaacgccccgattttcgttcgggattaaaaatcaattaataatgcatttcctagaaattaaataaaagttaaagcaatttaatcaagtgaattaatgggagaattaaaatttttcccttaaaaatcattggccgggaatattttgtaatattctttgtgccctaatgtactctccggaattttccgtgaattttcggagctcaagaagtaattttaatggcacaaagttcatcgaatcaattaaaataaaaagaaaagaaattaaaatcccctctttgtctttgggctcggcccattctcccttccctccttccctcctttctccgcgtgggccggcccagctcggctccccctcctccaagtccacataacccccagcctcctccctcctcccctcgccgacaggtggacccgaggccccacctgtcatcgtctccccccaaccgtctcctcctctctcctttcccccgaggccccacctgtcgggtccttcccccacctcccgccgatcccggtgcgccgccgcgccgaaaccgccgccgcacccacttcctccgctttcgccgcgcccacgccacgtcgccgccctctccccgcgtctcccggccgcgccagcgcacgagaggggcgggattcgattttgaatctcccccccaccttctctctctcctcccccacgtcgccggcgaaatcggagcgcctcccggccacgtccgcctccccctccgcctataaaatgctccccatgccctcctctctcgttttccgctctcaccgctccatcccgtgccccctaccgagctcgcaccgccgccacttacgccgccgcccgtcgccgcactccggccgtgtgccgccgtcgctagagccgccgccgcactaagccaccgccaccactagcttcgccgccgcaagacccttcccggccgctgctctgcgtcgccggaataccaccgaaaccccatttccctcgcgtcgtcggtgagttctctctcccctccgactccggccggcgtggatggtcgccgtgggggttttcctccgccctaattcctctcctctctttccctaggtgtcgccgtcgctcgtccgcacctcggcatcgccggtcttcgccgcctccctcgtttttctccgccggccattgccgcccctccggtgaggtctccctccccttccttcccttcttttttttttccccgtgcgccgccgccctcttcgcgcgctcgccgtcgctggcggtcgcatgcccgcgccgccgccttgccatggccgcccggccggcttgatgccgggcctggccggtacatcggctcgtggagccggagccgtggggcccgcttgccagccgtgcccccccttgagccgctgccgagtgggcccgtgtaccagcgccctccccctttgactcgctgacgtgtggggcccgcctgtcggcgccggccctttgctgacgtcagcggcagtccttttcctttgagaaaataattattaattgcgcaataattcgataataattatagaaattcattaaaatggctcaaaaccttctaaaactcatatctaattcattcgaactccaaattgagccattcaacttgcaaaatccatctaaaattgagttctacatgtttgtttactttttatgtactgtttccttggtttttattagagtttttcctcgttttgcgtgccagcgtgtagttcccgtcgtttcggaagtccgcggtcgcgaggaaaagagttcggaagatcaaagtgaagaagcaaggcaagtcacacattccccttgagcatgttgatcccaatttataaatgttttaccgtttacaaataaatatgcatgttttgctaattacatgggatccgggtattacctatctgctcgcttgtgccatgtttacttgatatctgtcctttgtcaaccttgggtgataaatcgactagcttgtgttacttatgtgacctagctagaactatatgcttagccatgcttaattaccactagctcagtcgatgggataattgcagtattagacattctagtatcttgttgagccgcgtgctcgagacatctggccatgttttatggtcgtaattatccaactaaaatgcgactgaatggtgggctgtgggtgcatggttttgtgagtcgcacccatggcaattaaggaccggttcacgggaaaccctggaagacttacagcgcttgccacaagcgggaatgggtaactgcttgatctgaagtatagctcgaccctttcctaggcaccggtggcgagggtgggcgtgatggagttgggtcggccggggtgtccggttgtccagctgccggattcaccgcggcgcaagaggggaccgcccactgccttttgaggggtgggggtgaaaccttagcgtggtgtggatggttaggggagggttatgcgaagggtctcgtcacaatcactcgacatggtgacgtgtgcatcatgggcacatgatgacgcggtgacatgtcggtgggttgtgtcttgtgggtacagttgtgcacctctggccagagtaaaactattcgaatagccgtgcccgcggttatgggcgatcgaccagattcaccgtgattagtctcacacctaataaatcgacccaatgcactgtagtacaggtgggttggttgggcctgttcaacgtggtgtagcgttgatcagtggagattttaatgttacttaaattactcaacagttttactgtttgctaaataaaatgttttacaaccgcctttatgcaaatagccacaaaccgtccttgtgttccctttgcacgtctgcatcgttggtgtggcttgctgagtacggtggttgtactcagccttgctattattcccccttttcagaagtgtagtgcttctgagctgaagatggagttagaggaccaaggctcagaccccagttgagttttgcctgtggagtggagctgaagccccgctaggatcgcctttttccgctgctgctgcttttgtttcggtgtgaggactaagtgcctcttctgtaagtattttacgctttatttacgtttgggactgtttattacttgtcgttttgtgtaccctggctggtcctggacagggatttaatacacaaaatagtctggaaattttgggctaaatttctgggcgtgacaaagtggtatcagagccaactcgactgtaggttgagccaaatggtcaaaccctaaggacaagctttctgaaaaccctatttgaaaaatgtctcccctcgcccttcggcttttctttgcgaaacagtttttcaaaattctcctccctgtccctccaattcttatagttgttaaaccgtggaggataaactgtcagcttcgtgtctgttcggaagtcaagtcaagcatcaagcttcgtgcagcaaagagcgagaaggtcggttcagagtcgtcgttccgtgaagatcaagaagagttttcccgaagttgacctaaacccaatctttcccagaagagtagttccgttagctttctagatcgtgtgttgtttgcttgtgtgtaggggtatggtttgcatcattggtggggatgcgaccatactaggttgtttgcttaagcaacttgaagaataaaagtctactcacaacatatcagtaggcaagtggtttagtaccttatctttagcaacccctctcttccacctctcttccgtcctggcagcggatggtcagtgtcagagataagatcaattaaagtcaccaatcaatggttcagttgaaagctacaaggtatcccagtgccagaagaaccctgctcgtgatcaacatttggtgtccaagattagatgatggatgtattgatgcgggagatgcaaagctcgatgcaaggtcaagagtagcggaaagaactccagcagtagtgtgttgcagtcaagagtcagtgtgttcatgagctaaatgagagtcacttttatgtggaatttcctatcatcaactaaggcttaagttccaaatcttgtcgggatgaaagtgcatcgccattgcttcaatttgatggaccgatgaagtttcagtcttcaaagtcagggcatctgtaaatccgagaaatgttggtcattttttcgaggacaacagttcaaaggttctcagtcaggcgaaagtaagactacccactgtaaggggggtaggtctcagagatgagttttggtttacctcgtcggcatttcacttgaatgttcaacccagtgcagcaatttggttagtaattaaaggagtccgttgcgagccactagcagagtctcccaatctcaagtcaacaggttcaattctaatgtacacccttgaggccaggtcaacagttcagcttagagaagtagcatcgaggatggttgcagttcagacgaaagacaggtcaagcaggtttttctggaattacttgttatttgaattgggaccagtcgaagcggacatagggtaaatgatttataaatgccagattccattttcatcctcttatagctagcgtggtgaattctcaggttaccaaaattgctaacctcaacagttcagcccaagctaagtaagtttcaggagcatccgcagtcctagactgggtcagttcaagcaaaaccagtcggtccagttttggcaaagcaaaggaacagaaaggtcgaatccagccagttcaatcgtacaggtttgatcaaccagtcaatcaatcagttcgaagcagaatgtggcagttcaaggtgcagatcagtcagaccgcccatcagcaccggctttctttctagccatcccagaatctcgggacgagattcctgtaaggggggtagatttgtaacgccccgattttcgttcgggattaaaaatcaattaataatgcatttcctagaaattaaataaaagttaaagcaatttaatcaagtgaattaatgggagaattaaaatttttcccttaaaaatcattggccgggaatattttgtaatattctttgtgccctaatgtactctccggaattttccgtgaattttcggagctcaagaagtaattttaatggcacaaagttcatcgaatcaattaaaataaaaagaaaagaaattaaaatcccctctttgtctttgggctcggcccattctcccttccctccttccctcctttctccgcgtgggccggcccagctcggctccccctcctccaagtccacataacccccagcctcctccctcctcccctcgccgacaggtggacccgaggccccacctgtcatcgtctccccccaaccgtctcctcctatctcctttcccccgaggccc

SEQ ID NO: 13995 - DNA, 2790 bp, Oryza sativa
  unsure (1)..(2790): unsure at all n locations
ttttactgtttgctaaataaaatgttttacaaccgcctttatgcaaatagccacaaaccgtccttgtgttccctttgcacgtctgcatcgttggtgtggcttgctgagtacggtggttgtactcagccttgctattattcccccttttcagaagtgtagtgcttctgagctgaagatggagttagaggaccaaggctcagaccccagttgagttttgcctgtggagtggagctgaagccccgctaggatcgcctttttccgctgctgctgcttttgtttcggtgtgaggactaagtgcctcttctgtaagtattttacgctttatttacgtttgggactgtttattacttgtcgttttgtgtaccctggctggtcctggacagggatttaatacacaaaatagtctggaaattttgggctaaatttctgggcgtgacatgtcgtacccggttttgcggttcagggacgaaaatcagactggacgacaaatagagggacctaagtgaacttattccaacaaagaaaggggagaatctatataaattggcaaaatttgctacaggacatctaaaaaaacgtgtaattagttagaagacaccgcaagaacgcgtttttgctgtaggcaccaaaaaaatagtaattagctaatggatacccgtgtgattattttattatatcgggaagaattgaagagagaaataactgtgtaattatgtttctaccctttgatttttttcttttccttttttttcttcattatctttttctccctctctcattctttctctttttctctctctacacccaaccaccactacgttctctccttccgctccttccgggaggacgaggtcaggcgcctcatccgctccatctccgccgagagcagcggcggcaccgccgccttcaaccttgcccgtcgtcgccgccgcttcgcccgttgtcgcggggctccaaatccacctgtgtagctcaaaaccaaagctggtcctggggttttgggggcctagggcaaaaacttatatggagtcccctatatatacataaactaatatatatatatatatatatatatatatatatatatatatatatatatatatatatatatatatatttatttatttatatagtcttattaagagaaaaaaagatagagaaattcatcagataagatgaattggacttggaggagtgtaggaccttgaaatctgatgaattggaggagtgtagtccaggcagcaggtggcaggggcagcgagcaatgagcagtagcgagcaaagaaggcgatcggtggacgatcgacacaaacgagcatggctactggtgagccgcgatttgccgacttgccgttttcgtttgcgagacgctaagaagtcgccgagagcgcaggagcagcgagcgacgtgagtagcatgcatgatgtgatcgaggcgaagcgacgggagtaagatgaagatcgcttcggcttcgctgaaacaaacttggcgatggactaaaattcattttctgtgttgggctatttagctgtctaacttaatataggcccatgtcccaagaactaaaattatacaatacataatatatatactatatgtgtacgtataaaggcccctagattttgagggactcgagcggccgcacagcctgaccccccctagggtcgccctgctcaaaacgacgcacaggcagagcagctagcaaccaaaagcaaagcaaacaatggagctgcgactgcgagcaagaggggacatgatgcggtgtagccgccgcctcctttgcagcctcttcctcgccatcgcagcgctgtgtagtgtcgcgtcggccgcggcgacgactgggacatcagctaccagttcacgtcctggactacgtccgcaagctggccgtcaccatcaacggccacacgttgggccccaccatccacgccgtccagggggacaccatcgtcgtcaacgtcaagaactcgttgccgacggagaacgtcgccatccactggcaagacatccggcagatcggcacgccatgggcggacggcacggagagcgtgtcacaccctgaagttctcctcccaagcctaaaatttaatttataaatgaccctaagaaaatgccggtgcaaatcaagagaaaaccctaagaaagtaatacaaataataatcgaatctgacatgtggaatttttcttgagttctacatgtcgaaattcactaacaggatttttagtggaattttcagagccctagaaataattttaatcaattaaaattgagcacaggcaatatttaaatccctggaaattcctttctttctttttccttttctttctccttttcccttagtgggccgccggcccatttcccctcctctctccccgcgccttgctgggccggccggaggccacgccctagctcagcccgcgccccctcctctcccggggtcaccgacaggtggggcccacctgtcgggtcctcccccaacctccagccgctcgccgccgcgcccgcaaccgccgccgcgcctcgcgtccgtgcctcccaggccacgccgtccacgtcgccctcgcacccacgcctcccgcgcccacttccccctctctcccgctcgcccgcgcttccgagacggccgggattccattttngaatcccgcctctctctcctctcccactccccccacgttggccggcgattcccgcctctcccggccacgtccggccccctctctccctatttaagctccgccgtcatcctctctctctttttccccatttcgccgaactctcccgagctc

SEQ ID NO: 13996 - DNA, 9856 bp, Oryza sativa
aatagccgtgctcacggttaatgagcaccgggacatgtattacacttggctagactctaaattcttaacttgtgggggatgggatattgcatgatgaattttatgctgatggagccatttcccgagaggagggaaggtggacatcctcagaaaaccatgacgattcaatggcgggaagctatccttgggatcacaatggatggtggacagaaccgtcgttgtttgaagtgaacactggtactaaaatttgatcagtctatgctaggtttcaggcttgtgaaaagaattgtaaaattagctttatgcaaaagaacctgaagccattccttgaaataccctctatcatatgcattgttgttgtggtggcttgctgagtatggttggtactcacccttgctattcatatatcttttaggagagtgttgaagagaagcccttgtcggtacgcttgtgtatccaacaagatgatcggagtgcggtcttgttctaggtctcgtttcccagtcgactgcctgtggcatgttaaccgggctcttatattattttgtcttccgctgttgttctctgatagttgttggcctacctggccctaatgtaagtatttaactcttttagcctaaattcattcgtgatatgttgtgatccaactatgtatgtgtgtaccaactactgatccagggattggtacggataaacacagaagatttccgatttccaaaatcgggggtcaacaaccccctaccgtgtcgcccttcgacctcatcagtcctgaaaggcaacttaccagagcggccccacttggccagcctccttgctctcctcatcgcctcgctattgtcacgcccggaatttctatccgaaattccaaacgcttacatgtgtgtgaaccctcatccaggaatcagccgaggcacacaataacaaattgataatagagtacaattattactctaattaataagcgaataaaatgtcattacagaggtagatagttcctctcaatcaataaagatctaagcagcggaaaaaagataaacgacgcagacggctccactccacaggcagcttgaccagggctacacctaatcctccacaccatcagcatcattgtagaactcttcctctgatgaatgattgcaaggtgagtatatgacatactcagcaagccacgcagcaaatatgcaagtgcacaggataacaaaggatggcatagtagggtttcatttgcataaacagcatttaataaacatttcagaatttaataaaacagttaagtaataattaaacaatattaatccaacgctatacaacataccctgttgtataggcccaaccattctgaacaaccatcccggctgcacagttctatctccaaaccaggaatataccattccaaaccaggagctaatcaaattattaccagttatagcatcttttattatggtgagaagtgtgagactaatcacgaaagacattgttaggcccgcccataaccgcgggcacggctattcgaatagttttactctgatcagaggtgtaccactgtacccacaagacacagccccacatcatgtcactatgtgcctcaataccaccacggtacctcggaaaggagctgtgacaataccccttgcacaacacaatccactacagcgcacctttcctggttcataatcacccccttataaacaaggcatggactccccagcgacccctgtgggcttatctccaccacttctcagtctggtgctccgcaatgaaccatgctatacaaaaggtaaagtcgttgcccacgctggcttgtggttggcacggttaatgtttcacaaccgaaactcgtgaaccggtccttaattgccatgagcacgactctcaaaaccatgtgctcacaacccaccattatcaagttttagttggcaaataattaattaaccaatcacgattgacaatcgtgatctatcattaagccatcattaaatactagtgaatcataagttatcccaatagtgtgctaatgtttctaagcatggctaagcaatcacatctaatatctagctgaaccaatatatatagcccaactagtcaagttataatcacccaaggtatcaaggaataaagtaatcaagaacaaaagggctataacaaacaataggttaattccacccaatgacattcgaaaataaatgcaatatttgaatagaaacaatagctttaaatgggatcaacatgctcaaagggttgtttgggatctgtgtgacttgtcttgctggccttagaactcttcaaattcttctcctgcgaaaacggacactccggaaacgtcggaatctaaacagaaaagagcaaaatcaccaaacagcacataaacaagcatgaacagtacatgtggatatttttaacatgtagatctcaattttagaaaaatttagagacttgaaccaactaaatccgagctaagatgaattagttatgaatttttaaagattaaatcggattaaaacacttatatggattttaattgaattatgacgcaataatgaattatttttgaaaaggaaaaggggtttattgcgtcagcggctagggtttgcggtggaccgggcgcacggcagcggctcacgggaacgaacggccgagatcgatccatccaaaacggacggccgagatcgatcgggtctacggcggctcacggcagacggaccctgatgacgtcagcggtgacgtcatctccggcggcggctcggcggctcggacgcgcaagctcgccggcgaacgacggcgcttcggcacgaacggagggcactaggacgatgcgggcatcgcggcgaactcaccggtgatcaaagcaacggcggaggggcaacggacgacgtcggcgacgaggtcgaagcggcggagaccttcggcttgacgacgacggcggtgctccggcgatctacagcgacggcgaaggggcggacgaggacggcggcgacttggcgaccacgatggcgacctccccgagcgacgacgacgaccggaacggcggcggcgcacggctggagcggcggcgacgactgcggcacgagatccacggcgctagggctcttccgacgacgagagacgaaggcgagggtggcggcgggtagcggcgagcttggggatccttttataggggcaaggaggcggcggcgaaggcccacggcgaccggcgacgcgaaggaaacattggggttcggaggaaagagaccgatccgattcgacctcgaatccacgaatttccaaagcgatttagacgatgattccaaaagagaaaaggtagaggagatcccgaagatcatttcccctctattgatttcaccggagaaggaaaggggcggccgaatttgggaagcggcggcggcggcgcggcgctagggtttcggccggaggaagacgacgactccgacaggcgggacccacctgtcagcggcagcgagctcgcgcgggcggctgcggctgcggactaggccgacttgggccggggagagagagagaaggttttgggccgactttcggcccaaagccaaaagagacttttaaaaaccttttttaatttaaattattcatgaaatgcaattccatttattaaaaatacttccttagctcaaataaatcccagaaaaatctaggaattatagaattaagcaaagtatttaatgaaattttatctgaccccattttatattggaatttattaattaaaattagatcttctcttctagacttttaaaaataaattctaataattccatttaaacaacaatttatatatttaggatttttagggtgtgacagctatgcccccgccaccaacgtcggcccaccgcctgctaccgacctcgtggcgtcgtcgccgcctcgccctccacccttgttcaccacccattgtcagtccgctgcccctagccaatccctctaagtctgatcccccactttcccctccctagttccactcactccaccaccaaagttctaacgctaatcttaagttggggcttgtcgttatgtggatgggacgcgtttgtgagatggacatctcgcgagtgtttgcgaactagtgtttccacatgccaacaattcagtagaaggcagaagtaagaggcaaagtgagagtatttgctgctacccagtggtcactagctaatcgatcaatcggttgtgcctaatttctaaataatgaatatgaattcaaatgatgatggaggcttcaaataagaaaagcagtgatgcgctacccgatacgttccttcatgcttcaagcttggccagtgtttttttttcttggcaagttgtctgtgactctgtgtgctacgccgacggctatgatgattggtcatctaggtcattgttgacccccactagtagaggataactttttccatggagctattgatgggatgaaaacagatatagcaaagatagtgatgtttgattatatctagaccgtagataaaagacaatggttgatattggctcaaatccacattgtgaagttaccaactctaggagatccgcacctatagtattactctcggctgatggaaacacgtggtctgtggccccgattgcatcaattatgagtggattgtctatctagccatttgattttgtttaaaaaaattactttttgaaatttgaatggttagaaattctttaaaattttgggaaactcttataaactaagggtgcacccatactataaacctaacctaatccctcctttatcagttggccactccctttgcctgatccgtcaccgccgccgccggcctatctcccatctttgtacctctttgcctaattcatcgctacccctttctaacctcctcacttccctatgcccgatctgcttccctcctctcttcccaccatgctaatgcacaccgttgccatatgtttcgtctcctccttcccgcctcccctatctcttgtcctgccctcattttccactctagcacgattctccctatcccgcatctcccccatctctagcggctcctatcatcaggcttgctacgatcaccagtccaacaccctcctccctcatggttgaggtgatctctgcctcactgcggtgtgtagtcggagagacgccagaactatggagggcgacaagagcatgaatcttgtgcatggttcgatggtgagtatattcgaccggtgtttttaatattttcagtcacctgatgtcgaaacatgaattcggcaataataaaacggggtagcgcacgagacctaaaagtggatggatgtggagacaaaggatttagacaggttcaggccctctcaatgagaggtaataccctactcctgtttggggatttgaatccgccgagtgtgtattgatctgacgatcaggttgtctcatgccccctagagggcctcctgcccaccttatatagggtggggggcaggattacaagatagaaaccttaaccaatacggtatcggtttcctaaatctactttacaatattatcaaaccaggactttaggctgttccgtaatatataaggaaacgtaatacccgagtcatgatctattacatattccatagatataagttatcccctatgactagtcggataaccatgccatatgggtatggggtacccataatatccacagtagcccctgagaccttcgcagtcgaaaagataatcttctctcgaaccagattactccaaagccgagtgcttcaatcatctttgtcatggtctcccgagtacttttaccaaatctgaagactgtggagggctggaaaataaagtcaggtgcaccgactagatgcacctaataggtgtagcccccgacaatgtggttaattgaacaaaccaggcatatagtcaaggaataaataatccaaccaaccgagtggttttgataatcgtaatcaaccaagtgacttgatatcaatatatagcatatgcggtgtgaaacctccaaataacatgatccgagtgatataccaactgctttgtaaaatatgatgagtgatatagcaaaatagctataaagaagcttgtatattgtgaataaagaaatttccaaagtattgggcatacgccatgcgcacactgctttaacagatgtgcttaagtccctagaagacacatggtttcaccatacctggaaatatatggcatatgtggtgtaaaatccgagtaaataaactcataaaggatttaccaaccgcctagaaaatgacaacaatatataatcagcctaagccataatattggtcaataaaaatgcacacttacgtggcgaaaagcaatgatattgtatccaatcaattgcttgataaacccaaacagcaccttgactatataaaaaagtcagcggggcagctatataaagctttactgtttgacaccttttaagatgcattgtaccaactcctaaaaagttgagtaactgcggtataaaaggattttaaggtattgggcacttgatcacgcgcactttggcctaagcgaaaagtgcctaagtccctaaaagaacgtgacaggccacacctgaaaatatgggctgcagacatattaggcctaggccaaaaaatatgccttcgacaccctttaaaggatgacgcatgtaacatgctcctgagtaataaatcttccgggtaatatagaccaggtgtagctcatatgaacagtttctgatctgagtgattatcccttaggagatactccaaaatatatataataattgaatcccgactggcgcaagtattcggttgatagcccttacggggaataataattggtccagtctttgagcatagaaaatagacccatgatcatgaattcatgttgcatatatccggagcaagtccaaattgaagatataatacttgtatttgagctagtaagcccctgagcatgtagtcacaattgttcattgatggtagctgacgcagttggcatagagacaagacgaccaatatagagataatattgcccaacagaggtggcaaaaatattggtggtagtgaagatagtgataccaatcaaaagtgatgaagttgcacagccgtggaggcgaagaaaccagtcggcaacagtcaggtcagccatcaatgaagatgaaggcgcccagcgataaagttgtgtagccatggcagcgaaataatcagtcggtgacagacgaggcagatcaaaggcgatgacgaaatccaccaatcatgaagatgaggaaaatagtcggcgacgacaaacgtaaccgacagcaatgatgataagcatcaacagagatgatcaaatatgatgacgaagttgcctatcaatagcagtagagtaagctatgataaagaggtttgacaggatgttgatgaagatgacgatgtcggtgatccagtcaatagcggtgtaatagccgatgataatgacgaagacgctcatcagcgtttgcatagtaggtcaaccgtgaaggcggaatagcaagttggcaaagtcttagtcatccattagcaacggcggaatgtcagagctgatgaagcagatgtgctggtgatgatgtcagtgacaataatccatcaaactgttgtagatgcttcacttggaggaaagtatatgctgttgttcaactcattgaatctgatatgagttgattggttgatgactccaaactcccagacatgtaaatttaatcttgacctactgctctgaagcgaagacaaaattgatgactcccagagttgacttgttggctgattaattgattgcttcagcttgacataaaatttgtcaaattttgagccttatatttgtgtagcccccgactctttggttagttgggaaacaactgaacatagagtcgagaattatagcttcttgtcgtcgagtagtcattgcttgattgaagatatgtgttgaagatgtccaagtagaaatcctgaatattggagagccacttgttgtagtaaaataacacggcatcgcatgccgagatatcgagattcacaacaacgtcatggttggtgatgtagcaaaacttgcgaagtagcagcaatagagtttgccagtgccgaagataataaagatgaagtcgctctaccatgatgacaaagttgcattgccgtgatgaagtgaacacgagtcgtcggcaacagaagcaaactggtagtgaagacgcgcagttgtgaagataaaaacaccagtcgacggcggcataaccagtcggcgacggaagatgatgatgtccatcagtagtggtagcggtataaaccagacgtagaggcgagggcactagtcaacagcagacgagatgaccggcggtgaagaagataaggccaatcaacactggtagaatcatgcagccatggaagtgcagaaaccagtcggcagccatggcaaacgtaggcagcttgtgttgaagatactgatgcctattagtagtgacagcaatgtagccagccgtgaagaagatagcatcagttggcgttataacaggccagccgtgcaggcggaaacaccagtcgggggcggacgaggcggccggtcggtgaagacgtagacgcccaacaacggcggcataaaggccagccgtgcaggcggaaacaccagtcggcggcggcgaaggcaaaccggtcggtgaagacgtagacgcccaacaacggcggcataaaggccagccgtgcaggcggaaacaccagtcggcggcggcgaaggcaagccggtcggtgaagacgtagaggcccaacaacggcggcataaaggccagccgtgcaggcggaaacaccagtcggcggcggtcgaggcgagccggtggtgatgttctgactgatccattcctggagcgtaagagataagcttaaagccatgaatcccttttatgcatatctggatctggatcctgtagaacaaacatataggatgagtagtatctgatataaatataatactcgagaaaaaaatcaagtattttaaaatatttataaatatgtatttctcctcttgtcaattttgatttccccgagcagatgtttcattacgtttaaacgctctgcccaactagtcatagccaccaagcactgggagtcggcctaagcacttcccaagcatgcatatgagtgacatgagttcgtcattaatggaacaaagtttcacggatcggagtttactactcgggtacttttgcaattattaagagcagaaaataaatttatctcatctctatgcttttgatttattccgaataatacttagcaccttgcgttactcggtccatccaacgagcccccgggtgctaggaatcggcccaaaggcaaccatccattggcaaaccaaacggaaagcataggaagatagaactccataactcgataggtacttttgtactcagattatgtcgcaagcaatcaagataaatattataaaaaatatgatataacatctgtagcccccgactcactactcaatggaagaccaattggtgtagtgaggcagaggaaaaggaaaaatatcatataaagaataaaataaatgatgacttagctttgtaatattccccttggtgatggcggaagtggccaatgtgggaacaaagtcgtccatcaataacaatgaagacaccagtcggcggcgacgaaggcggtcgacggtgaaagcgaagatgcccactaatggcggcataataggtcagccgtgtaagcggaaacaccagtcgacggcagcgaaggtgagccaacggtgaggatgtagacatccaacaacggcggcataataggccagccgtgtaggcggaggcaccactcggcggcgacggaggcaagccggcggtgaagtcgtagacgcccaacagcggcggcataataggccagccgtgtaggcgga

SEQ ID NO: 13997 - DNA, 1005 bp, Oryza sativa
acatgtcgatgagcccgacgggcgcgaacggaccacgaagagggaggtgacgctggcgatgcggaagcggcacatcttcccgggcaccacggcgaacaccgccggcgcgcagtccgggtgcgccatgttgcgcgacgccgccaccgtcgctggcaaggacgagcagttcatgaaccggctgcgcccgttaatgagcagcgactgcggctcgccaacccagaccatgggcacggaggcgagccccgccgcctgctcatacgtgctccggtgccaccagtcgttgagcagcacggtgtgctgggcagcctcaacggcgatcatgcctttgagacccgccgagcgctacatccgtagtgggcgtggtacatgtacgtcccgggacggtcgacgatgaaggtgtaggtgaaggtgtcgccagggaggatggggcactgggtgacgccctgtcacgcccagaaattcccgaatagaattccaagcagaatgtgcattaaaatccccgtccaggaccggccggggtacacaaacgacaatgttgacattcagatccacgtcttacaaacatcataaaagtcttacataaatgcagcgaaaaaaatgaaagacaacaggagctaagccttgactagaactgcagcgggaacaccactccacaggcatcctcgacggcacggacgaagcctactcctcagagaaacctccatctgacacacactcgtactctggggttgggaaaaaaagagcaagactgagtactacccactgtacttagcaagttataccggaataggggtatgatgcagggaattatcaaaggagagctagagtggttcatttgcataaagcgagcatttataaacagaagttggaagatttaaaccgttgtaataattaatcaatattaatcatccactgtccaacgctatgccacgttgcgacaggcccaaccatccacctatactatccaaattctaaagattacactagggtgagactaatcacggt

SEQ ID NO: 13998 - DNA, 11263 bp, Oryza sativa
gagcgcgagggggcgcggcagtggcgcgcgcgacagcggcgacgtgacggcgcgcggcggctcgaggcgcgaggcgcgcgcgggagggaagatgggacgggcgcgcggcggggcaggggcgcggggcaggaggcgacgatgtgacggcgacgacgatggcgcgcggggctcaaggcggcgacggcgacggcgcggcggcgacggcgacggctcgacggcgacggcgatggcgcgcggcgcggggcgcgagctggcgcgcggcagcggcgcgggcgacgacgatggcgacacgagcggcatcgggcaggagaaggaggagggctaggacggctaggaactaaatcgaacacctagggggctaatgaacagtgctagccggctatttaaccctattttagcctatttcctatataaattttattctataaatcctaatttttacacaaatgaagtttactcaatatttgtgttattctaaccaatggattcaccctagattaatattacccatatttatttatttatcgcacaaatgaattctttttagattaatttgagttattggccctaaggtgaacttatatatttttgaagactttggggtactattaaatttaatataacgacttgtcatgattaatacattagcagattggttaagtttagttgtatagcaatatattttacacggataggttcaatctatttattctataaatagtaaattgagactcggcacaatattaatctaattatttaattaaaacctcacaaaattttataaagcttaatttaattatacgaccattatttcatgtgaattggtttagctttatatagaccattagagtttagtaatatcccattaattactcctagtgaaactatgtcatagatagagttccattataaatggtcatcatttcatgtgtatttagacgtcatgacacgcaacacatggttcacgtatttagtatttaatccataatttaaattagtaattaactttccatttgtctggctttgttttcttgtgcgtaattatttgtagggttaacaatattatattctcgtaaatttatctattacttaaattttagatccttactttactttctttgtgatcatttacggtttggcaagcaatagcaatcataacaaccagcatgatgcaaaagttttaaaaagttcaaaattttagtgatttttattgtctttgaattttcaggatgttacaggggtggcggtggaaaaggagctgaccttgttgcttgacaatctcattagaggaagctcgccggagggaggaagagggagctcggtagagagaggccttcgccatcgtcatcaccagaggagcaccgctccactgtgtgccttctttttcattggagggagctcaccggaggagggggcttgccgaaggatgtggagtgacctcgccggagggttgttgtcattgcagccgccgttgtcgctcgcggtcgagagaaaaaggaaggtgcgagacagagagagagagatagagagagagagagagagttgggctgggctgctgggcttgcccattagaccaacccactggtacgggggctatggccatgtgtcgcatctatgagatgtgctttgccaatgatctacacgatgagatcgagaatgatgataccacaaagtgtatcaggttgcatcggacattgggatgctcttgctcgagcggtcaactagtgatacgaggaagatgagtgacgtggcaatatcaagtccatttgaaagaaatgacggttatgattggctcaaactagaaaaatgcccatgcgttgtaacgggaaagtcattttttcagcgatacaacaactattagaagccgagcaataaattgaaatattgggatcaatatacattagaattgaaacatttaataaaaatcctaaaactgggattgctatacattacaattaaaaaagttaataagaattcatccttggttttggaccgaaaacccattcaatgtttccttttcagccctaagccaaacctttacctccctttgctcggcctgcctcccttccgcccatctcacaagtggagttgcaggtccaacttgcacagccgacaaccgtcttcaacctctcgaacatggtcccatgcccgtatgatgccaaagcagatcttccccatcaaatccggtcgaacatttctcgatctccaaaaattggttgagggcttttgatcccttcgatatcctctttccgttcttcccaaaatcagagtgtaaaacttgagataaaaacgatcgaggaagatcgcccatcgatcatcatcgcgactgttaaaatgaagattaaatccagtgaattaaaactgaatcgaaaggggaaatcatttagaaaatgatgagggacgaatggggaatcgatttttataatcaattggaggaggaaatgcacgattgacatgacggcggtgcggcactagggttcggcccgtggaaggcgcggggttcaacaaatcggatcggatctaaaaacagaaaacacccaaaaaccacacataattactaaaaattatcattaaaataaaattaaattccaataaaaagctttagagcgtgcgcacaaaagaaactctttcgcgtgtaaaaaaatgataggaaaaaataccggcgccataaaaaaaccgaacagacaaaaataaacataaagctttgcgtatttttttattaggtatatataaaaaccaagtaattagctgtttaattaaattaaatgtaaatgccttacagcttatggctggtgaaaatttcgaaatcgaaggacacgcataaggaatcatctatactaatataaaaaggaggagttgcaccctccaatcctacgtctccaatcctacgtgtgaaatcatccggatcaatcctaccgtccatccgcacacacgatttcactaccgcccgatttactgtcgcgaagactactctccatccacgcgcgattgcgcgaagacatcgctcctcctctctcgctcactcctcgctcctctgtactgtatccgaggtccccttccgccgccgccggatcctaccatccgccgtggccagctccatacgctgcggccggcgctcctcctcctcactccggattactgccgccacgcatcctcctctctccggattactgccgccgcatcctcgccggagccgcttcttctccgtccgccgccggagcaggtcccattccgccgccgttggatcctaccatccgtcgcggccggccccatccctcatgtgcgacgagccgtaatccgccgccgccttctccctcttctccaccgcttgccctaccccgccgctgccgcctcctcacgcgctcgcctcccctgtactcgcaccgcgggcgtgagaggccggagagacgaggtcgccgtcggccacctctaccgctgtcgccgccttctccctctctaccgctcgccctacctcgcctcctcgcgtactcgcgccgcgggtgtgagaggcagatcgccgtcggatgcctccaccgccgccttctccctataccccgtgctcctcaatcctctatagcaagtcctcgatccgcgcctcctcggatcctccgcggcaagccggcaatccccacacccctgccacttttgtcgccgtcgtcaacatcctctctgcccgagcccgaagcctcagatctacgctcatgccgccgccgtcattgtgtgactccctgccatggaattgtggccacgccacctcggcgctgttgtccataccctctccgcctgagcccgaagcccgggatacacgacctgaggtcagcgtgcacttctgcctctgtagccgagcctggcgtggtgctgactctgggagaagacatctagtgtagatggctcgacctcttgctgcggcctctgtccagtgcccgatgccaggtacccagcagccagcaacctgcggccggtatctttgcaccgtgcgactgattttgtacaactattggaaatctttacttttggttttggtttggtccggcatgattcaagatgtatgtttctgctctcattcttgtgtttatgtgttttggtgcagttgcaggctggaatgtggatcgaccacatcgtgatgattgggagcattcccaaggacagattggtattggtttcgaactccttggggttcaaatcatgttggtgatattccacgttgttattttgctttgtaatatagtatccagctggacatgttttggccagctatggaagaatacatcaaataaatatcaaatgctctctattttgtctgtacatggagtaagtggttcttttgatgcttcaatgattcattttgttaccttcaattttaaaaggaggaatgcctataagtaaaggcatcagattcaatcccaaagttggtccttttgcttcgaaaggtaactagcataatttcttccaaaggtaactagcataatttcttccaatcctttaactggaacattaatcttttctattcatgaactggatgcccatgagtcagtacttgggttgatacatacgtacatacatacatacaattgctgtaaatatagctttttatctgaatatatagtgaagtataaaatttcactatcctggtgatctttttactctacaattgctgtaaaagcctggacatcccacttttcaccgagtatttctgtacaattctgttggagagagtacaactgcaggtctaattctgtgtgctaaaaaggtagattttgatttaaccaaattttggcttgatctatgaatatatagtaaaataaaaggatcattttttttcttcaggaaagtaaggatgtaaaatcaaggaggccagctgttccattttgcttttgaacagctcacccaacttgcacttgatgcaacgattcgattttgctgctaaaagacatgttcaattgaatatattttcattctagagctgcaagtacatattcaattaaatgtcattttcttttcattttgctgctagaaagccaggttcaattgaataccctatctaatcaaattttctatttgttcagatgtctgtacctattaactccgaaatgaacatggtaggatggtttaggtttggagactattttttgttcaagacttcatgtacctattaacgtttgcagcaacaaccgtattttctgatttaggccaaaacaaccgtattttctgatttaaacagaaaagcttattttctttgatttaaacagagaacccagtaagaaatcatgcacatgcaaaattacaggccaaaatacccatattctcctatatatttaaatacaactagaaatattggcgcgctacgctgcgcccggttgacgttcccattgactttgaaggaatacccattataagtaatgggtccgacaaatgtctgaatgtcattcacccgaatcacatcgatcgcacaagaacataaacatgtttgcttcggcatgtaatggttgaagtaggatagaagaacttctacgaaatatctttacacaaagtggtgtctgaaatcaatgtcaacttgcaattacgttggtattagaattaggcagaattaactaatgtatggagagctcccatgtttggccatggccaggacaccataaaaacaaaaggtaaatatttgctctattatccttccaatcgtgccaatatcattcagcaaggcatcacctatcatacaattcgatagaacatataccggtgttaccacactaatagattgaggatagtatcaatggagaaaagggaaagatgcaatgcagtgactgattccgtaaagatgggtaaggtaaggtacatataaacagagaagatgttgacctagtgaataaagcaccaattattagtgcagtcaacaggagagaaataactcaacaaataaatgaattaatcagtgactaaatatagcagtttctttgtgtaagtcaaaactaaaacctatggatatgctatataacttatctatacaaagattaaatcatatgtaatcatgtaaggacttcacttgtcaaatgtcaatgcttagctaagttaatgtggcataaagatgtaaccaccatttgagagcatgaatacaacacaatagaacttgattacacatgctatttgggagctttgctcaacaactgattactaccaaatggttaaattctttatttgtagtgcagtttggaataaactaatattaatatgaatatataatatggacatgtaactttataaagggttgaataaatatgtttcaggttataacagaatcctgaaatgcaataaaggtaactgagttttagtcaagcaaatatttagagtgaatttattttatttgaacactacaataaaaaatgtgtgtggtaagaaatatctacaactactgcttcaattggttgtgaccaaagcactgttgaagatgaattcagactttatgaattattgcatgtaaaggaattaagaccccattttatatgggcaaccaacgtatctgaagaatacggtacatgcaaattgcgggtttaagtaagtatgttctctgaagtgatgtactagttgtaagccttagttctggcaattaactgttaactgatcttgtcaagtaacaacaactttatagctaagttaatgaccatgtaggtaagcctaattacccacaagccatgtctaactgtactaatgcctatctttttactatttaggtcaaatgaaacacgccaattttggacatttgttatgagtccacatttttcctaccagcaggaaagaatgctgaaatgactgttgttgtttcatacagatgctgtaaaaaaagagtaagaaactataaccagaaatgtgataaattgacattaaagaatgctaagtataaccagaagaacatgagaacctaacactgttagatttgtgctgcagcagaacttgcttcagcgactgatacttgttgaatacatcaatgaggtttgacaaaaagaaattgcagttaggagcaactgcagagaaaaagcattgcagtcaacctaaaacttagtgccactgattgggataccacagttatagcgcgctcactggcaatgctctggccaatatgaaatgaagatgtaattatgagaaatcagttctgataaattgaaaattactttgtcaaatcctaaatcattgtacattgctctagaagaagaatgcacttctatgaacagttgctgaaggcgcttgtttgaatgaaacattgtgttgaatcctctcaaaagtgaaaatttttctctattatgttaatgtaagataataattgacctaagaaaaatggttaacttaaattaataagcaacggactaactgagctttcaacgcattatctccatcatggattaatgataaatagttcatttaaatgtgcccatcttgtagagaaaaaggataggcaaacaatcttgttatgaataagcacaaaccaaggacagtaatgagcatatacaaagaaaagcaattagaaaatctattatcttctacactgctattgggaagcaaaattcaatgtatatagtttagagtttacttaactttgtgcagaattggctacttgtgtagatcatgtgctcgagaagatggcgatctgagtctgtctgcatcctattttctctaacaaaaggaaatagtgtatgagaagctagaaccaaatgtattccatgccaaactaaacaatggagggggaagcagatctcactaaaagatatggctaattgagacagaaaaaagcaggaaacgcgaacacactatagaatcattgatttgaatattatacctgattaccagagcagttaccataccagaaaaggcaaggcagtgatgtattcagcagttacaactgcaattaagaataaaatcatgcacacacaaattagcatagtaaacatagaacattaaagataactaacaaagagatagaataggatgccaacaaaagtaggatgggtgagggtagcatacgaccaaaacagaacaaagacctaatcagcatggcacaagcagaagggagagaagccccactcgtactgacctatggtcctctcgcataatagcagccatggctgttgcttcacctcagattgtgaggctaggtccccgtgccgtgatgcagaccctggtcgtggctattggtcaaagatgcgaggatagcgtccaggaaggtacctaagggtggaggaggtgaggattaccatggtcaccaatggaagaaaggatttctagtgaggagggaggggaaaatcatatcagcggcacaccatattgtggattttggaggaggcgaaggctagatgagagaggtcggatggaaatagggattggagcgatgggatcggaggtaatctagaaggctttcattggatcaccttcgcagataaagtggaggccctagggcctcccgaccgagcacatgcggccgaccaaactgttgaggcaagtagctccgatgggaaggcaatgcgcagccgaacggtgaaggaaaccctggggaagaagaaaaaaaagggagaaatcactggattagactgctactcagcaggaagaaagaggaaaaagaaaggaggagaaatcgccggcgacctcaccaagaaaaccgaagaggagagaatggggagaggagggatgtgcgcagcagccgagaagagacttcaccaagcatcctccactaccacgtacggcggcaggagacggtggccaatccggcgtgcgctgtacacggcaagcggtgtttctagcgccgctccgtgtggaacagaagcacggaaacacggaaacagaacgtgggctgagcaatgagaaagggaaaagcccatgtgcaaggaagggccggcacaggaaaatggcccaatagaaacgcatctaatcctgtgctactaaaaccaattaaaacataatctaatatatcgctgcgcactatcgctgctaattgctaaatgcatatgcgcgttaattatccgaaccaaactgatgacgtggcgcccctaaccttccaaagatcccatggggtttaagtaatctaatataagccagttagaaaccatgaatatgcagtagtaatgtcatgtgataaattcgttgtgggggtaagaatgagtctttccaattggtaatttgtgacctttcacgaatcacgatggtttatattccaatctgctagaacatggtgccactcatatttttacatgatctgggttagaaaattttcccctttgtagttcaatatatgttgagtgcaacctaaatactttttattggaaacaacatggaagaacagttgtgcagatttataattacttcaggcacatatttgttttaatggtctgctggtgctgggtgtatgtattaattattattacctgatgcgtgtatattgttgacctacaggattaaaatttgcgtggactacaaaggcggtaagttcatcttaaccgcttatctctatagtgtgtatcatgctcacttgcagaggtgcttccataaggagcataatacttcagcatattaatgttttcaggctttgtcaattgctcttcctgttgctacacacttcaacagtgttttaatatggtcaatggtcatggctatgctactgttcggagtcacctatgtgattatgaggtttcataaagtttcataaattatttgtgattcaacgcaacaaggtatcgttgtcattaacaggaactcaacttttcctttcatttttgtagaacatcgtcatcttccaagggctataagcattaggaatcttctaaacatgattggtttgggcaaatgaaaaatacaaaattggactcagaggtattgcctccaaatagttgttactacttttaactaggtatgcaaaaccaagttatgaagtcttctaagctttcctgtatatatgttactgttgtgccaatttatgcttgttagggaatcttagaaaactaaactatgtagttatgcccaaatgcttgtagtgcctaatcagcttagatggtcatgtacttgatcttgaacatctacactttctcagacaaccaattttacttttttttttgctttttaatggttgacacaattagccattacggtaagcaatccatccatgatcccagagtgccttatcctttcccatgctatcatcctcgatttattctactgctaactgcccttcgacatgttattggtgatggacttgctatagaagtacattggtgatgaagtgatgaaccagggggctaaaatccaagttgtgatgtgacgatgaatcaacgatgggaattggacaagaacccaagcaggcaagtaggatatgaaagtgatgcaagtaattatgatagcaatcatgtccgatcaggcttctcaatataatccttttaggaaagggatgagattagcagcattttttttactcttttgattgagattttgctgccacaaacaacaattcctaatattgaattgtgccaccacatgctttggatgattctaaaggaatatttggccatgtttttttacacttaggaaaagagaaatattgtttcaaatggattatattgtattaactccatctaagaatataagggattttgcccatgtcatttgaagaaccgtgggataatagatccggcattaaggaatttatccttaaatttatctccatgatattctcgtgaacttctgcatcttgtctcacaaaatgaggttgtaatagacatctctcaattattttttaatctttctggcgtgttgaaatgaatgaattggaaaacatgaaagtgaaaatgaaactcaatttatccttttagatggaaacagaaacaaccaatttcacgtggctctcgagaatatattttgatacaattgagaaattttgcattgaaagaatgtaaattgtgaaaacgtgcattgcacgtgcacgattactagatatatcttgacaattgagaaattttgcattgaaagaatgtaaattgtgaaaacgtgcattgcacgtgcacgattactagtagtggtaagtggcagactgcctgatttggtggcagcagtttgacagtgggtgctttttatttggcgggtactccagctaaggccatgtttagtttctaaaacaaaaattttcatcttgtcacattaaatatttggacacatatataaagtattaaatatataaaaaaccaattatacagttcatcaggaaattgcaagacgaatcttttaagtctaattg

SEQ ID NO: 13999 - DNA, 1139 bp, Oryza sativa
gcggcgacggaggcaggccgcgggtgaagtcgtagacgcccaacagcggcggcataataggccagccgtgtaggcggagacaccaatcggcggcgacggaggcaggccggtggtgaagacgtggacgcccatgaacggtggtgtgaccaaccaaccgtataggcgaggacaccagtcggcggcgacggaggcaggccggtggtgaagacgtagacgcccaacagcagcggcataataggccagccgtgtaggcggaggcaccactcggcggcgacggaggcaggccggcggtgaagtcgtagacgcccaacagcggcggcataataggccagccgtgtaggcggaggcaccactcggcggcgacggaggcaggccggcggtgaagtcgttgttgctatcagcaatggcggtggcgaggacaagccggcggagtggactcgcggccgatcgaccggaaagctgagacgcctcgagtccatgaccagcatcaatcgcctcaatagtgccgcgtagttatatgcgaacaacaacaaaaaatagcaagaaattaatctgagattaaaaatcaatatgataaataatgataaaaatcagattgagtttccccctgactgatttggatcaagtcagagaagaggagcttgaagaagtggtcgacggaaaggaagtgaaaactcccaaagcgaaagcgaagtcggcgactcatgaaattgattccatcgcgctcgttgataggaaactcgacgcaccccctacctggcgcgccaactgtcgaaacatgaattcggcaataataaaacggggtagcgcacgagacctaaaagtggatggatgtggagacaaaggatttagacaggttcaggccctctcaatgagaggtaataccctactcctgtttggggatttgaatccgccgagtgtgtattgatctgacgatcaggttgtctcatgccccctagagggcctcctgcccaccttatatagggtggggggcaggattacaagatagaaaccttaaccaatacggtatcggtttcctaaatctactttacaatattatcaaaccaggactttaggctgttccgtaatatataaggaaacgtaatacccgagtcatgatttattacatattccataga

SEQ ID NO: 14000 - DNA, 725 bp, Oryza sativa
ggaaataccagtcggcggcggtcgaggcggccggtcggtgaagatgtagacgcccaacaatggcggtcataataggccagccgtgcaggcgaggacaccagtcggcggcggcgaaggcaagccggtcggtgaagacgtagacgcccaacaacggcggcataaaggccagccgtgcaggcggaaacaccagtcggcggcggacgaggcggccggtcggtgaagacgtagacgcccaacaacggcggcataaaggccagccgtgcaggcggaaacaccagtcggcggcggcgaaggcaaaccggtcggtgaagacgtagacgcccaacaacggcggcataaaggccagccgtgcaggcggaaacaccagtcggcggcggcgaaggcaagccggtcggtgaagacgtagaggcccaacaacggcggcataaaggccagccgtgcaggcggaaacaccagtcggcggcggtcgaggcgagccggtggtgatgttctgactgatccattcctggagcgtaagagataagcttaaagccatgaatcccttttatgcatatctggatctggatcctgtagaacaaacatataggatgagtagtatctgatataaatataatactcgagaaaaaaatcaagtattttaaaatatttataaatatgtatttctcctcttgtcaattttgatttccccgagcagatgtttcataacgtttaagggctgcaggaat

SEQ ID NO: 14001 - DNA, 637 bp, Oryza sativa
tgtactaataaatactgtgaatggttccctatgtggtatgagatgcttaagcattagataagttgaattccatctaacatccatgtccaaaccaaacatacgaggacgataacccgcagcaatgcaaacatttttatatgtagcaatgcgctgattagatgcattcaagaatgaaatggcagctctaatgtatttagcatgggcttgaacttgtcaagtccagccttaacaatcaaattgatgatatgacatgcacagcgttgtgcaaaaataaatcaccaatataaccaaacagagcaggagtaagggtgatcatagctttagaattagcagaagcattgtctaatgtaatagagaaaaccttatcagtaataccatattcttcagcaacagcaatcacacgctcagcaatattagcaccagtatgtgactcatcaataagcctaagacccaagaccctcttttctaattgccaatcagaattaacaaagtgagctacaacactcaaataatcttccttagcatgaccagaccatatatcagatgtcaaagcaatagagctagcagaattgagacgatcaataataacagaacgacgatccttaaacaacttataaaaatctctggtagtagtttg

SEQ ID NO: 14002 - DNA, 1968 bp, Oryza sativa
acgaaggaataaggggtaaacaataatcaaggcatggcataatcacaagtaggatgtttatcattgcatgcaattttatttgtaaacaaaacaatttcgcaattgggatcaacatgttcaaagaatagtgatgacttgccttgctcaggataatccttattattgatataatcttgatcaaccttcacctcctggaagttgcagacgttgcctcacgactaaccgatgcacaaggtctataatacgcaagaaaaaccaatattcaaataacaaccaaatatgcacaacaaaatatactattcatgtctactaatggattccaatcacgctaggggctaaggtttcttaatctttctattgtcaacgtggcctatttaggagttaaccaacatagcatttataggatacatatatatttggctaatcggtggtttagtctatcaaatggctatggaaggattatggctaagcatgcatctatctacataggacggttatttactagaggttctgttgttagatggatttaggatcaatcaaataattacagtgaatcatttgtattatttattttatttatggaagctttactttaattatgaacatattttacttgtcacaataaattataaaaggttaataattatccatgctttgtatgttagagttgtttaggttaatcatattatggttacagattatcctatcacataattttacaatgaataatcctaatttacagttgaactataattataattatatgaggtcaagatttataactagtatttatctaatatacatgtttgtcatacactccctcttaatttaatatatgcaacacgcaaattaatactataccgtaccactataatgggatgtatagtatatgtgtaagcaacaatatcttattattggatcatatatttgagtagttgctttttactgtaagctatacaatacatgttgattttaagatggctctgtttggttaactaatggatatcaaccgactatatacatatattctacttcacatgacattgtatcgacaaacttttaagtggtccaaatacaactagctctgtgattactctcctaaacaagttaaagattcatctatgtgtgtttatattttagttacaaaatatgaggctaaactttatgtaaacaatttataagtcatggatttagttatatttggacatagactagtaaatggcactaatattttcctatacacccattaatttgaaggattgattataactaatttatttagttgctacagtgacaagacatgttaaagataattatgctactgtacaatatccatttttattcattggcacactatttaggttaactattatctaatcatttgatattaattaatttataattataaatatattttgttaaatagtgaattatatatcattggaaagcttatgaatttagatgaatttaggttcaagtttcacttaaatccgagttaaaatgaataagttatgctagtgtaaagattcaaatttgaattaatccgagaaattgcgaaaagctactgttcataaacgatttatttttaatccaagacatatccacagccttgtaccaactgacaagtgggaccccgggtttatttctttttcctaccgaattattttctaaagggaaataggaagagctaatgacaagtggggcccacatgtcatagactcgagaccataaaacttctataattagatttttaaccacccggacccacatgtaatagacactactaataaagattaagaagagggttactattcaccaattacgtggggcccactaatctctcctctccttcctctctctttcttcttttctctctttctctccctcccggcttcttctccctcctctctccctcggctctctggcgacggcgaccgaacaaggggaggaggcgggcggcttactgac

SEQ ID NO: 14003 - DNA, 814 bp, Oryza sativa
ccaacaacggcggcataataggccagccgtgtaggcggaggcaccactcggcggcgacggaggcacgccggcggtgaagtcgtagacgcccaacagcggcggcataataggccagccgtgtaggcggaggcaccactcggcggcgacggaagcaagccggcggtgaagtcgtagacgcccaacagcggcggcataataggccagccgtgcaggcggaggcaccactcggcggcgacggaggcaggccggcggtgaagtcgtagacgcccaacagcggcggcataataggccagccgtgtaggcggaggcaccactcggcggccacggaggcaggccggcggtgaagtcgtagatgcccaacagcggcggcataataggccagccgtgtaggcggaggcaccactcggcggcggcgaaggcaggccggtcggtgaagacgtagacgcccaacaacggcggcataaaggccagccgtgcaggcggaaacaccggtcggcggcggcgaaggcaagccggttggtgaagacgtagacgcccaacagcggcggcataataggccagccgtgtagacggaggcaccaatcggcggcgacggaggcaggccggcggtgaagacgtagacgcccaacagcagcggcataataggccagccgtgtaggcggaggcaccactcggcggcgacggaggcaagccggcggtgaagtcgtagacgcccaacagcggcggcataataggccagccgtgtagacggaggcaccaatcggcggcgacggaggcaggccggcggtgaagacgtagacgcccaacagcagcg

SEQ ID NO: 14004 - DNA, 4522 bp, Oryza sativa
aggtccgccacggccacctcctccactagccacctagcaccttcgctggccgatgccgacacgcctcctcgcgtgcgcctccattggccatcgggtcctctttgcccgccagccgcagccttcggcccgtcgcgcctcccgcctccaccgggctgccgttgcagcgagcaccgccgctgtcggggtcggggtcgaccattcctagccatcggccaccaggggtggggggggggcgcagatccactccctagggggagcggatccatcgccccgccccgtcgaccgccacggccaccgcctctcgaccggcgcacgccgcttcgcctcccacaccaaggaggagctccaccgtcggcttgctctccccgtcgccgccttctcggccggctgcgcggttttcggcgatgagctccagcggtggctaggcggctagtggggagggaaggtggcggcacgagcagctagggttttgccccccgagccgcttgcgtgagagcggcacgaggacgagtttggttgttatcctccctaagactggatatgagatattataatacaatgaatttagataggagcctatccaaatacgttgtactatgatatatcacatccagtcttaagtttgttttttgtgggacggagagagtactcccttagcaaattctagcttgtgtaaagtatgagtaaatggtttggataatgattgccgtaccgttactagagtatactcccttagcaatttcttattattccattgtcataataaaccttattattagttattaataaagtgaaagatcggcaatgtcaaaaatgtcaaattttaataatgtcaaaaatgtaaatgtagtgtttggtttgatttcttaccaattgctggtgtgttttgttagtggaagattccgaaattaccaaattttggtagagtttggtaagatcacaatggtaaaatcttgtttaatttgttaacgtactaaaatttgataatgccaaaaatcgataaggtttgttttggcattgaagtgaacaagctctcaatatagtatataaaatatattctcctgttctaaaatatagtaaatttctaaaacattctaaatttagcctaaaacgtagtagtaacagcttcgctacatattttcttatctcaacgagtatagattctttagagcaagtttaatatcatctactcatcatcacaaagttcgtgtgtttcattccactccaagctcctgagagtactagatttgcgcgaaagccaaattacggagctccctcaatcggttggtaaaaatgaaacatttgatatttctacaaacgctaagggtacaattgtataaagaaaacatatcctatccacacaagccttcgcatacacataccgtgcacaccaactaacaaatatcaaaaaaatatagaaaatttttatatatatactttggtagtattatatttatatgtaaagttttaccttcaaattcattatacatatgaagaaaaaaacaaaattatgatagatttatactcttaaaactatcagaatttttatactttttacagctaaaatataataaatttgaggataagactttatatataagtgaaatatatgaaaagtaaatatataaattttttttctatttttttatatttattagttggcgtgtatacgaaaagcttaaaactatcagaatttttatactttttacagctaaaatataataaatttgaggataagactttatatataagtgaaatatatgaaaagtaaatatataatttttttttctattttttttatatttattagttggcgtgtatacgaaaagcttgtatgtatagagtatgttccccttaataaaatgtgaaatggttgaaagtccgccattcgcttgtagggctggaaatcgaccagagacgaggctgtgtatcacaacccaggcacaaaaaaaaaatcatgtctgactaagctccaggctgtgttaggcggtaagggatggggactaattcctcccaaacgaaaaacggagcggtccattagcgcatgattaattaagtattagattttttttttgaaaaatcgatcaatatgttttttaagcaacttttgtatagattttttttttcaaaaaacataccatttaaccgtttgaaaagcgtgcgtgtggaaaaagaattatgtgggtcgcaactttaggtgccgaaggcagacttagtgcctgaattttgtacacaacttgtccattctctcaaggcggccgaactgtaaaaatgtgcttcatttttatacgtcagctgcactccagttacattgttaagggtcaagtgatggccagttacatacttacatattgtcaattgtgcactcattgaaccaccacaaaaaaaaattgcacactaattacatttccaatctttccctgcatatttttttactatagttctcactcctacagagctacagacactgacaatcaactcctgtctatatagacataaaaattagaataaaatatctgttcattgactataatctccgactcactagataaaccattcaaggacaatgcatgatgggaacaaattgagtagaggataacttcagcataatcagatgaacttgcaactcaccaggactttttttttgtttaattgatcaacagaagttgcatagttatctgtcacgagattacgatgtttgggatatgacagatcttgaaccaatccttgcctgtatctttcctgcagttttcgttcaactcagagctacaggcagtgacagttaactcctccagagcagtcaaatgttgcaaaccttttgggatcgagaccaactttgggcagcaacttatttgaagagattcaagtgctacaagatcaccaatccattctggaagcgcgtccaattcagtgcaattgctgatcttcagctttcgcagagtggtaaggtacctgatgggttctgcaagaacacgtagcatttcgcagtattcgatggttagttcctcaagttttggcctgtgctgcaacaatttccactcactggatgatacatcggactttctgatccacaatctcctcagaagtgatgcggatgtggaagatgatgatccaaacatcttcctgactgacaatatctcgctgctgtcggagattgacaaatctgttatagcatctggaaggcatggtttcggcctgagctttgggcatcctgttgcggttacagttttaagaacaggaaacatggatccttctggctgagtagctctgtcatctgtcgctgctgaagttggccaggtctctaggttaggcatgtcttcaaaatggagttccttcagtgactggtacagcacacatttctgtcttttcacaagaatttcagagctcatgctatggacaccggccatgtatcggagatgaagcgattggagataagggatgtgtctgaggggtggtaggcagctacagttaggaatgttgcttaaatctaatgagacaagatttgggagccatgattccatgctcttcatcatccaactgggaaatctagtgcccatgtaaccatctatttcaaggacctcaagattttcgggtggcacaagaacttcaagaaatgtttcaacattttcaaaatcatccgcagaacaaggaatggtccacaacaaggtcaacttgcttagttttttcttatttctccagtttgctcttttggcagcagttgtcagatccatcttgtgtgaccaacattcaatcctgagctcaccagttagattgtttagatctttcagctccgtgatactgctatgcttgtcacctatcatgagtaaggacaatgtttcaagtttagtccatcgcccaaatccattaggtagttgttttaaagatcgacattggtcatttcttaaatgtttcagattggtgatccttgtcatgccatcaggtaacttagctaggttttcacagccaacaaagttcaaactctctaacatcatgaggttggttatagactcaggcagcttacgtagactccagcactggaacaagatcagggtcttcaaactatgaagattgccaattgattcaggcaattcctctagactaagattccatgagagatctaaagtctgcaagtttgggagatgactagttgatacaggcaatgccaaactgcttgcatggtgtgataaaatgagtatctgaagttcatgaagaccaccaatggatcctggtaactctgacagactactacagtgagacagatccagaatatgcaagctcttaatgcgacctattgaggttgggattgattcaagatcagtgcattgtgataaattcaggtgcaacaaatttgaaaggttaccaatatttttgggcagtgcttggagaacaccacatcgtgaaaggttcaagaaatgtaaattttgcaggctgcatatagtgtcaggtagaatttcaaggttgccacatcccttcaagttcagcaaatgcaaactttggagtgtaccaatagagctaggtaatg

SEQ ID NO: 14005 - DNA, 2930 bp, Oryza sativa
taaaagtttgaccaaatcttgtccaaaatgtcaagttttgctggcctagcaaagaaatgtcattttttttatgactggagtggagggagtagtcattagtgaggacatgaactatttatgaccagagggagtagtcattaatggaaaagagcaaaacccataacaccatattcgcaattattactaccaagcaaaaattggttcttttaaagaacagaatcctctacacgatggaatgatgacatgacaagcaagcatgatatgctattttcacccagttggcactagcttcatcagtggctggcggtaacaaccagataaaagtgagactgccagatcagggaaaacagaactctgagcaagacagaattactaaagtggaaagtcccattttggttctccatcttcgcactctgttcctccctaaaaaaaccttattcaaaaccccaagcacctcccaaggtgacactaccatgtgggtctagccatctaggctccgcatatcaatgacagagaaaatcgagaggcttgtaccaattcttactgagcgtgcctttttaggacattgaaacagaggacccttttctgatcatacaaaaaagctggagccaaacttttcccttgctaaattcacacgcctaatttcctattctaggtagtcagttccacttctcaacctcgcaacacaaattcggcaattttttcctcattaaacgcaaacaaattcaggaatttcactggtataaaaacacacaagagacaatgttccgtcagtcacctaccttgaggaagcggcctctcttgttctccccaatatcgaagtagaacacctgcgcgcgagcgtgccgcgaccaaaatcagcaaacatagacagcgccaaaaaaaaaaagaaagaaaaaatcagcgggcggcggaatcaatcgcgaccttggtgtcgaggcggagctccttgctgaaggcgtcgcgctcgtcggtgcggatgtagtagtcgaagaggtcgaggaaccaggcgacgccggcgacggggacgatgatggtggagcgcgtggaggacgtcttctcggagatcttcaggtacctccccctcgggttctccttcagatcgaagtagaacagcttgtgctcgaactgcagcgtcttgctgacgagctccacgtcgcccccaacgccgcctccccctcctcctcctccccctcccgcgacaccgggccccgccatgacgcccccgcctcctcctcctcccccgccgccgcccatcgccgccgccgccgccgcgaactagggttttgagctagggtttgggtttaaactcgctctcaaactcgagtcgtcgagtcggggagaggtggggatgtgaggttgggaattgggattagatctcgcgaggtggagagggggtgtgggggtttacccttttggggattcctccacgtcactgacgggtggggccggggtcaggtggggcccggggttggtgggcgggggtagggaatcggtgggcggggggaagggggggtgctgaccgtgtgcggggggtggtggcgtggcgggatgtgattggtcgggcgaaggacgctgatatgaccggaaagggtaaggtttttgtactggtacgtgtgctgctacagttgcggtttgggggtagaaattgtttggacaatgacaatcgtgctattactggagtatagtccctttgtaaatttcagtttacgtaggatacgagtaaatggtttggacaataactgtcgtgttgttaccaagcatactcccttagcaaattataatttgtgtagactagaagtaaatgatttgaacaataaatgttgtgtcgttattgaggtactccctccgtttcataatataagggattttgaagggatatgagtatacgacacatcctatgacaacgaatctagataaactcctaaccagattcgtcgtcttagaatatgtcacatccctccaaaattccttatattatgggacggggggagtatactcttccgtcccccaagaaataaacctaagaaatagatttttttaacgactcgcaccagacagtgcgaaattcatattgataagtaggaaaaaaattataagattacaacactgggaggtcgtaattaggaaaacaaagaaaattataccaccacccacgcaccaacagcaccaacacacagaccctggagaaggctagcaccgaaccggccgccactaagccaacaaaggatgtacaaccgagattgtccaaaactcaaccctaacaactaacacagaagcctactctatccatgtctttgggattgagtgggagagggtgagagagaagaatggaaccgctctcccccctaggccctccaacatggccaacttgcataagctaaggcgccgatataagagaacaggaatctagagcaagcttgcaacgattgtttgggaggtttcgacaagggagctgcttagacgatgtctctagggagataacgacaaaagcaccgctgccgccgtccgtcaaggtcttcaaagagaacagtgactaggttttcacccggtagccccacaagagaggatgggatagcacgacaacaccctcaagaggaagtgacgctctgaacgcaatcgttgccagctcgaccaaggccggactaggttttcacccaccgtctgccgcttgccaatccatcgctgacacatcaatgctccactgttgtctaacctccgcggacatgtgggcaccgctgcaccgacgccccacgccggctatcctccgcgtgccgccaccctcgtcgcgtcgtgccgaccttcgctactgaccgcacctcgcaccgcgccgacctttgctgccgggccgcgcctcctcgcctttgtcggccgcacatcccacccgactgcagctcccgccgtcgttgtcgcgagctctgccgctgccg

SEQ ID NO: 14006 - DNA, 5162 bp, Oryza sativa
aaacacttaatatttatcttcatcttcatcttcagatgactcaaacaccaccttagggggggattgcaaattcatatttgacacaaaaattgacactatatatattcattcaccaatacctctctatgagtatcaatgctcacataatcttgttgagaacttgtacctgtataattgtaaaagatgagaatatgctttatttcagaaaaatcttgtcgagaacttgtacctatataattgtaaaagatgagaatatgcaatttttttcagaaagaagaacaagatttggatggagagccttcgctccaaacagtttttacgaagaaattatgagtgtgctaaagattgaacatgagatctcatagttaaaaccacacatttcgtaccactgcactgtctaatacatctcaatttgtttttttttccctttacttagtattaaccggtgtgagattgtttgggtagcatctctttcaatttggcttgcgttctccaagacgatattttaattccaaataaaatccagtatactactgcattaacgaatggtatggtcactaccgtcgagtgacgaactctctctcacgcttgtgttcaattcagccacgccacggcacaacgctggtccatttgtacaatgcgagaatcgcttgtttctttgtggacgatgttgctcgttggctagctacatgggtcgccattcgccaatgcgaatgtgcatgcccatccaaaaatccaaccaacatctacctaatctctgcagaccggtaaggagtgcatgtaaagcagtaacctacccaaggctagttcaaaccgtcgtccttttatatacaccaaattaaagaaatggcacgccatcagattgtgtataccctccgttccataaaaaaaaacaattctaacaatgtatatagatatatgtataattaaattcatagctagaattaatattttttttggacggagtagtatatatgaatatcaatcaaataaagtcaactttttcttatgtacatataaattcaggattaaaccatacaaccatacaagcatggttgattctactttctcaatactcgttgttgtttatgctacatatttgtcatcgatgactattctatccattactttcgtagatcagtaatagtataaacaacgatatatgagcctcacttatttgaaaaaaaagagtaaacagacaggagaaggttcagatgaaaagagaccctccgacgtgaaattagagagatgtagtcatggatatatgagccccatcgtttcccgggcctaaatgtactccttccgtcccataaaaaaacaacctgctaccggatgtgacacatactaagagtaggtacaatagcaaactataagccagctaatatacatattttaacgagataaaagaggagagataaaagcagcgggctacagatttgttgctagctgtagcacggactccaagacgcatgtgtgtatgacagatgggaccagatattgattgtgtagtatatgtttataggtaactattgtatgaatcggttattaagttaactatagatgatttggagtcaatagttggctacactattaaatttgctctaatactacaaatacatacatacatacatacatacatacatacatatatatatatatatacatatatatatatatatataaattcatagtacttagatgtagatttgttttttatgagacggaggaagtaagtggttactacctctatcttaaaatatagtaaggctgtgtttagatcaaggggtgaaaaattttgtcgtgtcacatcggatatacaaatacacatttgaagtattaaacgtatagtctaataacaaaacaaattatagaatccgcatgtaaattgcgaaatgaatttattaagcctaattaatatgtcattagcgtcaaatcattgatcaattaggcttaaaagattcgtctcgtaatttacctataatctgtgtaattagtgttttatattatctatatttaatattttatatatgtatccaaacaatgtgagaggttaaaagaagttatggaggatctaaacaggcccaaacaacccatcctacattttgggacggatggagtagtcggaggatttccggtccagaccaccacgtcagcggcgtgccgggtccacctacccgaacgcgcgcgagacgagaagaacatcggaagagtgggagaaggagaagagaacgatagaaaagaggagtactatcatcgaaacgaaagcgaagcggaaaaaaggccccgacgcagaaacagcatccgcaaacgtgcccccgtctatccactcccctcctccccttcccttccctttgtggaggccaggccaagcctcccctcccctccccgctcctcctacgcagcgccgcggcggcggcggtagaaggcggcggagctctccaccctcccctccgccgcggcggcggccgtgttcctctgcggtggagaggccccccctggtcgtttctccgcgccggctcggcatctctccggaggaggaggaggaggaggagggaggagtaaggtgtggggatggagatcgaccgggcggtgcgggggagcagcgaccgccgcctgcggaccaagtacgacaacgccgtctacgtcgtgcagcgagccttcgcgctctacccgtacgcgccccccccctcctccccccctcccctctcactagattcgtgtggtagcggtgatggtggtggtggtgtcttagctcgatgatgatcaacgcgatatttgttggggttgctgctttccgcgatcgggtcgggtttggtttggcgcgtgccccgtaacgagtgggttggtttggctggttcatccagctcggatggatttggggataaatgtggtaatcacagattggagagaggaatatcgacttgggggtttagatcccaaactgcaggtcgctgcagctgtttaatcccgatatgcattctaaatttgtgtgtccttaccaacagaaaattcatccctatttgcctgttcgatttcttaatcccctttgtgcaatggtgtatgctgttatagtttctgaacatcaactagtagcaattttttaggacggtctagactatttggattggctgccgcaacaatcgtctagtctcgatcgattggatttcggctggattgctctgtcgaactgtattttcagttgattcggaccacggattaaagtacctgtgtcttgaatgctgtccaggatacaacgggagtaggtacattgttttcgttgttggctagtcaggttgtatcggctgttcttatgccagttctgatgagctaaatatttatacatccattttgtgagttgtaaactgtttccttttttagtcaacacttaacttaaaatcgagtttctttggatgagaaaggagattctaaatcaaactacatccatacggggagtgaaaacccatgatgcttgtttgtcacgtcatcttaaaccagggaaaggtccatccagtgtttccacatttcctttgcagaggaatacatctgcaaattttgagctaaataatctgagtctgtgatgaaagtatgtgcctgcatgctttaaagtagcttccaaaattacatgcatcgattcataaactttcaattttagtttcagtttctatatctcaagcggctcagaatatgtaattcgagtgaaaatgcaacactgcctaccaatttcttgaggatgtcgagtgtttgaaatcacatagttggagtcaaatttttaccttttctcctaactatactatcaggcacatttatcatgccaactgggttgtgtgactgctatgtttttagcttgtaagtatgatggtgtacatgttctgatccaaatcttcatgctgttccaatgcagagtatattttggtaaggtcataatgacatttctgtaggacactaaagattttttcagtgaatgatgaattataattctaatcatgcaaacttcttgaataactggaatgtgggatgtccagttgtgttgaacatgatataagtaatggctggtggggagtttaaatatcattgcagtgcacggggacttagtcttctttgaaaacttcaaccagttatacctggattatgtgaataaggcacaaggcagatgttccccaaatgcatattgacagttctttttggcaccctatcctttaatttccctatttagtttttttaaatggttctgcacttgtccaggatggatattcaatagagggtggggttggtttgaatgctctcattttatatatacattgaatacaggaacatcctaaatctcattctcagaaatttcattttccaggtttgaggaagttgccttcagctttaatggtgggaaggattcaacagtaatatctttataatctctcttgcttgtcatttttcttctgtatgttaagtgacggttttttctattagcaagtttaacaagatatgaatgctatatatcaataggttctgttgcatttacttcgggctggctactacctccacaaatcaagctctgatggtgaagtcgaaatgaatactatccaaaactgtcctgtgcgcaccatctattttgagagcccttgtgctttccctgaaatcaactcattcacttatgaaactgtctcaacgtaagaaatcactaagattcgttgtctttgtttatttgctaaccttgagaagttaaatgaaatattctttgtcctccgttctccacagttatggtttgccactggaaactatccgctcggattttaagtctggcctagaaggcctattgaaagagaggcctactaaagcaatttttattggtactagaattggcgatccaaatgcagtaattttcttgttcccttgtttagttgctcttcaaatctcgatagacttgttatgtccaatcctcatgcccatagacctttcacttattgatgtccctagactcccgataaacctattacttactacagtttgggattataggttggtcaagagcagttctcgcctagttcacctggctggcctcctttcatgagggtcaatcctatattggactggtcatacaggttttcctcctgatcatgtaaatcaatcaaaaggtgcctcctagtctgctaatattcatgtgctaa

SEQ ID NO: 14007 - DNA, 1022 bp, Oryza sativa
ctatagaatctggcaagctatggaagttgcaagctgaaagattcaagatttctaggttctcaagggcacatactgacatgggcagcacattgagatttatgcaattgtataaatgaagagtttgcaaattgtggagactactgatgcaattgggcagagtactgataagggatgaagaaaggtccaagtatctcaaatgcttcaatttaccaaccgattgagggagctccataatttggctgccgcgcaaatctagtactctcaagaacctggagtgaagaaataaattaatgtcaagactacggccccaggaatgaaacgcacggactttgcgaagcatgctccaaagaacatcggtcgaccccatatcatcatgcaatgatgcatagcggcaagcttctgtcctcccattgactcgcttagcgcttatgatctgaacttcatccccggcaacagactgagcaaggtcatgcaccaagtcgtgaattttgtacttaactcttccatcaacctctaatcctttctttgacaaatcatgttggtctacctcttgaaggaatgacatccacaacaagtgctcaaaacagtcgtccgctttatcagaaaccggctggcaaccatactttgagggttcaacaaagccaagagcaacccattgctgaataagcttacccttgtcaatctcatggtttcgaggaaacaccgagcaatacgcgaagcattgcttcagaacgggtggcatttgatcatagctgagtttgagagatggcaagatggtctcctccttatccagctgccaaatctcactgtccctgacagcaatccatgattcctcattcctcttgaacctcagcatgctcccaagggccttcgccgccagcggcacgccgccgcatttggggacaatctccttccctatcctgaccaattttgggtacaattcctcatctgcttcctcaaaggccttcctcttgaacagctcccagcaatcctcatcagagaggctcttgagcatcaatggc

SEQ ID NO: 14008 - DNA, 7051 bp, Oryza sativa
  unsure (1)..(7051): unsure at all n locations
atttccttgtgcctgccattgatatgacttatgaggctgtcagggtcactgttcatatgtaagcagggtatgccacaatgttcatatgcaagcatccattcctaattacaaagaggaaaaggaggaaaaagaaaaaggtgtaccatattattgacttcaagtaacagggtttcctgtacttcatcaggatatatctcataagtcatatcagctgaaaatgttgaaaataatagttttttcctgtaaatatggatagtctgggaaaatgccacaatcatgcagtataatttttgtccctatactgcatataggtgtgacacaaacaacaaacgaaatgaatatggtctatcattttgtagaacccaatattgaaggtttacccctttcaaggatctaaattaaaagatagccctttaatctcaaaaaaagggaaagaagatcctgcaatcattaacttgtgaattgcttgtgttgtccctgaactttaggataatacaggtttaattcgcttttatatatccgtgcacatttataaactttgcatttattgaattaaactattatttattgtttatgtgcatccagcctctccattaaatcagaccctgatggtggcattgagattgaagatctggtagcagttactgtgaatagttttcaagaagtgaaaagattgtatgaaatggggacccgtcttagatcaacagcttccactatggcaaattctacttcaagcagatctcactggtaaatttttattttattgaagaaaagatttcttatatatatctatacaattagaatatcaactatgattgcacctgactgaaagaggattcaatcaaaagttagagagcaaatgttcacagaaacatcttgagtgaataaaatggttgtttttaaattgagaaccatggaataatcactttcctgaaactctgtactttatttgttcatttatgcaacagtttgattcgcatctcattgacttccttgaatgcaactgagagaagaaaagcaacaagtaaattgtggatgattgatctaggtgggagtgaaagacttgtaaagacaaaagcaactgggaaaaggctcaaggaagggaaagccataaatttgtcgttgtcagccctaggcgatgtgattgacgcactacagactaaaaaaccccatgtcccttacaggtaaatgaaactcataatgcacaagtgtatggaaattggtacatggctgccatttcatcagaaaaatatgacaaaacactaacatgtcgcccttccaaatttgcagaaatagtaagcttacacaagtactgagagattctctaggtaaagtagttcatcagtaactatttcaaaagggataacaacatatgtagttgaattattttacacatatttttacagcttaccttgacatattcatgtttaattgttgacaggatgtgaatccaaaacattgatgcttgtccatatcagcccagatgagggtgatttgtgtgagacaatttgcaccttgggttttgcaacaagagtgagaagtattcgcctggaaagtgaagaaccaccagtaagattttgctcttaccattatgatgagtgtatatgcaataactaccagatggctattttattcatttattcattaaaaatagcataaaccaaacattaattaaggtaataagacagttaatgctctcacatttcaatttgcaaagggacaacttcgaaaacaagatcatttttatgaaaaagttgagctctgtgtgatcagccaaaattaaagaatgctcggtttgtatttttacaaaacatgatattggcattcatgcacacataaaaatanacttttatgtgaatttttataaagtcgactaatgagtacacaacatgttttgatctcaaacaggagatgaaagcaaggaaggaaacattattaatagatttaggacagaaggtcaatgatttggaacatgaatgtgaagatattagaagaaaaattaagaatctcgaggagagtatggagcatttgacaggacctcagccaactatttactctaattttgacatgtcacatctatccagtgaagaactgaaaacagatgtatcaagtaatgtgaggaattcaaagaatcgcagagaagcctcttccaggttaccaaggttcatgaagccaactgcttctagccagcacaggataggcttaaataatcgcactcccattattaacaggctaaaaccaccagtaccaccaaggaggcggccttcctcagtttatgctgagtctgtaatggtcccagtaaatgctgccccttggcaatcagaatgcagctccgaatgcagtatgtccttaacaagtgacatgaattggacaccaagcatacgagatggaactgaatgtagccaggatgcatcagaatacgagattaaacaggtgattttctcagaacatgagaaatcatcgcatgatcaagtgacctgctacacagattatccacttgcagaatctagagatatacagattaaaatcgaagagaagggaattgtagacattgacaattggctccaccaacaaatcgttgagaagactagcacatttcgaagcaaaatggtgcttgatattcccggagtaactgaagctgaaatccatgtttctagtattccttcaccaactactatggcatgcactaaagaagatagccaggtaaaggatgaagtaatgggcctacccttcaatcctcaacagactatgtcgaggatataaagcaaagcaagactgataatcaattcacagcaaaagaattatgcactccaccatttaaagaatttagcagcaacaatgaagtgaagggacataaaaacgaacatcctgtgtaccatgggagacccagaaggtcactacaggaagaactggaaaattgcacgctagagaagccaaacatggactcaaaatctcacaggtcacatgatgataaacacaaaacaggtaatgttctgtcttacaccggagaatgagcatctacgagaatttaaattttcctggaaaaaagccactatgcatcccagtatcatctggatttattgaagttgctcctaaatttgaagccacggtaagagaatgcttagcaacaaaacattttagaatatgcctatatagatgcagaaaagttcatgacaccagaattgcacatggaacaacatgaataaattgtatccacataaatctagttgtacttggcaaacaaccacaaatgatccaaatacttataatcacatttttgcaatatctaagacagaaaactccatcatgcaatggtgttcagcctttctgaaaagttactctttggtgtatattagacccaaaaaaactccacaaatcagccatgtagcagacattgtgaaacagcatgtttatgcatgaaagagaaccttaaaatgtaggtagaccttgcaatttactgtaattgttgttagatataggtagtaaatgtaaaatctacaggaaatctttccaaaaaaataatcaaataacgatttttctgtagaatttattcctagagcgaaaatagaataaatattgaaagtaaacttcagtagataaatttttgagagaaaaaacttcagtacatagaaactgaagtttctaaattgacttccacaatgacatgaatatctgtaatttttagctaaatatctcagtaaagcatgtcatgcaaaatttctctgttttggtactatcattttgaacagaatgcacaactagcatacaaatactatcatttatccacttgggatttccgcctgtctacaatctacacatagttcttgttcaataagctatattaccggtttatacttcactgcagggaagttcacaaagttctttcaagctcttcaaacagcatggattggtgctcttctagcactgggaactgtaagcattggattagagcatggcttctttcagagtttgacactctaaagtacctagaatctcatcactttgagatatagtattgaattttaagagaaactactacaggaagtaatgctctcggtgtatattgtaccacgagcacacaatgaaatatgtccagccagtaccacaattgcaggtgaactgttgattgatgctaaaagagctcctttgatttctgatgaattctttcagaaagccaaaaaaattggggtatttgagtaagaatgaaggaatgatcatacaagaaaattggcatcattcaatcatacagtaactgttagtttgttacagtaattagtattgcactgccctaactctgacaaagaattgttttatagttctaaagcatttcagcttatttgcctctgtacacacctaaaataagttaagtgtctcagtaaagcagcaacttaaatcagaatgctagagtatttgtttgagataagttgaaaagggaatggcctatctattctacatacattgctaaaggagaagtctgatgaaacaaccggtcggtcaatatcaagaaaagaaaaaaaaaacttctgtttagatgttgcccgtacctttaactgaagaagaaaggcttggccaacttttatcctataagaagactaaatctcacatcaaacaactagtcaatcaagaatctactcttgagtttcaaccttgtgctgttgtgcatgcaatgagttggcgaaaaactactcctttaaaacattctctaaattatcagctatgttcacttatcacacaaggcaaatatgtttctttctgagtgtaccaaagtatgttgtcctccttcaatacaaacaagtgcttcgtagaatatgagcataatcattggaatctgttttaccatcaaggcattaaggcatagtgatcacttttgttttgctggaaacaatgattcagtatgaagcattgcatcaggtatcttctgtatcagtctgagtctgactggaaggatggggtttaacctctaggagaacttgtaaaccatgccatcaatcttaacaaaacttcaattgtgcacacttggcatgtgatggaacaatgctcacactagatgatgttcatctcacccttcttcaacatcatgcaaactttcagggagcagcgcaatatgaccgacggattttatgttactgttaattgcacatagaacttcacgtatcttatgcaaggaaggatgagagccatctctggaagtgaactcatgaaccatgccatcaacatcaatagaacttgcccctggcacatttcttaatcctctatctctcattgatattcgaagttctctcacagcatcccacctctcctgttctgcgtatatattagataggagaatataattcccactgttgtgaggttcgagctcaattagatgcaacaaggcttgttctccaagctctgtatcaccgtgagtacgagcagcagcaagaagagctccccatattgctgcatttgccttgaaaggcatatcctgaattaaaccacgagcttccatcaaacaacctgcacggccaagtagatcaatcatgcacccgtagtgctcaactcgtggcttaatcttgtactgagacaccatagttttgaagtaccagcggcccaaatcagtcagtccaacatggctacataccgataggactgcaagaaaagtgatatcatttggtgacacattctctttctccatccggcgaaataactccacagcttccaaaccaaggccgtgcaatgcaaatccagcaatcatcgttgtccaagtgacaatactcttctgctccatgccctcaaacacttccaacgctttcttaacactcccacatttgacgtacatgtcgatgatcgcattcatcagcggtatctcctggcataaaccccgtcgcagcacaaacctgtgcacccactctcccaaatcaaccacaccaagatctccacacgccgagagcaccgacagcaacgccaccccatccggttcgatcccctccacctgcatcctccgaaacacctcgatcgcctcctccggttgcttcatctgcgcgtaggccccgatcaccatcgtccacgacaccacgttcctccccggcataacatcgaacagctcgcgcgcacgggccaggtccccggacttcacgtatccatcgatcatgacgttccatgaaacgacgtccgcggaggcggccgtctcgtcgaacaccctccgcgcggaggcgacgctcccgcaggagcagtacgcctggacgaggctggccgaggcgtgcgggtcggcggcgtggcccgcgcggacgagcagggaatgcagctgcgcggcgagccctcccccgccccggccgcggagccgcgcggcggccctgagggacacggaggggtggacgcggcggacgagcgcggccgcgtggtcgcggagcgggaggcggagggaggcgaggaggagcgcggaggcgacgcgcgcgtggcggtggccgccgcgggggaggaggtaggcgtgggcctggaggaggtggcgcggggaggcgaggcgcgggagcagggagagcacccggtggagatccgggggcagagatggcggcggcggcggcggcggcggcatgcgctccgcggtggccggcggcggtgggcggttgggttcgatggagctcgtgcgatcgtgggggcgcgcggtttcacgcgcttccctttcttctcgctgtttgggcctatgggcttcagaaagatcaacgcggtattgggctggaagcctgttgtgagtacagtgttgggctgaatggttgatgtgccgagatctgtttcggcacgggctcgtacatagattaggccctattgggaggtaggagtagtttttttttttcagaaaatgatttaattcgtttagtacggcaccgcctccttttcaaaatgtatgatgccgttgacttttttcacaatgtttgactattcgccttattcaaaagtttaatgtaaatattgaaaagtataagttaaggttatattttattcgatgataaaacaagtcatcacaaaataaatgatatttatataaattttttgaataagacgaatgcttaaacgc

SEQ ID NO: 14009 - DNA, 15069 bp, Oryza sativa
cctgcagccctgcagtgtgtatgacaggtgggaccatatattagtactagagtaagcaactattgtatgaattggctattagattgaatataggtgaattggagctagtagtgggctatactattgaacttgctctaacgaaaccatctttgatcggttgcccaaaatccacaataatcccggtttgaataggaaccgggactaaagaatatctttagtcccggttaaaagacgtgacggcactttttgttaccaaccgggactaaaaatgatctttagtctcggtttaaaagaaggcaggctatgtcagacccctccactatccttagtcctggttggtgttaccaaccgagactaaagatttattattaaacaaccgggacaaaaaatcagcgaaactgcccgtgcacgcgtcccgcctcatccttcctgcccccaaccttatctcttctctcttctcctccttctcacccctcattccttttatctcttctcctccttccccatctcctcctccttctcctcctctcctctcactcctctcctcctcctcattctctctccctcccctctggctcccctctggcgggccgcggctcatggcatacggcaggaggcgacggcggtcacccctccaccggatccaggaggggagacggccgggcggcggcggtggaggccagcgcagagggctgtccctggcggcggcaagcgcgaagggcggtggccgactgcaaggcggcgcatggccgggcggcggtggcccgatgcaagacggcgctcgaccgggtggcggccgggcagaagcgaccggcgagtgtgatttttttttaaattttgtgaattatttgtagtgaatgatttgtatattttgtttgagatttttttttgatttggggatgattttgtgattgatttgtggattgtggatgtgtatgtattgtggatgatttgtgtggatttgggtgggggaatagatacaagcataaaaaaacaataaaagaaaagaaaaaaaaccgggacgtggcccatatctatcttaagtcgatgtatttttagtcccggttattttatccggtactaaagatgcacatctttagtcccggatttgtactctcggttacaaaaccgaaaatacatggggttacaaactaggggtaaagaccatttctccactagtgtaaattgctcatataaaaactttgtatacataagtttttttaaaataaaattatattaactttaagtttaaattaattaatatatatggtaataactcatctcgtttcactgagcagatttgcccaaacaccacttagaactaagtcttatacattatactctactccaacagtcgagacatagctttaatacactaaaaaaagtttaagcaccaatgttttcttatttctcttctcctttgtgtctgcaaatttaccttcttatacccggaaaaattcactactacctccatcccatattacttgtcgcttcaagtttttttaatgtttaatcattcgtcttattaaaaaattattatttattttatttgtaacttgttttattatcaaatatactttaagtacttatcttttttatatttacactaattttgtgaataaaaccgaatggttaaatattgtaagaaaaagttgaagcgacgagtaacaggaaacggaggcattagtagtgattgtacatgcactcgagaatggaatcatatagactgcctctgatggattattgccttttctggtttagacaaatctggccgaaaccaaaaggagcacggatgtgactgcaatcatgcaagccatctcgatcggtggtcgtgccatgttctcaactcaatcatgtgcttacaccgtactccctctctcttacaaaatttaaaagattttaactctacaagatactcccttcgtcttgaaatataattatttttagttatgaatctagataactatgtgtctatatttatagctaaaagttactatattttatgacgaaggtaatatattttaggactgtgaatttgaatatgctctctattcatattagtaatactactccctccatcctataatataagttattttttttaaccattcgacttattcaaaaaaaattggaattattatttattttatttgtgacttactttactatccaaagtactttaagcacaactttttgtttttatatttgtacaaattttttaaataagataagtggacaaacagtacaagcaaaaaagtcaaaatcccttatattatggaacggaggaagtataaaatatcacatccaatcaaaatatctttaaataccactacaaatcaaattttgtaacaattatataacaaatcgtgctccaatgaacgaaccaaccggatagccaagctatccagctagccaagaaacccacaaattttaaacaatcattggagtttatcaccacatcatcgtcctagctcggccttgtcaggccgagccaaggatttcagtcccccatcattgcccccgtcaccagcttagaggtgggagggcggcggcagtgatggcaagtgggaagatggggagagccggagatagccgagaggtgttgccatatagggccaaggaaatttgaaaaatagagaggaaggttaagcacatgataaatataggccttatttagattcaaaaattttcggcaaaaaacgacacatcaaatatttagacacatgcatggagtattaaatgtgagaaaaaatcaattcaacaatttgcatgtaaagcgagatgaatcttttgagcataattacaacatgatttgacaatatgatgctacaataaatatttgttaataccggattaattaggcttaataattcgtctctcaattcacaagcggaatctgtaatttgttttgttattagtctacgtttaatacttaaaatgtgtgtccgtatacttcaaaaactttatacccaaagaactaaacggaatctttttaatagctcaccaaatgtaaatagcagagagtaagactgttagagatgttttaatgttactatctccgtcccaaaatataatatattttagctatgaatctgggcacacagatgtctatattcatagtttaaaatacttacattttaggacggagagagtacatgttcaactcagatattctcatacctcttggtcttgttttgaactgatgcactcaacaacacctcaacttataaatactcatcttataaaatgacaatagctcaacatattaatccagaaaagcaaaaagggtaattaagtactacatacggttcgagaccactgtactaaaaccggaagccggaactgctgttggccctctgcacaaatggatgttttatggagaagtggagaagagttgcccaaactgaattgagtttgtgactgagttcttgttgtttcgttgctgactttcagtgatgctggccatatttccgttcctgacctgagcactgctttccacttatttagctgaaagctgtctgaaagctgtggtatgttcgaagtaggtttcaggcgagttttaatccaaactttttcttcaaattttttacttttcacttttctacacacacaaacttctaatttttccgtcacatcgttttaatttcaactaaactttcaattttagcgtgaaacacaccagtttctttcaaatcaaatttagtccaatatgatacaatttctttcaaatcaaatttagtccaatatgatacaagctcttgtagttcatatttttttatttaaactttcaacttttccattacatcaaaactttctacacacaaacttttaacttttttcaataaacttttaattttagtaacttctaattttaacgtggaactaaacacaccccaatataaggaatttggacaaattattctctttgacgtcatgtttttcaatgtttcactggtttttgtgaaggatcagagtttttcaatatttcactggtttttgtcaaggatcagaccacaacgaaagccacatggttaaaatcttcgcgtcgtcactacgtcatactaatatttactctccagtttgttccctgagagcctgagtgacatcatacttgcctcttttttttggttgcatctggataattttccggacaactgtcaaaactcattaaattccatgagccctgtttgtcaacagcaaaataataataataataataataataataataataataataataaattttaaagaaaaactgccgctgaatcgactacgccaggaggatctcgaaacgaaataaacaaagaaggcaaaaagaaaaaacggaggtgaaataaaaaaaattcgaaaatgtgcggcgaatcacgcgagaagcgaacagggcgaagaagcgcccgcctgctggtaggaagcgtggatagccggcgaaggtttagctctcgcacaccaaggttaggcacccgggtattcaggatcaagaacccggggactctttacatgtgcgttgttgtaaaaaaaattcaaattcaaatccaaattcatagcgcagccattgctcggttcagagaagaaaaacgggaaacagttgaatcgagacgacgcaagaaagcagcaagcaacgcatcaagtcaaatgaaaatatattggattaaacacttatggttgggaagaacacctatcaggatcacaaaccgaatccaaatccggaggaggaggggccttgagcgccgcaacgaagagcgaaggtgaagacggcatgagaggtgagagctattggtagggtttgggtggggatttatagagggaggaatcaacgacagccgtccgatcgagttcttgggctgttttatggcgatcgtacggtgtccgtctcttccacgggcggtccagctgttgcgagggtttcgcaagggcccaaagcccaagcccatgggaatcgcatttggtcccttatctaagattagtttaaatcgtaccctctcttaaccttagtttgttcactttgctatcattttcaaacttaccaagttttggtattgccaaattttgataagattgctaagggcctatttactttgatgcaaaaaaaatcttaccaaattttggcagaatttcttatatagttaccaaaatttagcagcaaactaaatgtagccacttttttagcaactttactaaaacttagtaaggttaaaaatggcattaaagtgaacagaccctaaaattttggtaaggttgccaaattttggcaagattttatatgtacttactaaaatttagcaacaaactaaatatagccactttttttggtaactttgccccaaaaaagataatattgaaaatggtagcaaagtgaacaaacccttgaaacctgttacaatgcaatatctcatctcctaaaaggctaaaaccagttccaggacggtttggatttccaaaatccaaatgcctcacattctcacttggtaaggttgaaaatgacatcaaagtgaacaggccctaaaattttggcaagattttatatgtacttactaaaaaaatatagccacttttttttgtaactttgccaaaaaaagataatattgaaaatggtagcaaagtgaacaaacccttgaaacctgtaacaatgcaatatctcatctcctaaaaggcttaaaaccagttccaggaaccagtcccaggacggtttggataaatccaaatgcctcacattctctggagagacgcatgcacagtttcacacacaccttattaggcatacctctaagctctgaaaccggtatctttcggtgctataaaaccaaaaacgttaactttcaatgctatataaccaattttcccaaatttataagcctgaaaaattgcattggtttaaaacttcaagttttatgaaaagaaacaaaataattcatctaaatgccatcatagctctctagcttcaataaatcttggattttaaattgtgccatgaccttggtccttggttttggtcacccatacggtatctcaaatgcactacaattatataatgcttatacgacatactgaaactacaattatatacgaaaatgcacttttgaatattggtctacacgtacaaattacgattggaccaacaaaatggcccaatcctcagctcgtgtgattgcacagtttcttctttctacgcacattttcttagctgagctaggaccaaagatactactccctcagtttcacaatgtaagtcattctagcattttccacattcatattgatgctatcaatagatagattcattaacatcaatatgaatgtgggtaatgctaaaatgactaacattgtgaaacggatggagtagtaaaatagcgtcgtttcagcatttcttcaaaaaaaaaacaaaaaaaggtgctatggcactcgagcctcatcgcaaaaatgcaactgagccaaacaaaatgcgcctttcttgcaaagctccgggggatgctgacagttcagggaaaattaacctctcttctcctgaccccctgagctacgatgatactgcttactcggcgatcctaaccttcttgttcttcttcttggatttctccacaggcgtctgaggaacctccgaggtcgtgccgctgtcgccaccacgaacctgggatccttcggccgacttgcccgatacattcgagtgccccaaactgctctcatcctttctcttctgattgtgcttgtgcgcgggctcggcactctgttggcccagcgattgcgctgagccttggctgctgcggttcttcgacccgctagtgaaccgagacctcgtcttctttgaagaacctggaagaccggacaaattcagatcagtgagagcaactactgtttaccaaagtgttctgtttatgatagaaaaagagaaaacacttcagctgttggctggaaacctttattaattgaaagtgcataccttaaccaacagaaatagaaactacagagatgagcttagtatttctctctcagaacagttcttccatcttataatacaagagcatgcattgcatcattggcatgagtcttcaataatatatatcaggaatttggctaatgtcaactttcaatggtgcccaaaaatcttaagacaaatagtatgttcatcacctcattactgtcaatgtgaaaagattgaacagtaatatgcacttacaaagttaaatctggtgatactggatttctagttaaaacaggaggctaaacctacacaagtctaagttattgactagttcaaatggaatggcatatcatgcttgtcaagtctatataatacattcaccatagacagcagaagagtggcatcattataaaaagatgcctgagaaaatgtactcacctgcagatttcttactgctaggagtgagactccccaaacctggcttctccagttcttcagggtcaggataacgaactaagctaactcgacgtgcaatcttcccaactggaatttttttaggattaaaagaacaatatgcatacagtaagttaaaagaacaatattagctgcctcccaggaaaggaagaaatgatagatgtgttctaccgattgtgctatcaagcacgaccaaaatcacaaaatcaaataggtcaacaaacagctcaatttaacaagaccgataacaagtaaaaacaacatccatgcaaaatagtaaaatactgcagaaataaactgcaaagttggtatttcagcataccagcttttgcttctggtccggatggaaggaaaacagttgcatctggttgctgagcagcaaagctgacaagatcataagacttccctgccaaattaagtataacaagtacagctcaaacttttgggagaactttaaaatttaaattgttattgccacaataatttaaaagcgacgaactgacgatcttaaccaagaaaaagaagttagaaaacctagtagcctactgctagtagtcttactgatgaatgttatcattctagcttcaaatcacggattattatacgaggaagctgagagcagatttcacttcaccaatcaaacttctgaacatacactaaacataaaaacttctatatgtaaactaaattatagcaccttaattccatttgttcatttgttgcctaaagatctgcaaaacactactagtcatcaatgaaccagcattgacttcatcttcatacaaaaatgagaggcaagcttgaccatagaaatggaagcagttccattgataggattaacattgtttgggattagtaatgagaagtctaggtgcccactttgggaaaaactaatcaataaggtcaaagtgtgattgcatgagcaaatacaggttgcatccaatccgactgtacagaaagctgaaaaaccttcaaaagacataatcgatcaggtgcaacatagttcatcgaatatatcttacccgaggaactctccaaactgctcaattttccatcacggtgcaacttaagagtaagttcttgaccatgaaaatcagacgcatctaactgcatgcaacacagaaaaacgttaaattcgagatcccttgtgcagcatgccacctggcacataatgaaaataatatccgcataacctgatttagaggccactgtattagccaaagttccgttgactctgtttgtgatatgtcaagcatagcctcttcgctgttctcctcaaatgctggtccaggctcatagctacaatggttggttgcagcaaagttaaaaataaattacagacaatgcaaaaacttaccaacaagtgtataattgaaacaaaatgagctactgaattcaatccaaaaatccacaactataattttccaacctctcttatctcatatttgaggcataactgttaatctgttattcagagaggaatcagaactaccaaatccacaaattcgatataccattaaaagttgcaaatccacctaataagtttcgttctgaacaaatattgcatagctttactgtagataaatgcaatgctcaaacaaaagcattcctgcttttaaaattgttattcagatgtggctttgactatcaaacacgttctcctattgtgccccttcgcaactgctgtgtgggacgaagtgagatcaactttcccgattagtttatgcagggacgaactaacaagtatgagacagtggatttcagatttcatgaagaggagttagtgcctccaaaacacagtgttagcagtcaccctttgggacatttgggaggcgaggaatgattcaaggaacaagtcctcctccttgcatctgcgtaaagtgggacagaagacagtggcatatgtcaacatgattgtgcagcactgctacaaggtgacgatctgtccgagaagactaaccgctaaatgtcttagcctgctatttaaaacgctgctgcccaggcaattttcctcatcaacgtcattcgagatgtaattcttggagtgtatccgggatgtcctctgtacagatgctacttacttaatcaatgaagtgccatggttcatctcaaaataagcacgatactgctacacgcctacactgcgtcagaaaatgagaaaaaaaaaacgaacaaacctcctcatcgtggtcggcgaggcgacgtttttttttttttttgaggagcggtgtcgccggagagccggagtaggatcagaggtggagaggcgaggcgactcaaagccgagtcggcgagggcaccggccaccggccaccgcccgcgccgcgccgctgcgccgagagcaaaagcgagcccgcgaagatgagctggcgacggcgagcagcggctggactccggaatccgggtcagggaggcgtgcggcggcgaaggccacgaggtggcgtggcgccggcgtgcagcggcgacggccaacggcgcgcttgtgtgtgggtggcggctggggattgggacttgggaggacagggagtgagaaggtagcaatggggggggcttaggttttcttaagtgggccaagcccatcgcaacttgcaaatgggctaggcagcttacgtaggtgggaaaaagtacactgaaggtctctcaacttgtcatcgggataccaaaaacatcctcgaaccgcaaaaccagatatacggggtcccttaactatacaaaacaggtcacctgagatccttgggtgtttttgaccccggttttggtctacgtggcggctgagtcaacgtgggacccacgtgggccccacatgtcagctggccacgtcaccaccctctcccctcctctccctttctcctctctctctctcactcctctcttatcttctctgggcgactgggcgagcacggctgcggagaggcggcgtcggcgggcgagagcggtgtggcgtcggcgggagagagcggtggcggtgcggcggcggcggcggcggcggcggcgggcgagcgcggctgcggatggggagaggcggcgccgacaagtccgcgccacccggccttgtcatcggcggcggctccgggcgcgagggatgaggacgcgggcctcgtcggcggcgttggcggcgagggtggcacgggagaggccggcgcgagggcacggagtaggaggaggcagataggacaggagcgagggcatatggggaggaaggcgccgtccgtggtttgctgttgcttccctttcaccgttgccgagctcgtcgtcctcgcggtcgtctgcgtccctgccgcgctctgccacctcgccgtccgaggtggccaccgccgccgcgtctgctctgcgaagcagaaggagatgggcgagctcctcaccctggacgtcacctccccgaggtcgctggccgctgcggccgccaaggccaggaaggtggaggtcgagttcccggccacgcccatggccgaacacctcggggaggcggaggtggcgcgatggaagtcgggactgcaggcggcgctgcactgggtggcacgcttgctctccagcgccggggaagacgcccggcccgccgccgacctccgcgtgctgctccccgtcctcgcttgcccgctctcccccgtgcccatcctcccccgcctcccccgccatgtacgttctttatcgtgttctctgcctcgcaaactcgcctcaattctttccatcccattccaacgaaagggaagaaatcaagatagccggaaacacacaactgaggggaacaaaatcaaagaaagaagagaaaattcgatcatagcacaggaaaaaacctggtaccaaaaaatagcacaacaaatttttcacttcgactaaaagcacatggcatcaattttcttgcgattcatagcacttccgtcacatttgccatccaaacatgtgagttgacatgaaaaaagacacatttgcccttcttccccgacctagcgctcttctcccttggtgatgttgccgcgcccgtgtcgccgacgcttggtgagctgacggagccgcgcttccctcccacccgcccgctcagccgctcccgatcggcacccgccaccatgcctcccaccgttgctcgcgccagatccgccacgccgccgaacgattcgcgcgtgtggggtggagcaccggccagatccgcacgggaggaaggcggtggaggaggaggtggagacgccgcgcttccggcctgccggctcctggccgcctattcgttagcggcgtcgccgcccaaggtcacggagccgacaaagcccgcagtccgcccactcacgaatcatcccaacatccgccagcgcgcgccacagccccgctgcaggtcatcgtccccgtcgctgtcatcgtcgtcattgtcacgtggaagtagtggcaagccagcgcgctgcggcaccgtggcgagggagaggttgttctggcgccgagtacggcaactacgggccacatccatccatgccgaagctagggccgcccacgtcatcgtcgtcgtcctcgtcgtcaagctgccgccggcgcgggaggcttgccctcgatcaacagcgccgagtgccagacagggtccacctcaccgtcggcggtgacggcgagccggtctccaggcaagccgatggctgccgcgctgccattcacgagggagcgaaagaggagccctgttggggaatgtggggaacgaagggcaaatgtgtccgacaaaaaatttctccacactgatctaacaccgttacttcaaaatgtgacagaagtgctatagggcgaagaaaaatcggtggcctatgctatggatcgaaagtggaaactttttgtgctattttttggtaccgctttctttcctgtgctatggatcgaattttctcaagaaagaaagggtcaaaaattttatccccaaagcgacgagacgactcgcttccgccctctcagtcgaggaatccagtgcggcacaggacggcgttgcggacgtggtggaggtcgcagcccttgagcatcctcccggcgccctccagcaccgagctgtgcgccgcggcgcgccgcgcgacaaccttgtgcggcgagacgaccatggcggcgtccccatcctcgccgccgacggaggactgcgtcgcccacctccccctcctcctcaccgtcgccgccgcctccgaaggtatcctcacgtgcggctggcgatgctgtaggagcccaccgtcggtgacaacctcaccgtcccgctccgctgcgcctgccccttgctgccgcaggtcgccgtggtggtggccgcggcgcttgacatggcctgcccaagaggagagaagtgagagagggagagagaggaggaagggagagagatgaagtggacacctaacatgtggggcccacgtgggttccactctgactcagccgtcacgtagaccaaaaccggagtcaaaaccaccgaagaacctcgggtgaccggttttgtacagttaagggaccccgcatatctgttttgcggttcgaggacgttttttatcccgatgacaagttgagggacctttgatatactttttccacgtaggtgtggtaatgggtcagggcccatagaacgttttttcgcaactcttaaatgtttggaaaaagtacaccagagatcccgtcacttaattacaaaatcatcctttaaccacaaaaacaggtacaatccatcccctaacttataaaaccagtgcaaacaaggtccctcggcagtattgttactggttttgattggcatggcatctatgtggctcctttgactatgtttttatctcatgtggtattaatgtgacgtttacgtggcaatttgataaaaataaaataaaaatgtgagacccatgtgtcagttatactagaaaatgattaaaaaaatgatggccccatgtgagactcacatgtcatcttcattctctcctccctcctctcttcttcctctcttctcgccacacaacatcggcacgctcgtcgtcggcttatttcacgattaagccaaacgatggggccgtaaatgtccaaaccacctttacatttataacgacacgcatattagggaaacacctaatatcaaataactagaaggggtgaagcttcgaactcaggtcatctagcccaccacattgtggagctagccgaaaaacccctgggcgtttctccgcctttacatttatcattaaaaatataaaaaaagacaaaaggattgacccaaccccaacgttattgtatccgtgctgtctttatttttttcatttgttttatttttctttcttttcttctttgttcttttattttttaaaaaaataatggtatatctaagggtagattggacatttaacggcttgctgatgtggcttgctaatgtattgtttcctgtgggttcaaggactagccgtgtgacaattttttaaaaatgttatggactagattggcctcaaagggaaaacttcagagactgttttgactattctcctttgcaaattatactttccattgtccattgttcaggttcgaggaaattgctttcagcttcaacggtggcaaatattcaactgtaaacacctttacatttccttctacctattgtttcaattatttagcatatatagttagttccaaattccaaccaacaagatgacaacgttttggtgagaatcaccttaccgtttgggaagattaaaattttaagaagcaaccagtaagaatccagctagtgagaatttggaaaatttaggtttttcagtttttggcttgtcattttctagaataggaatctaagtgagaatattaactgtttaaaagagcttaagattttaggagaagttgtggaggttaaaaattcctcaaatatggccatagaagccttcccaaagaagaagcctaccaaagcaatttttaggcactagaaacggcgatccgaatgcggtgagtcccttgattgattcttttgcagtagtgcaatttgaggttggtcaaaaacaattcccctgtctgtccttctctcaagagggtgaatccattcctgaattggtcttgcaggattgtctcctgatcatgcgagtcaatcggactttcattctcttttcagaggagccaattctaatgctttgctgtgacaatgatgtactgcacggtcaagtactgcagccttttatgattttcaatagtcacacctttttggtagacgttaggtttaggcccggtttagtcccaacaacttttccaaaaaacatcacattgaatctttgctttgcgtctcttgataaaaaaaatcacattgaatctttggatacatatatgaagcattaaatatagataaaaaactaattgcacagtttgcatgtaaatcgcgagacgaattttttgagtctaattagggcacccacaatggttatctataggctctctaccagagatccatgtcagcatattttcctacatagaagatattaaatgaagagagagagcaaaactatctaccaacttagagatagtctatagagaaaaacgagacaatgcatgagagagctatagatacccatgtagacatactattgaggtggtttactattaatctagtctattgctgagatgtacatgttttatagagagcaccttactttaccattgcgggtgctcttaggtcatgattagccataagtgctacagtaacccacatgtgctaatgacgg

SEQ ID NO: 14010 - DNA, 10204 bp, Oryza sativa
cccaccgtcttggcctcgtcgaccatggagatggtctcgcgcatgagtgggacggaggggagctgccgcgacgcgggcgggcgggcgtcggggctcagggagaacctgtccttggatgcggcgacggcgcccagctcgcgcctgagggacctcagcctgtgcgccatggcgaacgagcgcggcgtgaggccgccgcacacggagcagtcgcccccgccctcgccgcggcggaggtcggtgtggcaggcgtcgaggaagtcgtcgatgtcgtgggcgacgtccctgagcctgcggagccagtcgcggacggcggcgtcggcgagcacggcgcggatggtggcgaactgggcctccatggccgcgaggtccgccctgaaggtacagaggagcgcgagctcgtcccagacggaggagccgaacttggtcagcacctgcctcacgatggtcgaggcgagagcaccctccgccatggctgcgcgctagagtgtctctctctctctctctctctctctcacaactcgctcaaatcacaatggattggaaagtcaaattgggtggacgaagctaacgctgtggagtagctaataatcattcggggaatggcgcctgcctaattccatttcgctctaaataatactccaacaagtattttttttcttaacatccttataaataatatactatatctgtttcatattataactcgttttgacttttttctatgccttcgtacttttaaatttaactaagtttatagcaatgtttttttaacataagacaaacataacatcaaaatatatctaatgatacatttatatatttttatcataaacttaataaaatttaaagaaatttaacttaaaaggtcaaaacaacttatattacagtataatataatgaaacaaggggagtagtactactcgctagagtgtctctctctttctcacaactcgctcaaatcacaatgcattggaaagtcaaattgggtggacgaagctaacgctgtggagtagctaataatcatgagatatttaactattcattgcgggaatggcgcctgcctaattccatctctctaaataatactcctcctctttttcttcctaaacttccctgaaaataatatactacctccgtcccatccctttgagtttttttaatgtttgattatttatcttattaaaaaatagaactattatttattttgtttgtgatttgctttattatcaaacatactttaagtatgacttatcatgttttatatttgcactaatttttcaaacaaaacgaatggtcaaacgttgcaaacaaaaaatcaaaacatctattataggatggaggtagtactcgataactcgttttgactttttttcatgtcttagtacctttgaaatttaacaactttatatgaaaaaatagcaatgttttttttaacataagataaacataacatcaaaatatatctaatggtatatttagtgaggttaatttggtgatgcagatgttgttatatttttttcataaacttaataaaacttaaagaatttaacgacttataatataatgaaacgaggagagagtactgctcctactctacatacaaaataggaagtgcttttataaatatatacatcgttttttttcttaagaaatgcattggtttttaattatatggaagattcgatggagatggagaccggccacaaatgatttggctcactaaactgctattgaaagataactaattatatggaagactcgacggagatggagaccggccataactcatttggctcactaaactgctattgaaagataactcacggccgggcgagaaatgattcattgtgtcgacgtttgatgtctcgactacggtatttggatagtatggggatcgccgatgctaggatatacgcgagactgaggtaaaagagatagagacaaggatttttatacaggttcgggcccctgagttgtcaggtaataactctacatcctgttagccgaagccggtattgctcttattcaccataatcacaccagtacaatatgtgggtagcctatctaagtgttgtcgacatatcggtctgaaggtctgactcgtagtcgacaacagggtagtcttcctcctcgaatccgtgctcggcgagatcagagatagcgctttcgtatctcctgacggtatccggaaacaccataggggaatagccatgcctatccctgaaatcgatatccggcggcgtgtcttggcgcatgtaggcttgtatgttgtggtagcctatctaagtgttgtcgacatatcggtctgaaggtctgacttgtagtcgacaacagggtagtcttcctcctcgaatccgtgctcggcgagatcagagatagcgctttcgtatctcctgacggtatccggacaccgtaggggaatagccatgcctatccctgaaatcgatatccggcggcgtgtcttggcgtatgtaggcttgtatgttgtggcttctggtgggcgtgtgttgattgtcatgggtgtcttccatggtcgttctcctctctcctcctagggggtcttgtatttatacccatatgtgtccccttatccaagtagaactagagaaatcaatatggatacaatccaagtagtccttgtcgtttccatgtagaactctggttgtctttccttattcggaactcccacctatatccgtaggttgtttccgtataggacatagtatgtggtgggtcctgccgagatttagtcaactactattaggtatgtggtatccataaccatgacacattggtataccacatcaccggagctttcgcttattggttccaattttttaagtgtagtcaactactccttaagtatgtaataatgcaactaacgtgacagtacagtcatccaaaaaataatgaaaaaaatagtgggattcatctgtcggttccctttctttctttcttaaacctcgtttcccttccatctctctttctctacccctaaggccccaacaggagagggaggaggtggcaggcggccaactaactagaggagaaagagggcggtggtggacctcgggcgtgaaaggcgtagtacgacctccgaacagatgtggcggaggcaccgcggccatctcctggccttcagctctaagctcttcgatcgggcaaccacctctcagacggcggcacgaccaacaagcgagggcgagtaagggaacaacgacgacgatggggagctagatgccaagaggcattctgcgagcccattcttcgtcgatgtggcattggtatgttttccttgtggtcaatggtcgatcttgctgagaagatgtccattggctcaacatatgttggaatgatcttaaacatgtccgtcatggtcaggaacgcgaccacagcttggttgctgccaccattgacgttgagtgcagccatcaaacacttggcgtgcgtctctttggaacagtccgtggtatcgatgcagggtgtgtgggccttgtcctcaccatatcccagctccaaggtgaccgtaggaataggtaccttattggtgtggcttgagctcgctgccatgcgtgcacaaccatcattgaagcttgccgtcgagcacttggttggcatcataggcagcgatgtcttgggtgttggaggatgccgccttaaggtcagtggtggctgccttggtggcatccgctgtctcctaggaaagccttcccccttagagcttcgatatcttcaaacttctctaatgcccgatcaagcttatcctccatcttgcacctggcatctatccattcctcaagaaacagccttagtgcttcatccctgaatattttctcctctttcatcacaggcataacatcttccttgtacacttcgaacgggcatgacattcaatcaaacatgtggtgagcgctgctctgaagaacagtactactccccatgcctaatcctttctccctcgcgctgttgagtgatacaggtgttcctcctctcttccatgctaagacaccacgaatccaacagccagattattagcaaccttcttcactcaaaacaagcagtagcaactagcaagacatacaagcttctgattgtagaaagtataaaccctcttcactcaacaagtagcagcaaagagacacaagctcctgtttggtaccgagaaaattaaggaagacgaaggagtggctcaaagtgtactaaacttggtaggaagaaggggaaggagagagagagatcgacaagggtccattgccggttcggtcgacctgttcgattacctggaagtgcaacatttttttttcttttgtctctctcccttcagcttgcttgggctgatatttaggtgagctattgaattggccccatagtgcagcttacttgggccctaacatgtatatgatgtcacaactcgaattgagatcatacacacctgtgaacgacgggtggatgattttttttccaaagaagggtttttttttttatcatgcctctacatccaactaaatatatgtagtatttttaaatcatgaacttagctctcaaacaacccaatctaaaattcgcttttataaagatttgaattcagtagcttgggtgctaacgaccggtggatgacattcgaccgaatatatcatacgtaggcacatgagacgtacgttcctctcatgtgatcccaattgctgcgccacctccacctccacatcacattcactcgactcatgcgtcgacgccgcacgatccccatcccgttttaaaccctatcacgagcgcccgcgccaacctcctccgatccacgtacacgcgtacacgcctaattaagcttatatacttttctccaaccaaacctgacatggcgtcgatcgatcccctcttctatctcgattagtgtctacaccatgcggcgccgcagcggcatacgcagcttctgccacggcgtcgactccacgtcgaccacgatgcagcgccggctggtcggcgccgacgcggcgtcgtcgtctttcctcaccgtgccgacgtcgacggcgtcgtccgtgggcgtcgctgagagcgaggcggcggcggcggtgacgctggagcagatgatcctgcagcttgacctcgaggaggcggcggcgaggaaggcccagcagcagcagcagccgcggcgcgcgtcgtgcgtgaacagctcggacgggcgcgtgctccggtcggcgagggacgcgctcagccagtacccgcgcttctccctcgacggcggccgcgacgccatgtaccgcgcctccttcagcgaccaccaccactactactaccacgacgccgccctcgcctcctcctcctccggccaccggagatcgccgccgccgtgccgcgggatgccgccgacggtggccggcgagagcgtggtgtggtgcaagcccggtgtggtggccaagctcatgggcctggacgctgtgccggtgccggtcaggggaggagggcaacggaggggcggcgccgccgccaccgccggcgggaggaggaaggcgagcggggcaccgccgctggcctcggtgatcgccggcggcggcggaaggaagcggagggggaggaggacggggagagaggaggaggagctcgagaaggagaggctcttcatggcgctgcatggctatgacgtggcagtggcccgcgcgtgccacgctggcgcccttcaccccagcgtggcccccaacgtcagtgggatgggcaggggtgcggaagatggctggggatttcgacttcctcactgaaattaatttgataatgataataataataaaataatggttattatttttatgtagtatatatatatatatagcaagttgttatagacacatatttcctacagtatatcctaattctcacatgaattttcatgtaaaatcgtcaacattactagcgaatagctctatattttcaaaagagctaaaatgatggtatgtactgctgggttttgcttctcagtttatggtctgtttttttaggaaaaaaatatatttataacctagcttacgtatctgtaaacttatgagtagttgttactctgtttataaatgtttgattcccctgcatgtcttgttcacattgtatgtcttgttcacattgtgttcgtgcagctaaactagctaatttttctagatgttttagtgatatttgttaattggtgtacatgaatacatggtgtatacccgtgagtaggggtggatgtcgagctagctcggctcggctcgttatcctaacgagctagaaacctagctcggctcggctcgtcaacaagctcgagccagctcgttaagctcgcgagctaggggcaagagacatagccggcgagcacggggaggaggggaggagcttgacggtggaggaaaagagctcgagctcgccgccgaccatagggaggagctcaacggtggaggggatgaactcgacgcagctccgccggcacttggaggagacgagctcgagctcgccggtggcgtcgggcgctaggggcgggcgccagcggcaggggcgctggatcgctgggggagaggtggagatcggcggcagcgggcgcttgatctcccggcggcggtgggcgttgggggataggcggagaccggcggcggcgggcgctcgatctctcatcggcggctggcgctggtgggggagaggaggagaccggagccggcgggcgctggcgggggagaggcagagaccgccggcggcgggcattcgatcttcccgcggcggcagcggcggcggctgggggagaggtggaccggcggctggcggttaggggagaggcggatcgcgcgctgctacttggataaaggcggagtggcggcggctgggggagaggcagagtggcggcggcggctgaggagagtggggaattgagtgaagagtgaggactagggtttgcagtgtcttgggcttgggcctttttgttgtattgggcttttgggctatgatggagtcctagctcattaaggctcgcgagccagctcaagctggctcattatctctaaccagctcggctcgttagaaaattcaaacgagccgagccgagccaagcgagctaacgagccacgagctttctggccacccctacccgtgagggcttatgtgtccaagttaactagctcatatatgtttgcggtttgcactaatatgcagtcattgatatagctgacaagctaaaagtccaagattaacttgccctgccattttttattagacgaccctgttcctctattagtaccaacatttaacgaggttaaagtgcataattactccttttatggctaagagtccagatgaatatttttcacctggcagtccagatgcataaccatttcttcttgagcaatgaacgtgctaaaacttcattatcttcgtcacctaaactgcatcgcttaattcattccgtcattaactttacccaaaagtgtcaataatcaattaatggatcaagacagaataatcttaaactttatgaatcaataatcaattattgctgacatgaaggctctcaacagcatatgtttgtttattctagtgccggtgcctgtaactctcaacatatatgcgtgcacctacctttggcccgtcgtcgttggcttaaatattcctattaagatgagatatagatcctgcagatacactggtgattaatgaagttaactaattaaggtggttgacagaaagatgaaagcttgtcagctagctagcatatatagatgaaactttctaatcgctaatcaccttgtcggtgagaaaacagagatatactctttaggccttctagaatctagaggctgggactgggatatattcataagggtctagcccatttttgcggttgggataaagggagtaaatttctttttagaaaaaaaaggaattttttattggtctcggacaataatattaagtgatagaactatactgacaaaactcctggataaagggagtaaatacatttcaatgcggattgatcagtccttgcagcttccgtggctggctgtttgtttgaacctatttgttctcatcttgttggcctctatatattctcatcaaagttctaaaaatgtgggtcgtgctacattcatgaagcagttattacttgttggttaggctgttttgcatactcctgtgggtctcttatcatgcattatactcccatcttatcattcatgaagtattacattattgtcaagtggccactggctagtgtaactaatgtcttgatcccatctcatcttttgagtagtacttcctctaactacgataatctattacacctcctaattcttgaatcaaacgggaaatttctattactactgctgtattacattttgaccttcctttaatgattttacagtttgtgattctaattgaaaaggtgtagtgcttctataccacattgacattgactatttccttttcttctaccagtacttgctttgctctctgtaactttgtttctaatatttttctaacttaccttccactcctgaaatggccatcaaatgaacatctccactccttctccttttgcttaaaaggaagaaaaaaaggaggagaagaaatatgttactcttaggctctactcacctgagctcaaaaggtgctttgccagcgagagaaaatgcaagcagggagattgcagctatacatagggggagcagtgtgtactcatgatcatccaattcttatggcccataggcaatagctcctccatatcttatctgcccagatcaataaagagatcctcttatcatctttctgtgctctggaaagagggaatttgatcaggcatatcactgagaaatcttcacatatataaacaatacaaatgtatcaaatgcatactctttaacagctgagatttttataacgaatagagctaatctttttctataaggtaaatataaatttcaaatacagtggcctttgttgtcaaacgaaaagaagagaatattcagtgttccttgttggatttgaacgcctatagttttttccgttcaaaaaaaaatagacattcacttctccttttcattggacagcaaagagtacagcaagatccattacttgctaactaaaatagggacaggcaatatccctacaaaaggccaatgggtccctggttttattagtccacagtttgtcactgccttactggtgaaacttacctgttgagacccacttatcaatacaatcatgtacccccttgcttgaatgccacactggactgtcttgtgaataacaaatgcatttctggaataaattttattttatccgcaggcttctaattacacataaaaatgttgtagcttgtaagataaccttagcaacttcagttctaccctacaaccattgaagtcactgttaaatgcacaaatggttgcactgtcgaaagtaaaagagtccacttaagatgaataccacaccgaataaaaaaggatcaggcaacagatacagactttaacatacatttatcatgaaaatacctggatatctgcaaagattgaagggatcatctcatgaacgaatcagtacaacagaatgtacaagcagtacttgccctgctgacctcaccatgctcagataaagaaatattacgagcccaaaattgacggggaacagtgtccgtcagtaagaaaccactgaaaaaatagcaaggcattttgttttgagcgataatcacaagattgattagaatccagcatttttcaggctacagtcccacctgttgcttcactgaaaagctcagcatggcacatggtaggtgagccttttcttatgacagcagaacgagaatggttttcattagccaagcaccgcatccacccattaaacgttgtcgccatgtgccacggaatataatctatcattagctctgccatccaataatccatacttaattaccatcaccactcccaccctgcttcactctgtgtccctgtgacagacaaaaaaaaaaacactgagggagttacagctgttgtggttctgactgatctcgagctcccttgaccaaagaatcccaagcaacggaaagcatatgctgctttgctttgtcagcttccttgggtatgtacatatggcacagctgaaacagcaagctccattccatagctaggtgtcccaaggtctatttgatctgcagttataaggacagttttggaggtagcagctacggcagattgtactgtca

SEQ ID NO: 14011 - DNA, 5631 bp, Oryza sativa
ctgcagccctgttcggcctgtaccttttgcacaaacaagcagtggcgcccgaaagcatatatatgatggatgtttaggttaagtcattggaacctttctattgattaatcggttgattgaggagcaagattaacgccaacttttagcatatatatatcggccagacaaatttgaaaagtaaacttttaactctgaaaaacatttcttaattatggggcgttcatttttctgccgtacaacacaaccaaaacaggcctcgattaaacaaatgtgtgccaaattttagggacagacgtgcaccaatattatcacaaagggaacgaacacaataaccaaattaatgcgccattgcgtgcgcactatgggaataattttgttacatatatatataaatagatgtggtattctaagataaaccaaaatctttttaaattttctgcagaagatgctagcttgagcttgtcaatcaatatagctagagctataaaaattaaagaaaaaaattatgtcctgccgtacacaaaatatatacttgacaatgagctaggagaatcggttttgttcctgataaaaggtgatcttagctctgtcgatcggccagaattcactttcactagaaaaaaaaaattgttcgaaaagagatgggcatgcacgtacagctgaaattctcttgtgtgatggctaagtaaagtagtaaactatgggaagtgaatcatattcccttctttgataaatagaccccttttgttttcgagaaaagaaagtaggtaggattcctcgcacagcatcacaagttattttcgttaccatatgaaaattcttatctatctatatatcaatccattgtgaaatcaattagctttatgggatatataacactaatttatcattgtggtccaagtaagatgcatggatattaggatttaaccgattaatcatgcattttatatacacaacccatatggtttttatctctctttttctacgcgtcatggtcacacgataacatgtgttgataatcgagaacccttgatgtcatgcatgcatgtatatatttcaatcgactttggtttgtcccaaaaattagagaataaatactagtttatttttcttctttttagagattgtacgatcactagctagctaggtatagctagctgacggatttttccaattaggtatatatccatgcacacacaccgatcttttcattcattcttttctttcttttcacagatatattccaggtagcttatcaagcacataatgttggaaaattaaacaaggaatccttaactaacaaatgaaacacggggagggaggaagagagggggcagagctagagagctagctagctattgctacagcacatcttcgatatcatgacctaacctaactacgaccccacgtatactcgatactaaactactatagacgaacgaacgatcgttcgttcgtttcgcatatatctataaatcctttatgatatcgatatctctatttcttagtatatctaatagcatagtagtaggttagtatatctgctatagctagctagcagtacatgcatgcatgcacacatgtacatactaccatatctctgtcttgtctccctttcacatgtcacctctgacccacaaacaaaccctttccaagctcctaacactagctttaccttcttcttcctcctcctctgtatatatacaccccctcacctccctatcttgcacccatccatccacccatagctatctctagctagcttgcacattcttcattcttcttgcaatcagagctagagaaaaagagtttgagagagatctaagagatgtcaggggtttgggtgttcaagaacggggtggtgagattggtggagaagcagcaggcgacggcggggacggcggtggcgggagggaggaggaaggcgctggtgcacacgccgagcgggcaggtggtgtcgtcgtacgcggcgctggaggcgcggctgacggcgctcgggtgggagcgctactacgaggacccctccctcttccagttccacaagcgtggctccctcgacctcatctccctccccgccgacttctccgccttctcctccgtccacatgtacgacatcgtcgtcaagaaccgcgactccttccgcgtcgtcgacgcctaaattgacctatgtataggctcgcatgcatgcaaggtagacgaccatccaccttgcatgcatgcaggctatcattctctcttcgtctccgtcttcgtctttcatctttgttgtggtgtgtgtgaatttattatacttcttatgactgtgtgtgtgactgtgtgagagttcatggagagtgatgagtagtggtatacatatgtgtcgtcgctgatcgatttggtttattaccttgtgggtgggtattaattatcagcagtgtgttatatcaattgcttacttgtatgtgtatcatgtacatgagtgagtgtggctgatgcatatatatagaggtctttaataattatgtactatatatttgtgtagctagatatatgtactacctgctctgctatatgtaataatgtacgcatgtttttgcttataattaatcatatgttgatctgtatatgcttatatgcaggtgcgagttaattgccatcgatttgaattgttcttaagttgcctaaatatatgtgaacatgttgatagagcattaataaacctaaatatatgggagttcttgtcacctgtctcggctctcgagtaaccaacaaggcgatgggggattacaagtgggccggagacctctgtactgctgaaaaatgggccggaaataaactacacaccgctatacaagccgggagttgttctttgttaggcccatgatctattggcttcatcaagcaacgttgcattccttgatggaataagttttactttggatcccccatcttcacgtgcagtttaaatcgcatcatttgaaccataatatcatatatataacacatctctcaactctcaaaatcagtgcaaaagatgtcccaaaatagtttgaatggcggttttgactgacatgccatcggcgtgactagtttgactttgtcctcgtcccacatagcgctcacatggcactaggagcataattaaaaaatatatgggcccatatgttagtcaaacgaagaatataaaataaacagtgggtcccattttcctccacatcaccctctctcctctctatctcctctggtcggcggcgcctcattggctcattcccctgcccttctctccctctggactttctctcctccctccttgaaggtaagcagcgatggaggatagaaagcacgaagaccgctgcggtgcgggtgtggctggtgggggagaagctggaggggcgcgcgaaggaaggccagcgagctacgtgcccttcccttgttcccctccctctccaagcgctgttggcagtggtgaacacgacgacaatgatgacaatggcgccggtagatcctgctcgccattgtttggttcgatttttgctaaggtttgggtgcgggctttcgttgtgggtcttaccgggggctaggggatttgtgcacagcaaggaggaggaaggcgagtgcaagtacatccgattgaagcgccacgcattgccaaggtcgttcgcacacaagttctgtctgccagaggactcggacaccggcgacatctccacacattgtgagaatggcctgctcatggtcatcgtcaagaaatggatgctgcctgagaagaagaccacgtctgcagcccttctccccatcggccgccaccttggaggcctagacaaagatggggaagagagaaagagagagggggaagaagattggtttgctgacgtatgagctccatgtgggtctcacgctgactcggccatgttgagcgtagtcaactcaccatatcagctaaagctgggcacattactactattagaccttgggtaccttgatattacagataaccggatgcgatatatctaatattacagtttaaggacactatttaaactcgacgtcgagcgacggatctaaagtaaacttattccttccttgatagcagagttgatgtgaaaaacaaatttgtgtcatgtgattggaaagagtagagtgtgttgacagagtatttatgcctttatggagacatttttcattagaaaaccagtcatttttatgatactgtaaattatttacatttatattgtaattacagtataagttttaaagcttacactataaattccaatacaaatattttattcaatttaatacacggtataagagaactaggataaaaatgattgattacctacttgaaatagtagataggagtgacaaaaacatatttacatataaaagagagggggatagcaatcctataagaaaaaaatgactaaaaccgagtaaaaagtgtgatgacatatttttagcaaaaccaatgactatattatgctgggctaaattaactacatgatattctctctttttctttactttttagaaaatattgtaaactcgtagtttgttgtagtacgaaaaaaaaacttgtgaatatttctcccttacatctcctgctgaactaggagagggtttaagttgctaggaaccaataatgggtactgggtgtttaacttggtcaaacgtatctaatctgcaagacaatatgtatcagccctaatctgcaagactaacacatcgcctaaacaactaattattggcagaaatttgtgtctgcttagccttcatccatagtatacaagtataataatacatgatgtccctgttgcgaccaaccgcgtacaaaggtgacctctcactttcattttcagtttctctttttttaaaaaaaaaaaacgaattgaccgaacacgaaattaaacaacagctgatcatcaaaacagatgctatgacgatctctcaattagtcgattgatggcgacgtatgatccaatattagctcgcaaaaagatcacccaaatcttggtcctaaaaagattatcagtgtaatctgcaacaattagtaattaattttctcgtgtatatatgaagggacactgcaacgacagaaccggatacagaacaatagaacattgtttagactgacaattttcttgcgttgatgctagtgcgaccccaagtcacccaacagctagcatttgtttagacgacaagatgatattaattaattatagatgcgattaattatacaaaccagaacggtttgagtttttcaatctcgagagtgcatggtgtagggtaggccttccaaggtagtatcatgggatatcttaaggtttgtagttcagtttatggtacctattgcttagggaaatgatagattttaggtcactgagatttggggaaatcttagtcacctactagctagccgtaggagtcgtttttaacctctagctaaggaaagaagaggggaaggcagtagccatggcttacatgcaatggcgacaatgacaacaacgagcttcttgccgatcctttcatgtttttttttttatcaccgatgaaaccggctccgttagaggacctacggattagagtcagggctcaggtaggggttggaaacagcatcagaggatgaggtgagggaatgggaacattttctct

SEQ ID NO: 14012 - DNA, 1271 bp, Oryza sativa
ccaattccttattcctcatttcttgggtggaactgaaagcctaaggaatctcccatgggtcaaagttgtaaatgtcaatattggtggtgatgtgtatgaggaatgacaaccccgtgccattcctcttaggtaattaacaatcgattcctcgtctgtcggatggaactggaaccctgttgacaagctgaccaatgacatgagccacatagccatacatggtgtatggttagtacttgtgtgacttgggttcagatagaatccaccatccccgtggagtattgataaggactcatcaatttgtttgtcttctttctttctagtatctgttctttttatgtgtagtaatccatggtcttatttgtaaagtcattgcacaaaatcacttatgacaccttgttgtacattgtgttggggagactcaatggtcatgcaatgtcctctattattattttaggcagtgtgaaaaagttgaaaccctactctttaacacacataagatggaataaggaaagatgtaacgagatagagcattagagctaaccacatagtcctagctaccactgacacaatccttcgcaagtttaagtttatgtaaagaagatctaattgtctcaagaaaaaaaaagcccctagtgtagaggcactccctagaaacactatgaaatcacctaaatatttgtagtatagaacacattgtagagatggttttatagacatgtgcaaaattatgtggtagacattttttagacaatttctaatttttttctatatgtgtacagacattttctcgatacatttttgtctctctagaggcattgtttagagggtcgatttatgttgagtaagcagctaaggatatatctttgtttgcctttaaaagtttaccatgtcccttatttgtccctcattctctcgatggtatgtgggtcaacatgccatgggtaaattagggataatgtaaaacacatgaagattaaccatgatgtgaggataaaatggttaattagtccggtgaataccgagattgtgttctttatctgttcaaaagaaggtagtggttttttaggaaaaaaaagtattgagtttaagtattggtcataccaagatagacacatgattattatttatctcagtttcatcatgatcttttattacagtagtagcacaattaatctagtgttattataaaatgcttccactccttggaaactagaaaacaaagagtatttaggcattttgtctctctggttgtaccaacgatgcaagaaaag

SEQ ID NO: 14013 - DNA, 688 bp, Oryza sativa
tcaccaccggcctgcctccgtcgccgccgattggtgtctccgcctacacggctggcctattatgccgccgctgttgggcgtctacgacttcaccgccggcctgcctccgtcgccgccgagtggtgcctccgcctacacggctggcctattatgccgctgctgttgggcgtctacgtcttcaccgccggcctgcctccgtcgccgccgagtggatcctccgcctacacggctggcctattatgccgccgctgttgggcgtctacgacttcaccgccggcctgcctccgtcgccgccgagtggtgcctccgcctacacggctggcctattatgccgctgctgttgggcgtctacgtcttcaccgccggcctgcctccgtcgccgccgattggtgcctccgtctacacggctggcctattatgccgccgctgttgggcgtctacgacttcaccgccggcttgcctccgtcgccgccgagtggtgcctccgcctacacggctggcctattatgccgctgctgttgggcgtctacgtcttcaccgccggcctgcctccgtcgccgccgattggtgcctccgtctacacggctggcctattatgccgccgctgttgggcgtctacgtcttcaccaaccggcttgccttcgccgccgccgaccggtgtttccgcctgcacggctggcctattatg

SEQ ID NO: 14014 - DNA, 4111 bp, Oryza sativa
gtcccatatggttatgattatgtgacaattatgtggatttggtctaaacctaatgtgactgatgtacccatttttagtgttttaagataaaatttaagctctcttggatagattagtttttttactccctattttcagcttattaaaccaaaaacaaattctaaaggagagattatacgtaatctcttgttgatacctgtttggattaatgtcaaaatgtgcccatatgtagcttataaatagtaaatgtgttagtttgatttgaagccaaatgattggtaatgcccatgcttaaattggcaataattctagaactctattcacagtaatatatatatgggttaattagatacatgccatgaaaattttgccggttttgaaatatgccattactatttacgtatttggaatgatgccattgctatttgttgtaatcttagtggtgccgctaagatacgtattttgcatgtattggacgaaaatgccctcatcttctacctctctccctcttctctcatcttctagctctttccccgctgcttctactctggcgccgtcaccgccgctgttgctgtcgctgccgctcgccgctccgccgccgccgctcgctccaccgctgctgctcgctgttgctgccgctccgccaccgccgccgcagctcgcgccgctcgccgccgccgccggtcgcttcgccgccgccgctcgcgccacttcgccgccgccgctcgctccaccgccgccgctcgcgccgctcgccgttgccgccgattgctccgctcgttgttgccgccgctccgccgccgcgccgctcgctccaccgctgcagccgcttgctccgctcgctgctgccgccgctccgccgccaccagttctctgagctgtggaagaaaggagggggagaaaaagaaggaaagaagggtaatttggtccaaattttttcataaatggttggtagtggcatatcttaaatatttgtaaaattgcaatggtatggttccaaatacgcgaacactgatagcatatttcaaatccggcaaatttttaatggcatatatctaattaaccctatatatattgtctcccaataacatcaatgcaaacacattcacctttaatactaccctaccaaaacattagtagtgtcaaaatttgcttaaattttggtacggtactaagccaaacaagcccataatcttccacatcttccctgatttgaacgtgcttatcgtaaaaaaaaaaccatgattaaattattgaactatggaggactggaggctataaattataatctaatttgagtttaattccaaaagaatattacgagcccttagcccggtcaaaatatcgggcgtggaaagccgccattctatatcagcttcatgctagagcacctctgctgttgattcagtaattcacttctaaatttctaggacaaaatttctatgtttcctttcctaaataatatgtggagctccagagtccagattccggccattggatcaagccatccgagcaccgtatagcggcattagccatgcacgatctctaaacttccggcaggaatatcacggattcactatataagtgcgtattcacatagcttattcgcgtcctgtcatggtcccatcagtgaccttcacagctattagtcagcctctcggcatgtgcttataccctatgattgtcgtgaaattaaggtaaatacatggactctgtcaaactactgctatggggaattagatgtaggactccagtactggaaatgcatactccctccatcccaaaataaatcaacctaaggcgggatgtaacatgacctagtacgatgaatctgggctagggcatatccggattcgttgtactaagtagtgtcacatcatagcatagattagctagaaactaaggtgtcccattagtgcacaaacaggacaagcttacatctgtatgcaaattagttgttggtggttaacgattgtctttgctttgattaaaacaagggtgccaaaaaagtacataacttctcttatgttatttccaaagaactcgtaaagacaaaagttttacatgctagtatgctgttctgcggaataaatggagtctgctacaaagagatcgagcacataccttcccaataaaactcacaaccaaaggcccagatcttgagatccgataacaacctgcacgtcaaaaacattaaccaccagatcagaaattttgcaaaatcatttcccacaaagaaaataatgggagcatcaaatcatacctatgtatacatcagaaaaatctatgcatagttttgcaaccactggggcaattttaacctgaaaaagaacacagtaaaagtttatcagatactgagatacataatgaagtacttctccaaaagtaaaagttccaattaacttgctagttaattggagaaaattttctccaagaagtgagaaaattccctacaggattttccaagaagttttttttttctttttgagaattaatggataaggtggatactaaacgtaaaaatggaattaacaagtgtgcaatatttatccaatagttgccaggaaagtaacatctaggattgaaggaaggtaaagacaaatagtgaaatataaacagctacacaaagaaacaatcgcgaggcatagcatttggtcaaaatcaagattattgagatactacatcaataggggtcatattacattgttctatcttaatgaattgataagtgaaattatttaagaccaaacatactataatgatctattttggaactgacagggataaaatatgaaggaactgattctgataacgcaactagaataagaacaaagctaattctgactgagtcgaagagacatacatctaatagcgacgtgcagagatgctttgacacaaaagatttagccatcactaaaccgctctcttgtgtgtctagaagacaaccccactccgtttcaagctcatccacattagttgcagcgagaatgaccacatttttgcatttgatctgcataagaaaccagttatctataagacaaatgaaaaaaaaaggaagcaatttccgactctcttttcatagtttacagtaggcattttcgtcacttcctaattggatgtcaggcttttcattcaggcatacttactaaactttggatatatgttaatacctctgtcccgaaatataagggattttggtatgcgacttaataaatgtgcatggaccttgttactacatcagattatatcattggcacatgctaactttggagaaattacaccccttgtaaagccaaaaatatgttcaccaaatatgtatttcagaagtaattcaaagaaatgcattaaaacaacataacgtaccaatggcaacggtagcattttgtgatgcaataattccgtaataccttctggcaacaaagccatctgaaagagatgtggagttaaatgataatactgcagcttgcactatgctagaataaacatgcacagcactagatattcaagaatttaattgtatttgcgaaccagattacctcatttcgatcaccagtgtaattgtctcctatcagttgactaaggtattcttcaaactcttcatcaggagcctatgaaaattcaaattaaacatgttgataacagtaaatggcatttgtgatttgttcagtcaaattcatgaagcaaccatttagtgtatgacaacagttcaaggctatgcacatttttccaacagaaccagcaagagagctgaaagctatgcacactgaggactttctatatttcaaagggctgtcataagaatattttcatgtgaaactgcaaccaatagagcaacaagctttcgatttgtcatctgaaataagaaatgcagcaaatgcacaaaacaatactaggaacaatgattttatacaaagacaaacatgaatgaccactctaataagacattgctgaattacttgtatcactagaagcaagatgattttagaataaaggaacactgaagagcagaagctcagcacaaagtagaggcacagcagaactagagcagaaggataaaggtgatcatgactaacaattaggctgggaacctactataacaaatcctacagcg

SEQ ID NO: 14015 - DNA, 2535 bp, Oryza sativa
tgaaatgagatacaaaaggaaaatggaagctcacatctccaggattggtcttctctatgtctttcaaacgccttgctaatccaaaatcgcacagctagaaaattaaagaaatatatatcgttagttacaagctattgcctcactgtatgaattatttgatccagtaagtaccttcatgcacccagattcatcaagtaaaacatttgatggtttcagatcacaatatataattccttgtgaatgcaagaacctaaagtccaaattgttttgacaaataagatttcacacatcatacagtagaaataatgaaacaaggaaagaactttactgaagagctttcacaagatcataagccaagtcatgtatagaattttcaggcagcttcttatcctgcaggtcattgaagaaatgtaaaatgttcatatgcaaatatactaacacaaaatactaaaaatttgggtacatattagagcatacttaaatgtgacatgtacataaatagacagccaaagcaaaagtttttaacctgtcagtttgacaatgaattttccttccattctactacctccatcccaaaatataagaagttttagggttaagcccgtatgaagattgagggggaggggaggctgtgattggttgagaaaagaaagtaaatagagaaattaaatgggggaaggttgtgattggttaagaagagaatgtaggtgaagaagttgttatattttgggatggaaggagtaccagctataagctaaaaaaaatgaacatgtttttttaaaaaatttcttaaggagcaaacaaaagacatctcagcatgcacagagagagagagagagagaaatatttgtaaatgaagcaaatgcaaatcaaatacaaacgtgtgctattgtacaagtaaacagctgacagcgtgctttgaactagaaaatggtatgctgcttaaactgacaagcgagatacctgctcaagcaagccctttaggtctccaccaacgcagtactccagtattaaccaaaaatgagctgaggtttcgtacctggtacaacaggtacaggcataagtatggtttgtagtacaatgttaagggaacaataacgatgattgcaaccaaactgccagactatacttgtcattattgttctaaaaagtgaactgcttgccattattgcaccacaacactagtcccctagaaacgtaccatgagtaaaatttcagaacattcggatgatctaaggaatgaagcattcggacctgcaaagaaaagttcagaagtactattagtggagtaagcaaacatcctcattcctcaggctcattaactatttttcttaccatgctagctaaaagattattttttaattgaagactagaacatgtgctcatcttctatccagaaaatattatctaaactactgatcttcacccttaagcgctttgctcaaagagaaggtacattcctgaccaaataacataacatttgacagcacaccaaatgtaacttatgttgcctcatttcatcttctctagaaatggctataagaaatagattgtttcgcacgattatcaggaaatcaaaatctaaacagcatcccagcttaagcatgtaaagtgctttttcccaggaaataaatagcgatccactagtacatcaagatactatataacgaacaatgtaacattctgcccatttaaacaacatcagcttacaaggaaactctgcactctgcatgcccagaaaacagcggttaacgaaagccacggtatccacacagtctaaaacagtcacttaaactatcaaatcaatcttggatatcatatcacgatttgcttccgggaaatccataggcacccgcagatcaaatcactccaaggaccatttcacggaccaaattaaccaggcccgccaggagccaagccctccgattcaaaatatccccacccaaaatcgcggcggcgcatgcctaccagctactactgatgaaagagcagggagacgacggcgccgcgctcacctcattgaggaccttggaccgctgcgacttgtcgacgctcttgacggcgaagtactcgatgctcttcttcttccgccccttgtacaccgtcttccggaccaccgcacccaaaaaaaaaaaaacaccaaaaacaaatcagaaatctcacccatctgcacccaatccgagcggatccgggggcgcggggaacacagggaagacgaggagaggaaggcggagaggggggttaccgagtgcttgccgcggccgatggcctcgtagacgtggaagttgttcatggcggagcaccaccaccaccagcagcagcttctcctcctcctcttctcgtcgacttctcgtcgacctctcgtcgacggcgacggctagggtttgcgatttgaggcggaggaatggggggggagagagagagagagagagagagcgggatttcgatttgagattggcgctcgctcgatcggctagttttggagttttggggcgttccgtttcggcgtagttttttcaaactttttttttttcg

SEQ ID NO: 14016 - DNA, 2063 bp, Oryza sativa
tttctgggcatatataggtattggatcttcatcctctgcaaatgatggatacatggggagaaaatacttctgagagatcttttccaggtcagatactgtttgctcattagacgtcaatgaagagtcactgaagatcacaatcatcacatcggacagtatctttaaacataggaatctggcatcaccatctttattgcccttgtacaagacggataagcttggaaggattcgacttgtgaatattttgtgttcattaagtataacagaaggctcctccgtggctgcctcaagaaccctcaatagtgtcatttgaaaatcatcccgagcctggatgtataagacacgtaaataatcagataaggtcaagatatgttaaaaaatacagtagtaatgcaaaactgttaaggcaagagccacagcgcagcatcaaaacaaaggatgggattgatttgacacttaagtgcagttacaaaatgaatgtggtcgtcatgttttttcatcatggcataaccgtgcgtgaagttcttagatcatacctgaaatggtgcttccaaaattttcataagatttgccaactgaagcaatacatggctcgtcacaactctgtgattgaatgaaacactcccaagaagatgaaggataacaggaaacaaatgaattatgctctttggatgagctcgtccagttaaagcagtagcagctccatgacgcttgcctcccataacctgttgtatatcactagagacagtgtcaaggatgcctgggaccaatgaagcaaccaactgcacaaatgcttctgtgcattgatgaatgaagccttccttctcctttcccaatctatcaactgctgatagtagttttgcattgcaaaagaaatgaggaagccatcttcgactgttcttgcaaagaagagcaacaaatagaagggttttgccacgcagaacatcagttccctgttcaataagagagatgagtccaggaaccaactgcttctcttctgttaacgactgaatgtagcggttcatggttggtatgatttggctgttaactagtgctgaattcagaagattcaaactgatctgctgctcacgtgaattgcctttaatgagtgtgcatgcgatatccttgaaggccagcctctccagtattaaatgaatacaagatgagctgaagcgagctaagcgtgccaaacaagatcctgcaataagtcttgtattctcctgcttaccagttgctctatagatgtagcacaggtgactgattacatcttgggaagcgaaacgtgaagtccaatctgtcccttggctacagatgttatcaatggttcgtaaagcataaagctgggctagatcatcttcacctttacgcaagattgatgacaccagcgcaattacagaacttggaacctgcacaacttgcaaagtaaaatcattaataaaacacaataattaatgtcatagttgtgaatcaagataaaaggattcctcacatgtatgtatatatatatgatatatatactacttgaccagtaagatatgaaagtaaaggtctcattaattcattaacactattacatagctgacctatatatggttccacaaatacaagaatatagtcattaaaaggaaagcaggttaaaacacttgaaagaaaattggtatggaattatgtcccttaagttcatcaggccctttggagaggcaaagttcaacctataggtgagagcaaggttatcaagttgcagaaacagaaattgacaaagagatccaccctcaattcatggacatacaatcactaaaactaacggatagatgtaatttgaatcactcctgattaggctagccattgaacaggattggtatgtggttttctgtaaaatcatacaggtttgactaacaataaacatgtgcatagacacaaaatcaaagaaaagagcatgtatataaacataatttagtccatatattatagtaatagttatgaaggtgggcagtgtgattatgtggttatgtgaaaaattcaataatgcagtatatactttcaactgaaagaagcttccactt

SEQ ID NO: 14017 - DNA, 9200 bp, Oryza sativa
acatacgtcgacgacaccgtaagaatcatcagtttcttcgtgatccttagccggcgccatggcggataggtcggaggtcaaacggtgaaacttgctttagagcctaacgaaaaagttaggcaaattttgctacaggacatcatgactttgcggttttagctataggacaccgcgcgaagtgacttttggaggaagacactcccaaaagttggatatttgctggtggacaccgcagccattaaaataataattttcggttagagaggagagagaaatcgcatgaaatgtcacaaatgcccatggacccacatgtcagctctctcctctctcttcttcctctatcccctcggtgtggcagcacagcgctgtgagaagcgacaggggacacgtgcagaggccggtcccgtcgagcgaaatggcgatggtgcaagcgaagaggattggatggcgagcagccgatctgggtgttttaatttggcgagttcgaggaaggtagaagcgaagaggattggatagcgggcggtccaatttggggaaaatagcggtggtggttgttgggcgccggtgaggggtgaaatggggtcgcggaggggcgtgggacttggtggtggtggcggcttggtcgattacgcactggaggcggtggattagaggttgagcggcggtggtggttgaggcagagctcccatggccgtccatcctcccacactgccatggccggcggtcttctccgccccgctcccctaccccacaacaccgcccagcggcattgcggtggacccgcactccgacgccgccttcctcactgtgggcacacagatctacaaggtgttcgtccaccctgccaagaaggccaccgccgccatgtacaagcgctagtttcagatcgacgacctcacccgcttcctgcaatcgcgggcgcgtgagatgaagcgcagcggtgccaatgttcctcgcatgccttggctggagctccgccgacgtgcctacctcggacggtgcgtttgtggacgacaggctcgagctggtgaggagaaggagcccactggtgctggaccggacggacgacgcgacggaggtcggctccgcgatggcaaacagctgcaaggcatggctatgttcaggaactggggcgcgtgctgtgcgcccgccggaggtggcgccggccatggcagtgtggaagaagggataaagagagggagagaggagagagctgacatatgggcccaagggcatttgtgacatttcatgcgatttctctctcctctttaatcggaaattattattttaatggctgcggtgtccaccagcaaatatccaacttttgggagtgtcttcccccaaaagtcacttcgcgcggtgtcctacagataaaaccgcaaagtcacgatgtcctgtagcaaaatttgccaaaaagttatggttggtatcgtctggccggcgtgaaatttaagccagttgtaaacatgttgcgacttgcgacgggctcaagagtccaaactccagacctacccacccggtcatgtacagggctctataatatcatatcgttggagaaccgatgggcaattggtccgtccaatacatgaatacaacaaaatttaccaaaaaaaaggacgagaaaatagaggcgtggggagatcgtgttgaggtgggatgacttaaaaaatattcgaggcgcctataaattggacgcctgatttttttttcaaaaatcggacgttgttttaccaagcagatcgagtatgtttctataaatagatcggaaatgttttagtcttttgaaaagctgaaacacaaccaaatcacctcatgaaacattttgctacaacgtatgaaacaacggtttccaaaaaatcagacgttgtttcagcctataaaaaacaatgttttagcaaatagcgtaaaaatatttcaattcttaaaaaaagtgaaacacggtcagatcgttagatgaaacaatttgattcaacgtatgcaacaaacgacttgaacctattgcaacacttaaaccctatgtacataacaacacacgtgtccaaaaaacaatgtttcagcaaataacgtaaaaatatttcaattcttaaaaaaagtgaaacacggtcagatcgttagatgaaacaatttgattcaacgtatgcaacaaacgacttgaacctattacaacacttaaaccctgtgtacataacaacccacgtgtccatcaagttgaaattattaaaacaatatcaacatccactacaacatttgatccatgcatagtaaaacatcacgagtacaatagctgaaacactgttagtggaaaaaaaatgaaacaaatccctcttaatagggtgtttcctttatatccgggcaactgttgcaacggggtgcgctgtggtggagacgcgtggaggcgcgggcgcgcgtggtggcggcacgtgggcggcgggcgcgctcgattcccgattttgttggtgcgtgtagggcgcccgatctcggacgttttccaaaaatattttcaatccctttttacatatgttaatttcatgtgtgtcttctttacagattaattaattgtggtttaattaatgcataacaaagaaagtagcgtgcacgaccaaatctttttgaagctgcattactaaatattccgaccaagctggagtaaaattatcaatgccattaatgtctgatacaagaaagagtgctgttgaaaacttgaaatcatgtaactagctaactaattggaacacctgcggtattctcataaaccagacgaaaattaatccctttggcgatcccttaacccgtaaaagattgatctgaatgttctattatccgaacaagggttgagagaaccaattctgcaaagccaacaccgagcaatgcgccgtgttcggcagttgcgcttcatccatcctcagcccgcacgacatccacgtcggcctgggcgccgtgccgccgtcgcgcccgaacagcttcacctcgacctccagctgcatggcgccgatacgccgctccagggccatgcgtccgcaaagccgctgaggcagacccacgccgtcggccgacgccaggaacggcacctccggtgccctcttcccctgcgcgcagaagcccggcacggtgccggacgcgacggtgaagccctcgtagctcaccaccgcctcgccgccgcggtagcatctcgccgtgccgcgccggttgttgacgtgaagtgtgacgtcgatagcaggggagatgatcgtcggagacgccggcgccgcgtcgtccaggccgcggatggccgtaatctggacggagaactcggatgggaagtcgtacaacgcgtgatacaagcataggaatatgaaaatggaattggtgaattcatatagcaggttgacgacgaagatcttgcggcgctggcggttgcacgtctctgacgccttttggcaggcgccggcgttgtcgtcgcaggaggaaggagggtggggctccattgtttcaaatcgtacgtgacgaaaggcctttttctctggtggattgtgtgccttgtgtgcctaataagcccgcggattttgtgcccgccgcgccacgagactactcgtagcggatgagatcagttaccgtggtattcggccgaggtttcccatgcgtaccggactgccaggccttgcatgcttcacccgtagcttacgtgtaaacgacggccccctgtgccaaaccaatccccggtcgaggccgtggatggccgtgatctggacggagaactcggacgggaagtcgtacaacgcgtgatacaagcataggaacatgaaagcgaaaaacatgagttcatatagcaggttcacgatgaggatcttgtggcgctggcggttgcacgccacggacgtcttttggcagctgccggcgtcgtcgtcgcaggatgaaggagggtggagctccatggtttcaaaccgtacgtatcgtgaatacgtacgtgatggcgttttcctttggtggatccttgtgtgcgcgtaatatatgcccgcggtttttgtgcccgctgtgccacgagactggatgagagttgccgtggtattcggccgaggttttcccatgcgtaccgggccgagtcttctcccgtcctacgtgtaaacgacgtcacgacgattgacccccctagcccatgtgcctatatatccctgggttggggggattaatatgttagggtaaccacaatttagtaaaatgtaagccttaaacattaaatgttataactttagctattgtaggggcacacattaagatccatgcaatccaaaagagtcttaagcttaagtgtgatcacatgaaaatataaaattattttttttcactgttgtattcatttctctagctttctgccttgtatgggatggttaggaattgatttttttttcttcggtgggattcaatgggacccatcttatattctaccaaagacttaaccattgtaggcattgccatagctattgctccttatggtgggtctcactcttgttgtcaatgcaaccatagggatgcttactgtaaatttgaaatgcatctcgtttccatttgggatgcatatcttcctttcaagatactagctcgcgcttatagtcgtggaggattcacatactacttggtgacagctttgtgctcacgtttatagtcttggtgtatttatagtgagttttgtgttctctttacactgctttgagtgctaattggcagatccaattacctttttaatggtgtatccaatactattgacattactagatcgttgtgaaaatatgttataataatatgtactaatttttatttaaaataataaatgtaactgtctattattgtattatatagctagatagctccatcacatctgttctagaagctagaaactcttacattaatcgagagaaattttgaccattatattatagtggtctaaattgtagcgatatgaacgataaataaagacatacagttgtatacaaccctaaattaagacataaaccaatagttgtatacgtcaaatccaattctacttagggtatgtacaatggtgcttattaacggctctctccgttttctatgcaagtaactttggaaacatgaaagagagagatgacaacggtttaaagtcgactcttatagcatttattaaagaaatttttgttgcacgtggattgagaaaatgagagtaataaaaaattatttggtgtactaatggttaagagattttgctgtgttaacttttgtagaagctaaggatagtctctaaatgagtatgtattaattaagagctaatattagattctattttgcacatgtcctaaaatgtatggtatacaaaatccagttcaaattctatatttaactctgctgaaaattgcgtataaatgttagctagtttttaactaataaattaataatacatgttttcctatagaagaatcaaagatacaccttattctctctcaacagaaagttaggtcttatcttaggactatatcattgtcctaggcggtgagagatggtatagacgtggaaaattattctacactctcctgaggacgtccaattattatttgcatatcacttaaatattaataattttttttaataagatagatcaatatatgatatgatagatcattgtacaaacatacatgcaatgccaaatttaacttttacatgttacaacagaaaaataaatttgactatgaatatgtgttagttgtagtttaatttgttttttattgcaatttgtgaaagttaaattttaattcatatatttgtggagtgatatattaaagaaaattataactatttgagtgatatgcaaataatgaggggatatcttctcaagagtttaaaatccagtctcttaaagacatagcataggaacattttgaggaacaacagtgacagaaaaggagagaggaaacgaccatttggggaggtgtggccaacaggtggggtaggacttacgatagcaaaggtgttgcataaatattgaagcaagatctctaagtatttttttaagaatgataaaattgccttaaagcaatctacaccacctaaaaacgatggataggtaattaacaaaattgaaaagaaaaacgatggttcacatctagacaattctgtaattggagcattgcaatgatattgtcaaggggcataacacaaccatagaaatctcattaccacgtctatcgagaaccaaaactagtaaaatgaaaatctgatcgagaaagataactatttgccatggcattggcatggccacatagaaaccatataaagttactgcatccaacgaggtgcaatgtctgatgcccaattctgggtagcgaacactctgcacggtgtcacgtctgacggctccgcttcctgcgtcgtcaccttgcaccacatccacgtcggcatctcgctctcgcggtcgaacaacttcacgtcgacctcgagctccacggagcaggcgcgctgctccgccgccatgcgatcgtgtacctcattgggcagcgtcacgccgtccgcccacgccacgaccggcacgtcgagcgcgtccctggcgccgacgcagaagacgcgcgtccggcccgccgcgacggtgaagccggcgtaacgcaccaccgcctcgccgtggcggtagcatcggcccggcgcgcgccggttgctggcgtgcagggtcatgttgacgatggtggagaggggctgcgccgccgctgccgccgccaccgcgtcgaggccctcggcgctgttgatctggagggagaacttgggagggaggtcgaagaagatgtagtacaaaaacggtgtcgaggccagagcgagcaggacgtacaagaccttgagcatctcacgcctggatgccttcgccgccctcgatttcttggcgacgccatctccttggatgggaggaggctgaggcttcatagctgaccggccggtgacgatatgatattgaattattgatgactcgctctcgtgttcaagacgaccccaagcgccgatcaaaatctgtttttttttttttgtgctgatgatcttccatctcgtttctatttgagatacatatatgtcttcccttctgtcgtatgtctcgtacgaacgtatcgtatcctacccaaaatcctgttctaactggtaagtccggcacttgcatgaatacatctcttcggttcgggcgttcggcccttttatcatgcgtgaaacagagtctgcgcgtaggcacgccaaaatccctgtcaagatctctatagcttccacgctcccatcaagctgaatcgatctccgacgaagaaattagccggacatggcgagaacagccctgtacggcagcaaagaggtggaccccttgttggtgctacagaccaaagtcataatcctgttctatggtatggtgacgatagttttagtgctggggatcccggccgctgcccttctttctaacgccgccgagaaggtcaagtacaccttggatctcgccgccgtcgaggggatggacgtcgccgccgccgccacggccggcgccggcggcagtacggtcatctcgcccgcgttcaacctcacgctgcgtgtagagaacccgcgcaccttccggccatggtgtctcgaccgcggggacgtggtggtgtcctactccggcgtagcgctcgcgtgggggcgcgtcccgggattctgcgtgcagaagaggtcgacggccaagctgacggtggtgccctggggaaagaacgtccacttgtcgcaggagctacgcgaacgctttgtctcagagctgcaggaggggacggctaaggtctacgtcgagatgaagctgcactactacgctaatttcggtatggctgccttcgcgcctagcactgggatggtggggatttcacaggagcttacgctgggaggaagagatgaataacagtttggtcaagggaaggctgatggatagttgtttcttcgttgttcacgttttcttgtttggtatcataactttttttcctttttccaaataggaacatatatattaattcatatttttagcatgttatctccaaagtaaatagaatggaaaacattattccttggtaaggatatggagtaataacaatttgatttatagcattgaaggttttcgttttttaattttgttgcatcgaaagtcgtcacttaactttggtaacacacccatatctcgctctccattcaatcgaactcatctcgtcttctttgaacgtgattcacttagccagacattgccaattgaccatcttacctttcatatgaagaacttttacggtacactatactatcagtatatactaccaatatataaaagtgtatatttggaacttaaaaaaattgaataaggggtttttttagtaattcgtcagatctaatggggagtaatcggtcttggatctcatcatgcgtcgcgagcgtgatttggttatggcgcgtgtggcagctccgcggctgcacggtttgatgagcaacgagaagccgaagatacgctggacgcaagccccaagcattcgcggcggcctgccttccggctaagcctcaccggccacggcaagaaactgcaacgagctgattcatagtgtacattgagcgatcttgttagttcagtgtagattctactcaaaattgttggctagtacggacaacgtgaggcaaataaatcaggtactgatttggtactcttggacttgtcttgcgttcagtaccagatcggtagatgaacatggaaattcataaaaccggctgtgtacacataaagacaaagacaggtttgccccttagaattttatactggaatctcattaagtggggaggagaatgaatctacaccattgaattatttatactagcagtatatactggtagtatagtgtaccgtaaaatttctcttcatatgagaatattacgtactccctccgtcccaaaataaacattgcatgagttcccgtgtccaactttgatcgtccgttttatttgattttttttataattagtatttttattgttattagattataaaacattaatagtattttatgcgtgactcatattttttagttttctcaaaaaaaattcaaataagacgaatgatcaaagttggacacgaaaacttatggtgctgcgcttattttaggacggactgagtagtaatcaattgatctccctcccacctagtcacaccttacaaattataaaaaaaattc

SEQ ID NO: 14018 - DNA, 3360 bp, Oryza sativa
aatggacatcgctagcatacgagcataatttgtactttcttagataatagaagcaactaaggataattaaggataaagcatctaatccaaccgttttatacctgtgaacttaacagtactaaaatatgcataagcaagcttctgcaacagagggaattaaccacccaaaaactctagtcaatctcacgtttcattgaggatattgtcattatgtacgtcacaatgggtttgcataataaacagtacgatgaacgaaaatatgccgcgaacatcaccacctcgaagctctctctagtcttagcagttctgtttttacctgaatctctatgagcacatcgacgcgcttcctgaccacgggcgccaggctttcgagcacgtcaacatgttgctccgccaacgcctgcagcttgttctgcacagatgacacacgcacatcaccgaatcaacaaaaaccaccattgcacgatcgctccgattgaaacccaacaaagcacaccgaaaaaaaagcgatcatcacaacgagagaggaagaggttataccttcagcgtctccacgaggatggccttttcctctgacaagagctctgcatcagaaacccgccgccgcaaacagttagccgtaaacccaatcacggaatcacccgaaaaaaaaaacagcaacaacgcaacaaaatgcgaagcaggggagaggtatgctcaccgggattgctcatggcttctgcgatgggagatggcggtgatgaactgatgatgctctccggcgtgaggcggcgagttttcgagcgaggcttcggattaggcgagcgaggcgtgggcggcgtaagccgcggaaggtggtgataaagggtgggggaagtgacagagcggacggcccagatctcgcgggagctgggagacgtggccgaacgggatgcgggttcgcgctcgccgcgctcgtgtggagtttggacttgccgccgcgagttcgattagggccgttcgggcctttttctctggtggattgtgtgccttgtgtgcctaataagcccgcggattttgtgcccgccgcgccacgagactactcgtagcggatgagatcagttaccgtggtattcggccgaggtttcccatgcgtaccggactaccaggccttgcttctcccgtagcttacgtgtaaacgacgaccccctgtgccaaaccaatccccggttgggatgaatgtattacagtagatttgtttttctgggatgcatgccttcttgtctgtcatacgtctcgtgcaatcgtatcgtatcagaaatcctgttctaaccgatatgttcggcactttgcatggattttgctatatctcctgtcaagatctcaatagcttccaccttccctagctcttgatcgaccatcaaactgaatttcggacgaagaaaatcagccagccatggacagcgaggaggaccctttgttgaggttaatgaacaaagtcagcttcctgttctggacgacactgttaccagtttttctgctagggatcttcgtcggcgcccttctttccaaagaatgcgagaaggccaagtacaccatggatctcgccgccgtcgaggggatggacgtcgccgccgtcagcacggttgtctcccccgcgttcaacctcaagctgcgcgccgagaacccgcgcgccttccggccatggtgtctcgaccgcggggacgtggtggtgtcctactccggcgtggcactcgcgtgggggcgcgtcccgggcttctgcgtgaggaggagggcgatggccgagctcacggtggtgccctggggcaaggacgtccggttgtcggaggatctacgcgaccttcttgtctcagagttgcagcagggcacagcgaaggtttccgtcgagatgaagctgcactactacgctaatttcggcatggctgccttcgcgcccagctctgggacgacgtcgatttcacaggagcttctcctggactcctgggaggacaacatgaatagcagtttgctcaagacgaaggctggtctcccgggaagacaagatgaataatatagtttattcaagatgaatcctgacgagttattctttttctttgttgcgttttcttttgtgaactcagcataattttgcttcttctaattaatataataacatttcgtattataagtaattttattttttagtcaaattttattgatcaaatgtataaaaaatatagcaatatttttgactaaaaacaaatgcataaaaaatttattgcaccgccctctgtttgtgttgtgttgagtcagcaagcccgctcctgttctcatccaccacaagggcaatgcagcacccctcctcacatatgccaccaccactaagctcgtcggcaacctccactttcgtagctgccctccttcctagctcggcggtagccaccacctcccatggcctacccgcccttccacccaagctcgtcgagcggatttgagctgttcgacctttgtctcccataagctcctaggttcgtcgcccggattctagctcgccaatgctagaaaatttcacctcttgcgcagccttcctcccaagcttgtaagttggatctgagctaaccgatgaccttcattttcctctaggcccacctcatgagtcatgccggacaaatgcgatgaatggacagaggatgtgattcccatcgcgtgtcatgggaagggaaggacctctccagtctccacaattgcttcaagttattccccatcgtgcccctattaattaaacaattggattttatttggtacatgacaacagtggtacttggtgatacctcctcaagaattgtaaaaattctcggttttctatacaatttatgtgcacgctctctctgtccctctcttttggctggtggttgccaatgaaaataatcgtgtgttcaacgctgagggaaggggggacgacgagtctcatcagcagaggatcccgttagagaggagtggaggaatctgttgctgatggagggataggcagccaagctgagtggagaaattatgagaaattaccaatatggcgaaactaggtataatagaaatctcttttttttaataatggaatataataaaattttctttataaaacaatattaaaatgtcaaattgttgttagcggtcaggtgatggtattttctcgatgccaaagcgtataatttcataaggaacgaggaataactgtggtgcattcatcgataactgttcaattcatcaaaaattgatctcaatagaatataatgatcataatgatgattttccacgtataaggtaacataaacggcatccattttggtcagtggacaatggcacaataatttaatttacataataaatataataaactaaaaaaat

SEQ ID NO: 14019 - DNA, 5932 bp, Oryza sativa
caacaggtgtctaacaatctaagaagatgtttagtgagaataattaaagcttcaatatcaaatactagaaaattggattttctatatagttttttcaatataataatttttttcgtaatatttactagtgatatttagtaatataatggaggcaaagctaatactcgtgtggaatcatgcgggataaccaattttacatcctcaaattaatcatgcaaaaacgtcacaaactgtaatcatgcatgcatgcatgcaagagatttttctcgatgatgataccatccggtcgaccaggcgggggagcaaaaatcgggcgctccccccacccctgcccccccgtgcaccactgggcctcacaacagtgcctgcccccacctacaacaaatcaaccatatattttggaacccttggtttattttttgttccactaaaaatgtttcaactagtgtactcacaatattttattatgtatagatataatgttgcagtgaactgaaatattccattgcaacaaaaaacccacatattttggaaaccctctattaagggaattcgttttattttttttccaccgaaaaatgtttcacctagtgtacttataatgtttcactatgtatggatcaaatgttgtagtgaactgaagcattctttcgctatttgctgaaacattgtttttatataaggtgaaacaacacccgatttaaacgagtgaaacattttcgatctacatagtgaagcaattccgatatacttggtggaacatcgtgcaacatttaaaaataattcaataataagataattttttttttcatcggaatatatgcatgtgtggtcttgttttgaagatttaattgcaacgaatttaatggtacaatcggatcatgatttagataagtaatttaagagaaaaatcagtttaaagtagttttgcacgtaaatcggacactgacgtcatactgacgtcagcgcccgatttttctccaaatcgatcgggcacccgagccgtagactcgtccgctttttctatatcgatttgttacggttggcttcggaaagttgtgctccctctgcccaggtgccgaaatacgcggtgctaattacatgcacatgcatgtgcagccgagcgagcgacagctatatatatcggaccgcgctcgcgacgagcgaacactcgcgagtcgcaacaactatatatatatatatatatatatgtatatatatatatatatatgtatatatatatatatatatatgtatatatatatgtatgtatgtatgtatgtatgtatatgtgtgtgtggctaatgggcgattcatcgctccccatccccctatacactctcttctcccttcctagctcctccccttcttctcttcctactacaccataaattttaaaaaaaataaaaaaacaaagttaaaaaaaattatgtattgaaatactatatataaaaaatatttgaatttaaatttaaatttgaaactggtatgtaaacttttgacttataaactttgggtctataaactaatatttgaattcaaattcaaatttgaatcgggtatgtaaacttttgacttataaactttgggtctatgaactttaggtgtataaactttatatgcatagaaatactatatataaaaaaatatttgaattcaaattcaaatttgaatcgggtatataaacttttggcttataaactttaggtctataaactttaggtgtataaactttagatgtataaaatactacatatataaaatatttgaattcaaatttaaatttgaatcggatatataaacttttgatttataaactttgggtgtataaatttactaaaatagaaaagtaatacggtgccaagaaagaaaatcgcgtggaggagaggagaggggggcgatcgctaggggcaatcgatcgccccttagcaatctttcgtcacgccggcggctgccaaaaggcgtcagcgacgtgcaacccccagcgccgcaagatctttgtcgttaacctgctttatgaattcaccaattacattttcgtattcgtactacctccatcccaaaataagtgcagccatgagtttccgcgctcaactttaatcgtccgtcttatttgaaatttttttataattaacatttttgttgttataagatgataaaacatgaacaatactttactcgtgacttatgtaaattaaaataagacgaatgatcaaagttggacgcgaaaaatcatggctgcacttattttgagacgaagggagtatcacgtattctacgacttcccatccgagttttccgtccagatcacggccacccgcggcctcgacgacgcggcgccggcggctccgacgatcatctcccctgccatcgacgtcacacttcacgtcaacaaccggcggggcacggcgagatgctaccgcggcggtggtgagctacgagggcttcaccgtcgcgtccggcaccgtgccgggcttctgcgtgccggggaagagggcacgggaggtgccgttcctggcgtcggccgacggcgtgggtctacctcagcggcttcgcgaccgcatggcggtggagaggcgtatcggcgccatgcagctggaggtcgaggtgaagctgttcgggcgcgacgacggcggcacggcgcccaggccgacgtggatgtcgtgcgggctgaggatggatgaagcgcagctgccgaacacggcacattgcacggtgttggctttgcagaattggttctctcaacccttgttcggataacagaagattaggatcaatcttttacagtggtcaaagggaaattaaactcaaaaatctctgccgatctataaagggatcgccaaagggatttcctctggttcatgagaatggtaccgcatgcaggtgttccaattggttagcgtatttcttgtatcagacagtaattgcattaataattacttcagcttggtcgatcggaataattagtaaggcagcttcaacaaagatttggttgtgcacgctatttttctgttatgtgttaattaaaccataatttatacgaaagacaaatgtgtaacaccgatcgtgccgaatatcttcaacactcgtacaaaaataaacaagaaaaaaatgtagcatgcatgacatgtgcagtggtgtatcttagaatttttatatgaataatccaacttttacatgtgcctgtgtgttagatatcctgaatatttttctcggtctcttcgtagccgtatccacgtggccgtatctcagccatcattaaatgattggatggctacggaagggttgtttgttgaagaccaaactgtacatgcgcattggatagattttacccaaagaaaaataagtactctcttcgtatgaattttgagcaagcacctggtcaaactaatgccaggagtacggagtaccgttgtcttaaatattgtgattgattacgtgaaaatcaattttagttacaacagaaataaatgacaataaggtacaaatgcacgagaacaactgacaatttttttcgaggaccgagaacttattattaaggggccccatcgtttggccataggctgataatatgccatatgacatattagataaaaaatatgagtaaaacttttatatgtgtccttagcgagttaaaagtcaatgttaaaaaaataaatttcgatgaaaaaattttacaatcaacttcaaatttaagttttaaaattcaaattttgacattggctgattctatataggggcaaacgaggtggggtgcaagccagggcggatctacccatatgccataggcagggtgggtcgactaacccagctacgacacgtgtcgtcttacccccctcccccaaagaccccctaccccccttatagtaagtcttgggtcatcaaaattaggtatacaaggtgtgaacgtccaacatattagtttatctcttcacaacgcatgcatgccacaaacaatgatcgaggcaattatgcgattgaactataaatacggatatgtgttgtgtttaattgctcttatcgagtgaacatctccattctacgtcccatatatatttggaagctacatccgcctagcaaagattgtacatagtgacaataatgatggcactatagttttgaccagccgagcataatatatggcaacaataggagaaaataaaaaaaacacgtagaaaagtgaatccaccactaataacttaatagaaatcaacttagtagttgcatatccttcagtccacttctgacttctgagaactaagataaaaaaaaagtattgctgcttgcactcccaggtcgctcaccctgcaatctagcaactctgccagccttccgttcaaaatagagggataacaatggatataaaagcatctaacgttctaataccccagtagaacaaacgacacttgaatgccctatgcttcttcatcactatattcatcgtcatcatcctcttcatcatccacccaagaagcaccataatcctcgtcttgaacagcctctccagtgaaccaagaaacaacatgtggtataatcttgtccctgagagtagatctggcaacatgggcaagctaatttataacgagataatatatacaggaagtatgttgtttcataaataatttgaagaattgtgtctttcagtataacgtatcatgcataataacacaatagtaatcacttctcctttagaaaaaaaacaattctaatcggttaagaatgcaatggagcataatagcttacgcaatgtcataatctcgttccatttggttctgcaattcttcagcctgttaagcagcagcagcgaaaaaggccataagtttgggcataatgtttcaggaatcaatgtatgtagaataattacttgttcaacttacggtattttcgtcaatttttgcatcatcctctggaacttgaggggggctgaagaagttaaagaagctctcatattcttcagtctttgttataggtttagtgctctctgaactctcttttgttagcacctcctgtgtcaaacaatttcctggatgccattcgatttcagtcctaagaaaaaaagcggtcagggaatatttcaaataggaaatgcacgagagattttttttcatcataataaaaacacaaatttgcagaaataaaatgatatatacccaattgctttctctaggatgggttcatcatcttcatcaatcatgtggtatgttttagtcagcacttgatttttaaagaagggatttgtatcgaaaaagaattcgaacttaaaaccctttggatcatcaattctgcaccatttgatgtccttaaggtacttcagagcttcctcatcgctctcatggatctggcaatggaaaaggaaaaaaatattcattacaagaatcattggcacttcattatctaaaaaaaatggcactaagcaaatcagcacactgaacaaataaataagctcaagttctaatgagagcatgagaacataaacattgataaattagaaagtgggaatttacaaactagaaaagcctctcacctcctcagcaagaatctcattgttcttcattgctttgagccagaaatctggaacacccttttcctctgcatggaaccatcgtgagattatagaaaaaaactaaaagggtacccaatctatcaataaccccagacgtgcccagaacacctatagtatgaataagaatgatatatcacctctttcttcagtctcgccctctacttcaagaacaccactcacaatttcagaacgctggaaatttgtaagcacaaaaaaggtcaccagaacaacacatcatatttaaaactcagaaacataattcaagatatgtttcttaaagaagagctgcctatacacaaaacagacaactctttttgaaaagaaagataagtggggtaaggctagattgcgttacagggctgcaggaat

SEQ ID NO: 14020 - DNA, 3785 bp, Oryza sativa
tttgttagatggacgtgttgctatttatttcaacttgtagcccgaattggctaattcatcgaaggtcacgattttttttctctctaaacaattccagcaagaccactcccatttttaaaggaatagaaccaattccatcatgatcatcagttcatcacaatgcacttgaaatcaaggaaaggttcatcaccgttctaaccatctgaaaattctagacacaatttaaagaacaacagaacaccgaccaaccgtcaacataattgtagatctaaattaaaaaaaattatgaagctaaaattactcaacttctagaaatcttggaactggagttgtgctaaagagagcagcctaaccagctccagcctcaagttgtcggcatggccgtccatctccaccgccgcgcgagcgaacggacggctggatctcccgccacggcaagaaacaagcggctccgcctatcactggcacatggagccctccttgccaagctggatggaaaacggtggaaccactcttccagcagcaacgcagttgcagcaagcaacagcaagaaacgggcaagtccgcaatccggcgtgtgcgcttaccatttgcgccgcccatcgcgtccagctagcgcctggcgcggctgcagatgcagctgctgagctgcaggtgcatgcacctttcccacccccacctccctctctccccttcgtcttcctctatagcccgcgccgcgcctccctgtccccgagtccgaagcccgaatccgaagcgaagtgaccgcaagagctcacccccgagtccccccctcgccggatcgcgcgggccgcctacctcctcccgtcgcaccagctaccgcggtgagttgctcccctctcgatctctgctctgttaggttcggttggttcgtggccgtgctggctgcggcagtgttggggaaggacggggggttttgggggctagtttacgattcgattttccctctgctgtgtttgtgtttttcttttccccagcgaggatgaaactattacatatgactatgtggttatgtggtatcgaagcagatcgaataattgatccggaatgtataggagtagtacttttgttcgaatcgacataggcgtttactagtttgtgcggttgggtacaaacaaattttgtaagaggaagcttaatagtgtacccaactactagcttcaattcatctatagccaatcaaatacatcattcatacaatagttacatactacactattaatacttggtcccacctgtcatacacacacttcgtcttggagtccgtgctacactgccattctttctccttatttttcttcttaaaatatgtttgcagctagcttatagcctgctattgtacataatctaatggctaataaggttctcgccgcggcggtaactctgccccttgcgtgagctgagctcagaagatgatgtcaccaagtgcactaatgactcatgtattcttgatgatctttgttgaagtagtttactatttggggtagtataaagtctaaaactgccatttggtgctaatcagggccgttgtagctgtttcttttttcattttgatgccttgatgctctccttgagaattaagatactacaataattgtactagccaaaaagggattaggagtttgaaagatgatgaactggggaaggactaaagtttgtaatgaatggccgcataggtaatgatttgatctgtggagaatttgtaaaggaagttaacaaagtttgttctattcaagaaattgttttgctctcatctctttttccatattcaacatcttttattagattttattgtgacatgacattttgtttgtgtatttgtcataacagaggtaccaaactggatatatgattgagtcttcatctattactttttgtcctgaagtatgggggcctaaatttttgtcattaatttcagggaatgcgaagatcttgcgatggaagctagtcaaatctgatttcgtttaagtacaagtaacaacaatggcaccaaacaaaatttcctcaatggatgctggagcagcttttgatgacgaagatgctagttccagcaattcactgcaggagttgtggccagttggcgagatagatcctaagagagcaagatttccttgttgcattgtttggactcctcttcctattgtctcgtggcttgctccttacatagggcatgctggaatctgtcgagaggatgggactgtcttggattttgctggttcaaatctggtgagcatggataattttgcatatggttctattgcgagatatctccagcttgacagaaagaaggtatgcatgattcgaatatttttcatttcttcatttggaatggtgtacataattcaacctacttgatagtagtttattcatccaaaatggcaaccctcatagctataggatccatgaaaacccttgttgacttaaaaaaaacacactactagtatgttattttgacatttacttcctgtgtcaatagcttcaaaatgatttgtgctgctgttgcaagaaaacaatctgaacttcctctctacttaagttgcttgaaacaaaattttcatgatcttactgttctttaaagagaacattttccaagctaattcctaaatatagaaatctttaaacagtgggctatttaagtaatgataaaacatattttaaaatttccatgcttgagaaaaaagtgaaagaaatataaaaattatgagttggggacactgaacctggggcttcagccagtgccaggtatcacggactgatcatgacagtacatggctagaacaagggcaattgggcaaaggctgaatattactagcgtttgctcatgaaaatctgttgatcaattccaatatttatttaatgatagcagtgttagtgtgttatttacaaataacttgtcaaaaacgtcaaatatgtgctgaagttgcataagatgtttttgtatcatcttaatccatagataaacttcttgtcaattgtcatttcattaaaaaaaatagtagtgtcatttcaaataggttagttttcttgacactctgtatgttctttttttctcttgactagtgttgctttcctgttaatctcgcgacacatgtatgtgagcggtcctacaagcatgcagaagcaggaacggcgatttcctgggacgacgctctgcaactgggcatgagaagtttcgggcacaagttctataatctgtttacctgcaattgctactcatttgtggcaaactgcttgaatcggcttgcctacaatggctccgtgaagtggaatgtgttgaatgtggctgctcttgtttggttgcgtggccaatgggtggataaaatgtctgttgttcgttcaatctttccttttctaactgtgacatgcgttggcattttaatggctggctggcctttcctaatagggatggcagccttctcttctctcttgattggatggtttgtatttgctgtatgctgcatgaaggatctagtgtgctgactcttttaaagaacattggcactgaatcctgtgatgaaattatggagacgagaccacaagaagacttcagctgcagaaatgagtatcactttctccacatggatgtattcactggcgactgagatcacctttcttgaagaggaagacactctggttaccatacgacatacgcaagtggctcacaatgttatgagtgtaccaatgtttttggtgatcgtagatctagttggttgcatcttgccattggtgcactctccctgttcttattagggtttttttttttt

SEQ ID NO: 14021 - DNA, 4012 bp, Oryza sativa
ctctaactagtatatgtattttcacagttaaatttgttatttttgttacaatttgtagaatacaaattcgaattcgcatgtttgtctagcgatgtattaaatattaatttatcttctcattatttttcataactatttaggtcacctgagtgcttaaatactaagtatttcatccatccaaaatatcttatattttgggacagagggagtatgtctgatataggcctagtccttttcttcaactacaattacaacttccttatttaccgttagcacgcttttcaagctgttaaatgatatgcttttttgcaaaaactttttatataaaagtttctctaaaaataaaaaaactaattttaaatgtatgaagttaatacttaattaatcatgtgttaatgagctttctcgcggttgaaaagcttctccaacgtgagcaaaggaactgggccttagacttggaattgtgtgaggatttcgaggtaggaggcgcttgttcacatatatcatgtcgcttacagcaagtttaataatgtagccaactattatctttaaaaattagatgtcattcatgatctatggatgaaatagttacgtatgaatatgaactatatcatcattaatatcttacccaactctcataaatacacaatgtttcgagacagtattgtagctccctcttgtcttctattctcctcttatttatctaaacatatgatgtgatgattttaaaagcacgtttacatcacttattatacttgctttttttgaaaatgctggggatcgggcgcccgatgcggcgtaaaaaaaatcaggcactccccacgcgcgcctccgcctcgcctcccaggcgtaaagaaaatgctgggaatttctttcgctatttgctgaaacattgttttatatatggtgaaacggcgtcctattttttggaaactgttctttcatacgttgtagcaaaatgtttcatgaggtgatttggttgtgtttcagctttttacgaaattgaaacatttctgatctacttagtgaaatatgttcgatctacttggtgaaactatttttgaaatttgtaagcgcctcgatgccttctccattatttggcttgtgcgtgtgcggagtaattaccttttttttttatctataaacacccataactttctgcttaaataacagataaccttaactatgagcttaaatatgctttgggaaaaaaagagttcttgctatgaggaaacgctatccataaataaaaaaatttctaggaaatttattcataaaggaactaaattcaaactcaggactttccatcattttcttttttggcaaggatccatcactattagccttttgtaatctaaacactaatcagcctacatatcgtcatcagcaacaacgaacgaccccaacttgcggcccatcgaaatcaaaaatccacactccaggagtacgactcccggcctggcccgcccagctgcatgccgatctccagctgcgccacgcccatcctttgctccgccgccatgagccgaagcagatcctccggcacgcccgccgcctcgctcgtcgcgtccaccgccaccgtcaaggcctccctcgccccgagccggaagctgggtatgctcccgtacgccagtgggacgccggcgtaggagaccttgacgctgccgccctctcggtgccggtcgaggatgtggtcgttgtcgatgcgcacgagtagattgaacgccggccgcgaggcaactcctggacctggagccagggccagcaccggcaccagcccgctgacgccgacaagctcgatggagctctcgatcggcttgtcgatgttaacaacagcgccgaatgcgccgaacgcctggtagattatccaaaaaccaagaaaaaaccagaagctaagcaggaagtaattggacgggaacagcaccgccatggctacctcgtaccatagactcggctcgcattcgtccaccccatgagatgtatcagctgcgtcgtggtccttagccgccatggcaacagatcggggaacttgataaccgaacaaaacggtgtagggcttattactgtctgttctaataacatgcagtttcctttattaaggccaacttttgagatggattcggcccagaactccgtcagatcacacgcgtaaggttccataacaccgtgtatctctctgatagggagatagggagatttacgctgatactacgagacctacgactacgaggaatctatccaatattcatcggttctcttacagcaggtacaatagcagattataagccagctgcaaacatacttagagcaggtacaatagcaggctataagccagctgcaaacatattttaatgagataaataagaagagagaagggcagcgggctacagatttgtagccagctgtagcaaggactccaaaacgcagcgtgtgtatgacaggtgggaccagatattaatagtatagtatgtaactattgtataaatgagctattagattggctataaatgaattggagctagtagttggctatactattaaacttgctcttagagcagatacaatagcagattataagccagctgcaaacatatttaaaggagataaatgagaagagagaagggcagcgggctacaaatttgtagccagctgtagcacagactccaagacgcagcgtgtgtatgacaggtgggaccggatattaatagtgtagtatgtaaatattgcttgaatgagctattagattgtttatagataaattggagctagtagttggctatgctattaaacttgctcttatgttcgctggatgagtactccattcttcatcctggaagggagcatctcgggagtaaattgtcgacaagatgagaaaagtttcaggtgatcttgattcaactacgacggtactgaacaaataaataaatttcataaaactacaaatactttgataaaactatcacaaagctgctatgtattaatgtggtttattgcaaggcaagcagacacacaagcagacaagcggagactctgccagatctgtctacatatttacgtttcgaaagtgaccagtagaaaaattgccatcacgttgtgcattacacaaaatctgtatagaacctatgatgttaatcaagctattctctttctggactggacaacatacatcgggtctgttcgtccaggattaggagatatatcaacagcctgtaaagaaaacaaaaaccgttcatgccatggctctagtttatgcgcagagaatcagcaattatagaactataaatacggttgatggtttatctatcattgaaatgtgaatgcttaacttggtttgcaatgcttagctggccatttcagttcttgctacgaacacacttgttgaaaggacaagtaaatataaggagtacttttggatgcccttttaactattcaagtgtggaaaaatgatttcagtaagtaaatgctttacctcaggaggttcaaaatctccagcataatggaagtaagccccaactatccaagcgtgatcagcatcactggttgacgtccatatagatatagcctttgtccaaaagcagcgatttgaaaaactacacccgaagttaaaaaaaagttcaggattgtttcatataaacatctagtaaagaggattatataaaagaaacaagggatactagtaaatcacattaatcatgataatgaagttactatatgtattacctcattatggccaatccacttggtttaagtattcgtctcatttccttgaaaacatcaattggttttgtcaagtagtctacactaacctataacccacacacacaaactatgctgtcagatcatagaagcaatccgataggcgccaaaatataatattagttggctacttgtgccatatgggctatagcattttgaaataataaaaaattgttcatttatcaaggctgaacttatcatgtaaaagaaatagtaccacgttggttataacatcaaatgtgttatcctcaaaagg

SEQ ID NO: 14022 - DNA, 672 bp, Oryza sativa
tttgcatagttatcaattttcactacctgcagcttaatgggatgttgcggaccaagagacttccagaaccctgctccctccgtcctccatatcccctcctagggggacttcttcctctgccaccatagcccctcctagggggactgcgatatggtgggctgtacctcctcattgttttgtctgaagcacataacagaaaatgttaacagaaagaagacggatggaacaaaatgagagaaattagcgaatcaattagcgtataggcacaagatttagaaaattactgcccttgaaagtgttaagtgtagagtcaaagagaaaagcggaaatataatcagaaaatatgttgggccaactattgcaagcataagactacattgcagagcttttcaagtccagaaaaaaaaaactacgtcaattaaaatcttactttaacacaccgcacagtttatatacattcaggtcatcagatatgcgtaaagcaagttcctcatgcattgcaaaactaaccaaagtttacaatcatagtagtagcatgccaaattgccaaacacgattttcatgccatgacattcccgtactactttatccataggaaaaaacaatacaatatatctaggagtaagagaatgatcgatatattagataaaaaaaatattcccctcccaacgg

SEQ ID NO: 14023 - DNA, 679 bp, Oryza sativa
ttttgttttgcttgaaggtcaatagttcagaccaaatcagtagtggtttgaagaggacaaactttcaaccaaaatatggaggaataaaggatgtttttcgaggtgtttattcagaaggtggagtgcgagctctctatcgtggagtaggtatgtatatccgactcatatatgtctaaatggctattcaatcaccataaaactctctcttgaactgaaaacgtcggatgtatatattcctgcttcacttttgacgagtatcagttttttcagtaccttcattactgtagtagttttgctgctgaggactcttatctatttgtgttcaggtccaacgctcatgggaatacttccttatgctggtcttaaattctacatatacgaaggactgaaggcacatgtacctgaagattacaaaaattctgtcacattgaagttgtcctgtggtgctgctgctggattatttgggcagactctaacttacccactagatgttgtaagaaggcagatgcaggtattccattttctcatataatccttcctcttctagcatatccttttttatttttctgaaagactatgttcctcaactatttatcatatttgcgtctgcttccattttgtaggttcagagtcaacaatatcacgataaatttggtgggccacagataaggggaacatt

SEQ ID NO: 14024 - DNA, 525 bp, Oryza sativa
gaatcgacgctcacgccgatgatacggccgggcatgaggcgcttgtactcctggatactgcgaggaacacggcgtacggacaaccgtacaccatgggcacccagaaccgctgcgcggagccgacgacgaagacggcgccgatctcaccgggcgggcgcagcgaggtgagcgcgagcaggtcggtggccatgaccaccttgacgccgtgcgcgtgcgcgtccttgacgaactccgcgtagtccagcacctccccctccgtgccggggtactgcacgagcactccgcacacatcaccgctgctgtagtcgaagtccttggcgtccgcgacgatgacgttgaggtcgaacccagcggcgcgcgtctggcagacgtcgatggtctgcgggtggcagttggaggcgatgaggaaggtcttcttcttggatttcaggatgccgttgcacatggccatggcctcggcggcggcggtggcctcgtcagcagcgaggcgttgacatgggcaggccggtgaggtcggcgaccatg

SEQ ID NO: 14025 - DNA, 502 bp, Oryza sativa
acatcttattggaacatgacttcacccccaaggtgtcagactttggcctagcaagaacagccataggtgaggggaatgagcatatttcaactcgtgttatgggaactttcgggtaagttttgatctgaaattattatcttactacctgtagttggttaacatcctcaccttaaaaagattatgaactctttttaggtatgttgctcctgaatacgcaatgactgggcatcttctagtaaagagtgatgtctacagctatggtgtcgtcctccttgagcttcttaccggaaggaaaccggtggatattttgagacctccagggcaagaaaatttagttgcatgggcttgtccttttcttactagcagagatggcttggaaacaataattgatccatcacttggaaatagcatcctattcgatagcattgcaaaagtagcagctattgcttctatgtgcgtgcagcctgaggtggatcagcgcccatttatgggtgaagttgtt

SEQ ID NO: 14026 - DNA, 2139 bp, Oryza sativa
aaatgctaccgaagagcttaccagttagcacggtcgggtgagggagctgcttgcttacctttgggtgagagaggaaagacactgcccatcaccatggcgacgcgaccaggccctttgaccgaatggccatggcaatggatggggggctacaaggtatgccaagaatttgccagcatgtcctactccttccatacaggatgtcttgttcgagaaatatattaaaccaactccaatccatttaccaattaacatgctattagaggattgcacaaaccatcatcgtttagttttcgatttttcatgaatatattgatggatgaattagtcgtcgtcgttcttgtttctttagtacccttagtagttcctataccggtcatatttcttgggttatttacaagcggtattcaagtaatgcgtgatcataataatgtctagttgaaggagatcaagagaattaatcaatattagttgaaatattatcaaggaaaaactaatcattaccagaatgatggcttgaacatgaatttgagccacacggggttctgaaacaatggaaggtctccatgcattgtcaattagggattgcagcaaatttgatttccatagggtcaacaattggaccatgctcaagcatatcctaacaagttattggaaccgcatacgttgcatagatatagatcagaagctgtctttctcgtgttcgtgcatttttggcccgcagattattttcaaattgtgtagttacctcacttagccatgatatgatttcttgttagtccaacaatatattccatctccacacccagaaaaaaaatgcttcaagaaaacgatggaagtaaaccatggtgccaatcattcgcccaaaatatatggcaggtttctttgcttgcatgatctgatcaatactgacagtaccatcgtccaacatgtgcccaatctcctctgttgacgtctcagattctttggctcaataagttgcacaatcgccaaatgacataagtaccagccgtctaaatatggcagtagctgtacatttcaagcagtttcatgattcaactgaactgacactgtaaactgcaaatccacggtgataaacttgatgacgatcaactgaaaaacctttcaaagacaagatgtcattccaacataatttgttcccaccacccagtacttgaccgaatgctttctgtccatgcacagtacctggtcctggctcctgtggccatgcacacggcacacaggttggccaccaaggggtggggagactttgacccagcgtacactttcatgttgccaactctgctgctgaggatgatccacaaccagatctggatcagtttgtctcgataccagactgctcgcaggaagcacctcattgttgatcgcagtctcgacttcgagcaggtggaccgagtattatacttggcatgggcacgggcaggtatgcgatgcccaagtaatccttgcgttggtgggaaatatctccactgcaggcaaatctactcgtgttaattgaaatgatgattgatccttgctattatgtgcagggatgatcagatcatcttgaacggacttctgttctacctgggctacgcaatcatcccgaactttcgcctaatgccagtgtggagaaccaatggagccctcatcactatcttgcttcacatgggacctgtcgagttcctctactactggtttcacagggcactgcaccaccattttctctactcgcgttaccactcgcaccaccacgcatccatcgtcactgagcccataacctgtaagtaacgacactaaaaacaacaagaatcaacacaatgatatatccaacttattctctaaggtggtgtttgggaagaagggactaaactttatagtccctctcacaaaagtataagtccctcctatagggattaaaatttttgtactttagtccctccttcccaaacaccacctaaatctacaactagatgcacaaacaacgatgcctcaagaacatagttattatccaagagctttaaataggaataaataatggcaacatgaaatggcgaacatggaactgatcttcttgtttattgattgtttcagaaaaagcgcggtaaggttttagaacatttttacagggctgcaggaatt

SEQ ID NO: 14027 - DNA, 8452 bp, Oryza sativa
caggctagctaggttggtgttagtttagatctgcgtaatactgccggatctgaacttgtttaccataataagacgtcaaatgaaaatattttgattgctgatatttccggtcttctcatggcattgtcttttgctcggcagcctgaagttgctcaacgcgcctaccatgctgccatgttaccacacttcctgcaggttatttacaaatacctgaactgatatgaattgtattttgatctacgcatctggtcttgtgactaatttgttgaatcctttcagcaagtgtgctactacacggaccatggacggttacagctgcgcgatttgcaaatcagcttatcgttctcaaggtgacatcatgccagactgaaatgttacaagcatcagaccaatgctttgattctttatctgaccttaacatggcttgcagacctaaggcctgcctctcacctcgaggcaatagtgaacatccacaggagcctaagctctacagtcagcagcatggtcactcagcaggaggctcaagctgatattcctggtacatactctgccagttatttgccccctaaattcacagaatatctacatcggaaacaaaatacttcgcactgatagttgtataaggtcgaatgctgattacgctggtaaaatatttcttctgttcagttgcaaagacatcatttcaaggaactccagaatcgggaaacagaaatggagcagagaaatctgatcaggtgaaatcatacaccccggttgcttctaaactggcatataaccagtcaactgggcttgcatatggaaatgtgcacggcgtgaaagaaagaaatcctgcattggagactagaggtggggctgatgtgactgctatgccacaattcttgtgcagaagggaccctgccgatctcaatcttctgatggccctagggatctggattgcgacagcaatgaccttgaaggagagctggtaatattctatctaagcaactccattgctaaaaaaaccttgtctttgggcattcattaattgaattcggatgtctgaatcttggagctgaactagttcaagtctaatgaatgttctgaaaattttcctttgcatgtgctaacttatttttaaatctcacgcatgatgcatgtatcattctgatagataacaagcagatcatctcctcaaagtgtcttgaaaagagaaccaaatacagcgaatgatgataatagagaattaaaaaggcaaaagtccactgatcaggatgatagtaagtcttcttttcaaactgctctcctttctgattagttagaattgcaaggtcactaatgcatatgcaatcgttgatacaggacaaccagctgttgctggtgcttggaaatgtgaattttgtcactcttccaaaaccactgaggtaagtcaaatggcaaaacctgaacattgtctttttcactattcaggacatgccttggattgcttttctatttcaagaatctaatataaagttggaattaacagagtactggccctctgtcccattatctgcatggtgagccattagaggataaccaagcatggaaaccaaacgttttacatgttcatgagaagtgcattgaatggtatgctccatccagcttatgagcttatttttcctaaatgaatacataattttatttgagttgtaaaccgataaaattaagtttgtatttttatatgcttttttagactgaagcatgtttatctagctagaatatcacctataattccttatactttttaatattgaagttactgataccaatgtagggcccctcaagcgttctttactggtgacattgcaaataacttggagcctgagttggcccgtgcttctaagatcaaatgcagtgtttgtggactaaaaggtgcagcccttggctgccttgtcaagagctgccgcaagagctttcatgttccatgtgcccatgggatatcaggctgccgatgggatgatgtaaatatttctttaaccttgcactgtccattctttttacagtctgaatgcatgtctttatttgtggcacaaaattatgtgaataagtgaattcatctcatcaaatgtactgtgttttaggagaactttgttatgctgtgtccttctcattcctcgaagaagttgccatgtgagagatcaaagtcaaaaaataagaagaccagcttgcagcggtttgttctctagtcctgttcattgtaactgcattttgctataccttcatggctgcacatatccttaagttgaaccttttccctttcttgatttgccagatcatcttccgatacaatgcttgatgacctgaactcaccatctacaatccatatggatggactttggactgcttcaccttttctcactagtgaatgggttatatgtggatctgctctctctagtcaggagaaggtgattaataggtatctcttatctaattacaattttaacaggctattgcatgattaggttgtttcaaaaatgtaaactttctttgtttggaacttgacaggaaatcttggaccagtttgagcaccaaactggcatcactgtaactaacggttggaggtcgaatgtgactcatgtgattgctaatacggatgaatgtggggcatgtgccaggacactcaaggttctcatggccatactagctgggaaatgggttctgaatataaactgtaagttcaatgcctctgaaaattaagacctgggtttacctggggataatggtttctgctcttgtgcttttctaacacatccttgtcatcttttagaaattagacaatagctgatggattttgtcacttcttacatgtagttctcttttcatacgcttaaaataagttgagcatgcttaccacatgaatatttttatgcttgcatttacaatggttgctccattgtaaataccctcttctgctaggaagtttctctgattcatgttattgtgtaatatttagggctgaaagcttgtatggaggctaaagaaccagtcccagaagagccttatgagatcagttctgatgttcatggctcctttgatggccctcgcatgggaagactacgagcaatgcaaaatgtgtgtataaattcactgagtaaataagtcaaagtacaagttcaatcttcatggagtattgatcccatgtgtttcttgttttctaggcaccacatctgtttgcaggattgaccttttacttcagtggccatttcatgcccaattacaaggttcaccttgaagatttgatcactgcagctgggggatcaatcttggacaaggctgatctctctagcacatccttgataatttacagcatggagccaccacaaggaagtgatcctgatacccttaatgaggtcatcagaaagaggaaggctgaggctgaagaattggcggcaacgattggctccagggctgttcctcatacatgtgttctggattctattgcatcatgcacagtgcaattgaccatgtgatgctgtatcttaggttaggagttaggatgttactgatatgttcttgagtgaaaatatcttctagatgttgtaagttgtaacgtgagcaagcaatttaattcaaataatattgatatgtctctttccattttcttgtcggtgtcgtcatttcatatgtttcacctaccggctaccgccgggcgcagttggtctaatatttattttgcaaaaaaggtgagccttgcaggcagggttactcccaaatctgcttgagttgattggggaaacacctacttgccgttctttttctttttaccaaaaaaacaaaaaaaaacttcttggcggatttgaatcacatcagtgcttcggtgctactagtattcaagagttcctctgttcagctatggagtttaattattcactgctacagggatgatgggcaaaggcgtcaaatgattgtggagtgcatttgaaacaaagcaaggaattgaaatggctgagctcagctggttgcttcagatgtttaccaacaacagtagaggtccccttcaggctttcaagtctcaccagtcagacggtcaccggtgtccccttgctgctgttggtgtcccatgattttgttcttttcaccagaccctcgtcctcgtgcagtgatgtagaagcacttctgcatcttctcttctcccaccactaggcccctctataataaggagccagcaattgatgctatgcggtaacagtgctagctccatggcgttcttcagcagcggatcgcgggcgctggtggaaatcctgacgggattgcagaggtgcgttgctgttggttaatctttccttctctttctttgccagtgaaagcggaaatcttttttcgataattgaattcaatccagtctctacattgaggtgaaagcagaaaagttgtctgtgtgcaaaggttggctgcctgagttgtgccgctcctacatacatacatggattggttgacgcaatgtgatcagaaaactatgtttctcttgatctttgcagtgttgaacgacctatgcctgttgatcataccttgtttgagtttggatcaatccgttaccatttacaggtaattttgctccaaacacctttgatgcattatcttgcaatttgaaacaaataatgtagggcatggaaaatgatcatataatacgcatcaagtatcaaccaaacagaacatctcggcacttacaatttgcataattgttcaggcttctattacagattcagagaacatatacttgtcaatatcaacaccatctctttcttatgaggcttcgccatccagcggcttgcctgaaatcacattacaggagacaaggaaaatgtatcacaagtttgcagagatcatcgagcctgcaaaagaaggatacactttgacactgagactgaacttctctggccttactcgaccgaaaggtatgagcatcctcagtcctcacaccctgtttcagttgctgtatttggtgatagaaatattagccaaggcaactgcaggtctgcagcaaacaaggattcgatgtaagaacgattgctctttatgcagatcgcaccaaggcgatcaaccagatatcgttgctgcaatccgtcatccttagctcgcagctcaaggacatgctggcgagcctcggctcgtccggcacgatgaagctcgtgtacaaccaaagggaccctttcttcgtcagcaaaacggtactatcctaagctacgcagattaacaaaagcttcacaggtagagcaaagcatcagcacggctcgctgacgatgcggttcttggcctgcctgcagccggtgaagataagcgccatattccccatgcgtttcagggacgacacggacctggccatcgcgtcgtcgttcttccaggttgggccggcgccttctgtacgtacttttttgagttttctggttagctccgagacctgaagaaaaaaaacgacaggagctacaggacctcgggagcacgtcgtccttctccagggcgccgcggtgcagctggtcgccgatcccgccacccgagctgcgcggggagtacgtgcaccacctcaccaccaacggtggcttcgtgtccttcggtacgtagcagtagcacatatcgcacgcggcatccgcgtccgctcgctcgcttgccccgcaccgcaccaaccacgcatattctccgtttcgcccccacgcggccacgccacggcaccgtgccgacgcgcgcgttttgtgtgcgcccgcaccgcgcgatcgcgagaggccggcctccgttccgcggcgtcggtggcgactaccgacgcggccctcgcgaaacgaaacccgcgcgagcgggtgcgcggggcaaagtagccgatccggacggacgaggccgcggtgcccgcggcttgggccggcgcttcttgggttgggttgggttgggtacacttcgactttggacttttggagggttgacgcgtgcgggtttggaatttgcagacatcctggcgcggcacgtgaaggggaggagggcggctaggacggcgtggatcctgctcaatttccagtcctacgtgaaataccatatcaaggtaggatgcggcatcgcacgctggttttgtgtgctactacatgattatatcggcgttttaaatttactgggaatggtgtggttttactgacggcgagaaagttcgtgtgcgcagtgcacccgaagctacatccagagcaggatgagaaagcgtctggagatcatgacagaggtaacaactccataccatttaaaagaaacattgggtatcgaaggagtggcaattgctttaaaccgggctcgctgtgcttcaggtgatcgatgacgcgaagttcagaggaaacgatgagagcagcaagaagctgcaaggtattagtacctggatactgcaagctctcgatactggctcactggctgaccgatcttatgctcgcgaactctgatgtcgcagtgaggaagagaagcaagagaagatcaatcaaattcgcgagagccaaaaagctccaaaagggtttcaaagctgtcatcgacaagatcaagcggctgcggctgaggatcagagtgaaaggcctggaccggttcaggaggcactgccagtgcttcccagtgctcaaactgaccatggcacagaggaaggagcagaagtaccagaagctggagtgaatcctaatcaactttacgactaatcacttttttttttcacagcacaggcacaagcgtggtgatacatgcatgctgactcttatcctttttccatactgatcaagtatacaaatctggtgagtgatgaacatccattcagatggagggcactaccatagaaaaaggctaacaggaggacagacagtacacggttatttaaaaaccgttacatatatctaaaaaatatcatagacgactatattaggaattgtctatgataaaaagcatctagtgtgttttttttcttttgaaaagcacgaatgtgttttttgttattttcacttgtggccaatcgtgcattggattgtggaaaacatgcattttcacttgacgtacgtcaggcagtgacaatacctgttcgcaactgtggttgcctctacatgattattatgtaccttcagttccaagtgtactccctccgtcccataaaaaatcaatctttcgttgtattaaaatgtgtcacatccagtactaaaatatgtcacacagcaacattttcttaattattgtgtgctctgttaaaaatgaaaaggtactgagcaacatgaagcgtggatttcattaggcttctggagtgaaatatgccagcttaaatacatttaaaccttcctctcaaaattttagcataggcacctatataactctaggcagttgtgaatcataacaaaaggcatactctaatcaatgattcctaaatattgtggaaactttatctatccactggattttccgtagagagagaagaaaaaaaaacacccatctggacatcagtaactcatcacgtagaaactgaaaggtcctcacgagaattgagaagtaatcactaacagtttcctattcttattttttcaggcaaattccttcgaaataaactagtatttatgcataaatctcgatatatgattatccagatttactataaaagtttatttattttaagatggaggaagtatgcacttagtacaagcaggatgcaaagcttcttcatgtttacctaaccatcttcttagggcatgttctaaagtgtgtgtttgaagacggctgattagctgcaatgcaaaatgagaaatatgctacggctgattagctgccatgcaaaatgagaaacatgtagcatatgataattaagtattaattatcaaaacttaaaaaataaatttattttttaaaaacaacttctatataaaagttttcgcgcaaaacatattgcttagcaatttaaaaagcgtgttaacaaaaattgtgacacaatttagaacgggcccttacaagtaattgattgctccgattctaagccttcgttcacacagtattggagtagttctggctcaatcctaaaataaaccagcctcgtactaggatgtaggatgtgtctggtttattttgagatggaaggagtacatctaaggccgtgtttagttcaccccaactacccccgatttccaactttccatcacatcacatcacatctaaaactttcctacacacataaacttacaactttttttccaaacttccaactttccccaaactttcaactttctgtaggaactaaacacagcctaaactgtaaatttctttctgaactttgatttgactgcctgggggtttggattgcaagaattgcagataacatcacacccttgtttttattttttgtcttccatatcgcctcttttagtactatttcccttgcattcaacaagaggatctatcaagaagtactctacgatgcatcgaaataggaagcattcacctctcagaaggg

SEQ ID NO: 14028 - DNA, 2245 bp, Oryza sativa
catgacaaggcatttccaaagccgatacaggtttaccatatgccgacgagaggggtcccagaccaacaacaggttaggtcccagaccatactgtggcaggaagcccaggggtcctccccgacaccaccccggcgaatccacatgtctctcggcatcaaggctcccctgataagctagttactcagccaggggtgtcccattccacccatgtggtcgtacttgtcttatgttcggatgaaattccaaggaaacggtccttaagtgcgagagcggaaaaccgtacacccggtacgttccccggtccgcggttttggaaattcatttagttcgtaagcaccgacccaggtgtcgggttttccaagtcttttataaacccaagttttacccaagttgtttttcagattttaagtttgaaggcgtccgtcgatactcgcacagggtgcacgaatatcgtgacgcaactagatggttacaaggggacacgatataacaattagcaaagggaggatcaatgcaacaaattaggtgggtccgccaatctgccttgcagacgggacaacagattaagtgcgatcctatcaatgcataataatttttcaagcaacataattaaattcaaatataggctcaagatgttcaaaggtggcttgccttgctcgagatctggagcttgatcctcgaaatcctcgcactgcgggtcttcgggctccgaaactacacgcgaaacgggacaactcaacaaacagcgaaaataaagccctattaatgacctctaagcgtgccattagatagatctcgagatttgaggaattttggaagttgaacggagtcaaacggatttacggttgggaagatattgaatttctaagattattggatttttggtctaaaggaaaaaggatttaattaaatccttttggaaaagaaaagaagagggagggaaaatagacttttctcggacggctagggcgcggcccgagagaaagggcggctcggccgagcttaacgggccggccggcccaagaaggcggcccagagcggcccaagacgcgcgcgcgcgggagggaggagagagagagccggtggaccgggctcaccacgcgtggtcccgggtgggacccgcttgtcagcggctcggctcaccgtgcggagggagcacgcggcgcggcgctagggtgggggagggacgcggtgcacgcgcgcggttcgcggtggacgcggatgcagcgggcccacgcgcagccttacggctcacagtggaacgcgcgcacgggaggggctgaccggggtcggcccgtcccgacctcggctgagctggcgccgacgtggcgcctacgtggctgccacgcgggccggcgggaggtagacgatgacgccggccggaacggacggcggacaacagcggcgagcggcggagcgaaccacggcgataccggcgaaagcgagcacaccgggtggttgcacgagacgaggggagacgagccaacggctcggattcgccggaggaagcttgacggcggcgaatcgcggcggcggcaaccggcggggagggaagagggaaacggcgacgaggtcacgaggggccgattcccggcggtgagagcatctacgcggccacgggaatccgatgctagcgtcggattgggcggagctacgacgagcgaggctggcgacgagcgggtgctacggagatcgggcggcgacggcggcgagcacacggcgagcgacggcaatggtcggggcggcgccggctagctacggggaggctactcgtgctaccaccgagaactaagggggggatggagcgcggaggaagaacggagggaggcactaccgtgcgggcgggatgcagtgacgagaggccgacggcgggggagtaatctctccggccttgggccggggaagaggaaggagagggcgcgcccggagtccccttccacgtccttgctcgtgccggctcctccgacatgcgcaacgacgaacggcgacggcgaacagagcacgggggcggcggcaatggcgcggaggcgaatgggagaggaaggaaaagggggaggctggggtttaaatgggcggcaatgtcggtttgggaaccgacttagggcggtcaaaggaaaagggctggcgctcggcggtcgcggcccaagcggcgacagggaggagggaggaggatgacgccggcgggagggaaaaaggggaaaagagggagagaaaagggggcttgtccccttgcctcttcgggaaa

SEQ ID NO: 14029 - DNA, 15405 bp, Oryza sativa
cctccgggggagatgggccgagcgagattcggcccatcgaccccggaggaggcaaaatagacttttacggaggaaattgatttggaaggatttgggttcggaattgaactcgacgatggatcggggatttgagatcttgagatggcacggacactagacgacaagcgaagaaacaaatttcgcaaatagggtttttaggagaaaattttcccgctaggcgccacgacggaacgggcgctacacatactttcagtactcataaactacaacgtgcaacatgtgagtaggattaaattagaggaacgattattgatcactgacaagttgtctctaaggttggagctttgaaggtgtccttttggtccgtggatctagaaatttaatagatagaaaaaaaaagacatggtcacaaaaactatagtgcctatagtattccatatctatagtaagtcataccaagcgctattctcttattaagaagaaataggcactatatatattcggatcagtatgtcatacaagtctaatatatacgacggtccctattactccttaaatcaaattgataccgagtttcttaagtattccatatcttctatttatgagaactaatttatgatacctactacaagattatatccattccgttatgtttgtgttttccactattaagaatatattacacattcaattcgaatgcatttttttacagttttaatgtgttactttcaggtttctggatccaatattctttggtgaataccctagagaaatgagagagatcctctcatcaaacttaccaaagtttacaccagaagaaaagaagttgttgcaaaacaaggtggatttcattgggataaatcaatacacagcaatttacgcaaaggattgcatctattctccgtgcgcacttaacacatatgaggggaatgctctcgtctacaccaccggtgtaagaaacggtgcaaaaatcgggaaacctgtaagaactagtacttctctacttttttatgtccctacttgatcttcaatcaactttgtccaatatttgtttggtttctatgtatctcatatttgaatatgtgatatgatcgaccttgcagactgcattttcaacgtattttgttgtcccagaaagcatagagtcggctgtcatgtacgtcaatggtagatataaggacacaacaatctacattacagaaaacggtgagtagtgatatgcattggactcaaccccctgaagatccagttgcaagttcatatggctttatgcgtctattccgtccccatcacttatcatggattcatgggtcatggtatttgctttcaggctactcacaacatagcgataccaacatggaagatttgatcaatgacgttgaaagggtcaactacctgcaaggttacctcaagtatctttcctcggcggtcaggtgatgtattattgctgaactttgtattgcatatgcatgtaaaatacattcgtgtttgctgcaaggtgtatttgtgctttcctgctcacatgaaagatccgcctgttggcacatgctaaactgcaggaagggagcaaatgtaggggggtacttcatgtggtcactcatcgataattttgagtgggtattcggttacaccatcaagtttgggctgtaccatgtggattttgacacgcaggagaggattcccaagatgtctgccaagtggtatagagatttcctcacgggctccaatgtaacagacgatacccaagtgtggtcacgtagagcagattcttgaatattccgatacaagtagctatactacaccggggaactgttttaacagctcgagtggatgtccacccatttattgcatgtcatctaaatggttataaaaaattttgaaaaagtataaacaaaatatatcaatatgtaatatatcactccacaaacatgcaagttaaaattcaacttctacaaattgtaacaaaaataacaaacaagacttaaattaatatatgtatatttacagttaaatttattatttttcttacaacttatagaagtttaatttgaacttacatgtttgtggagtgatatattatatattgatctatcttgtcaatttttttaaaatatttcacatccatttagttgacatacaataaacaggtggacgtctactcgagctattagattccagttctcgacttccagtcaatacatctagcactggatagtagttttatacttgtttagagttgtagacccgcttgtgttgaaatgtaaaattggggatattgtagtgcacactaatacactattgcactactgtacagttacttcagttatgaacttgtgctttaatcaaaactagcatatatattttctctcatataatagcatatagtatgttttctcattatattattcaaatatattaaaatgacaacataattttaaattttgcaataactttacaaaactactaatatgtaatattcatattgtattttatatacgtgttagttattaattattttttatatcaaattttagttatttgtaaattatatatattgactagtttttcaatatttattttttttaattccgaattttctgtaaattgtatttctatatagactctatactcttattccaatattatttatttttatttctgaatttttattatttctaattatatttctatgtggactttaaactaatttttaatttcgaatttcagttacttttaaattgtattcctatattgactttaaactcttcttcccatgtttttcttaatttcgaattttagttatttgtaaattgtatttttatacggactctacactctacttttaattttattatgtttattccaaattttagttagttttaaattcccatatggactctatactctacttctaatactccttattttttaattctgaatttctatttttttcttaattgtatttctatatagactctatactctacttctaatattccttatttttaattccgaatttcagttatttcctaattgtatttctatatggactctatactctacttctaatattccttatttttaattccgaatttcagttatttcctaattgtattttatatggactctatactctacttttaatattccttatttttaattccgaatttcagttattttctaattgtatttctatatggacttatttttaattccaaatttcagttatttctaattgtatttctatatggactctatactctacttctaatattccttattttttaattccgaatttcaactatttctaaattgtatttctatatgtactctagtcccctcttctaatatttcttattttttaattccgaatttcaggtatttctaaattgtatttctatatgaactctgctttttctttttctcctattaatatgagaatttctaggccatgagagcgaacgtggaggttcctttttctattcatttaataatataatagatgctttagttccaccatgtgaatgcatgaagacaagtcggtggcctagactatcttggagcagcaaccgtggtaaaaaaaactgacacttgttactgcgtgtgtgattcataaacccccgattactctgttagcattagcacatggtgtgatttaatttgggcctgtttgatcaatgctaaaatatgcctagtttaaatagtaaatgtggtggtttggttgaagccaaatggttggtaatgccacagtcaactcgacataattcaagaactatttttatcataatataaagtcagctctcaattattatcaattcaaacacattcattttcttcaatgctacctcacaaaacattggtaataccaaaaattaacaagataatattatggtatgatactaaaccaaacaagttcttttttttccaaatgatgtccaaaggatcaaagattaatcgacttgtatccagaaaaacataatcaaggataatagtcaacagaatttaaatctctaatgctaaagaatctatgtttattcctttgataaatttcgtttgttccttaaggaggttgggggtaggaggccccctaacgaccaattgcgcgggctgggccgcaatgggctgccacagtggcatgcagaaaataaaaaggaaaaaagtacaccaaagatccctcaacttgtcattaagtttcaaaatcgtcattgaaccgcaaaaccggatacgacccatccctcaacttacagaaccagtgcaaattaggttacttagcggttttgactccggttttgtccgaggtggtatctgactcagcgtgagacccacgtgggccccacacgtcagcctattcttcctctcttcctctcacctatcttctccacaggcggcggccagcgggcgcatgtgagcggtggagcggcgcgcgggcgggttcgattggtcgtcggtgttggaggcggtgcgggcgagcaacgacacccgcgtcaccgaggccctccgcgactgtcggatgctgctcgacgactgccgcgagatctccagcaacaccatcgccatcatccagcagggcgccgccttcgccgccatgctcgacctccacgccatcgagagccacgccggcggcagcgaggtcgacgtcgaggatgacatctagcagtagcaccacgtggaccgccacctcgaggggtcagtacccgtcccgccgtgggtgtccgacgaggactggaggatgctcaccagcggcgaggaattcgttgtcgggctgacaccgaacgtgacagtggccaacgacggcagcggcgacttcaccaacatctcggcggcgctggacgccctgccggagacgtacaccgggaagtacatcatctacgtgaaggaacgcgtctacgacgagacggtgaattgaacgtcaccagccgaatggccaacatcaccatgtacggcgattgctccaagaaatccatcatcaccggcagcaagaacatcgccgacggcgtcaggatatggaagacagccaccttcggtacgccaccgtacaccgccattgactcatccattcatgcattgacatggacattgacatcggtgttgctggtgcagcggtggacagcgaccggttcacggcgatgaggctggggatacggaacacggcgggggaggagaagcagcagacgttggcgctacgggtgaaggcggacaagagcatctttttcaactgccggatcgaggggaaccaggacacgctgttcgcgcaggcctaccgccagttctaccggagctgcgtcatcctcgtcaagccttcgctcccgggaaaacccaccgtggtgactgcgcacgggcgtcgcgaccggcaacagaccacggggttcgtggtgcaccacagccaggtggtggccgctgcaccgcccgccgccttcgcccgcccgcgcgccgctcgcctgcgcccaccgggcgccgcccgtggagaagataggtgagaggaagaataggctgatgtgtaggggccacgtggatcccacactaagtcagctgccacatcggataaaaccggaatcaaaaccgctaagggatttagtttgcactggttttgttagttggggcatgcgtcgtatcggttttgcggtttaaggacgattttgtaactcgatgacaagttgagggagacatgaaaaaacattcaatttacctccttaagttaaggctttaactagtgatgggcccttctaatgggcgatcgatcgccagcgatcacgctgggcgatcagttcccccccctcccctcccccctctatactcctccctcttctccctccttcctcctccccttcttctcttcctattacagtacaccacacaaatttttttaaaaaaacaaaaagttagaaaaatttatgtatagaaatactatataaaaaaaatttgaattcaaattcaaatttgaatcgggtatataaacttttgttttataaattttgggtctataaactttaggtgtataaacttttagatgtataaaaatactatatatagaaaatatttgaattcaaatttgaatttgaattcaaattgtgtaaacttttgacttataaactttgggtctataaactttaggtgtataaactttagatgtatagaaatattatatatagaaaatatttgaattcaaattcaaatttgaatcagatataattcaaattcaaatttgaaacgggtatgtaaacttttgacttataaactttaggtttataaactttagatgtatagaaatactatatataaaaaaatatttgaattcaaattcaaatttgaatcggatatataaacttttgacttataaacttttggtctctaaactttagatgtgtaaacttgaggtgtataaactttatgtgtataaactttatgtgtataaatttactaaaataaaaaaataatgcggtgccaaaaaaaaaaagaaaccatgtggaggggtggagggagggaggggggagagaatcgatcgctaccctatccccatagcgatcgcccatcagcgttcctgactagtgatcggatcttatttgtacatcttaaacgtataaaacgggatatattgatctcttgactgtgtaaaacaacttcacgtgacagcctaggcatacggcccatatgctggccttgttgacatattgcgactgttagacccccccaacgacgtatggtgctctgcacgggctgggctgcggtgggctgtgatagttccatgcaatgccacgtactcctcgctacctgctgggctacacagcaaaacatcatcggcttccgcccttgcacactcttcggtggggtggtgacgcgcgccagtcggcagatcaccgggccgcgcgcggtaacgtggcaccacatcctgctcctcgccgatcgtccttgtaggctacagcgttcggtgggaggtgacgctgacgcagcgcaatcgccatatcaccgggccgcgcgcggtaacgtcgtaggcgacatcgttctctgtctgtcccgcactcccgccttttgccaaagcggcccgcgacgcgacacagcggagaggtgcaactctgccatcgtcgtcgcttctcaaggtttatcaatatctctctctcggcgcgtatagccgtcgcgcggagggacgagccaaggccacgccgcatccacagatcgagaatcgcgacggggagaggcgaggcaccgtgtgggccgccgggaagacgcacgcacgagatggcggcggcgtggctcgtggtgctcctcaccgtgcaccggctcctccacctctccggcgtctcggccgtcgaccgcagccagttcccgccggacttcctctttgggacctcttcttctgcttaccaggcacgacggcggaatccccactcgaccatgctgcataacaagtctctttctgaactctgcttcttcaggttgaaggcggatatttggagggtaacaaaggtctcagcaactgggatgtcttcactcataagcaaggtaaataaagcatgaaacttcaatgtgtttcctttcgtttgtgcttatttctgttccctttcttccccactatacaattacttttttttttcgagaacatgtggctatgaacttgcgattatatctttgttcactcatcctatatggttttaggtacaattgaggatggaagcaatggcgatacagctaatgaccactatcaccgttacatggtaacatctcaaaagaaccgcaaattgcaagattctttcaggaaaacaaaaggaactgcgaggaattattcacggataattattctgtagaatgaacttaatactacttatagagatattctaatgaatctttctatctgtttaactgcctgatactgaaaaatctctgctccaggaagatattgagttgatgcactccttgggtgtcaactcgtacaggttctccatatcatgggcaaggattctaccaagtgagcttaacgattcagcttatatacaattggaacaaacgatgtattaaaaaaaattcttgtcgctcagagggtcggtttggagatgttaatccggatggtgtagcattctacaacgcccttattgatggtcttgtacagaaaggtatttaaataatattacaaaaatcatatgttacaagctagaacaaaattttgagggagactaaacataagagttgttaactggatatgtaaccaggaatacagccatttgttacaatatgccactatgatatcccacatgaactggacgagcgatatggtggatggttgagtccagaaatccagtatgtattttgatgttccataaacattgattcattttaactggtttcttactgatttcttattattttccaggaaggacttcagttactttgcagaagtatgcttcaagctgtttggtgaccgaataaaattctggacaacatttaatcaaccgaatttgtccataaagttcagttacatggatggattttactctcctggtcgttgttctgaaccatttgggaagtgtgccttagggaattcttcaatagagccatacgtagcaggtcacaatatcatactgtcgcatgcaaatgcagtcagcgtttacagaaacaaatatcaggtacaaggcctacccttcagacaaaaggactacaaagtgattagaaggacaagaacatcaattgttatttccacacagtttattaaatattgaaagcaatatcaatctaatccttttaattaattttttattacatacaaatttcaatattctggtcatgttgctagggaaaacaaggtggtcagattggaattgctttgagcataacctggtatgaaccattccggaataccactatagatctcttggcggttaagagggctctatctttcggtgcttcatggtattatgcattcctttaatatgcaattgtcaacatggtgctaccttgttttctactaatatgttctgatgtccaaaagtgtttgccatgagaagtagtatctgatgtgttttggtgcaagtcattcacataaatagctcattcagatttcatcacaataagaaactcaaaggactaccattatgttgatagttgtacttgaagatttcctctgctatatttttgacaatttaacaagagaataatacaaacattcaattgacatgtactccgtatgtttttgcaccgttgcctgactttttttttctaggtttttagaccctatacttcttggtgattatcccacagagatgcgtgaagtcttgggtcaaagcctacccaagttcacatcaaaacaaaagaacagactgcagagcacaaaattggattttatcggactaaaccattacacgacatgttatgtgaaggattgcatcttctcaccgtgtgaaattgatcctgttaatgcagatgcacgagtatttagtttatacgaaagggatggagtgcccatcggtaaagcggtaaatatatagttatcaaaattctaaattgttttgcagacttggaacttaaagtaaacagcaattactagtagttgcactctgactcaaacagacaggagcgccattctttcatgacgttccacgagggatggaagaagcagtcacatactataaacaaagatacaacaacacaccaacatatatcactgaaaatggtatggctctctttctccctatgttgtttctatgagctagaataatcattagcctgaacttggtaggatatttgcgggtatcatttgagtagaatatcatatacttcctattgaccccatgtgtgcagtagtgcaccaaaaaagtaattaatttttacatatcataaatagctcatataccaaaaaaatgaaaatgtacttttttagtgtttttacagtaatatacatgtctttgaaaaaaatacaaaaatatatgtttgccgtgggatggtaacgtgggactgcgtcatggacacgcgataccgcgtcgatcccacagcttagagcaagtttaatagtatagccaactactagcttcaaatcatctatagccaatataatagccaattcatacaatatttgcttattatactattaatatctggtcctacctgtcatacacacattacgtcttgaagttcgtgctgtagctggctacagatctgtagctcgtgacgcttctctcttccttttatcttttaaaaatatgtttatagctggcttatagcctgctattgtacctgctcttagccatgcggcaccacgcgggcccgcaggccgaccgtgctgcactgcgagatgaccatgtgcgaccgagcctcacgcatgcatgcatatacctcacgcgtgcacatcgtatttcttacctcacgcatgcatcttggccgttgtcgcacggctagcccgcggtaccgcgtggtgccgcccggccagcccacaggaccaacacggtaccgcgcgtaccccgtgcgggattttgtgggctgttgtcccgcgttttgcaccgggccaaacactctgccccgcattgtatattttcaatatttttccatataccctcaaacttaccttcctaagttacttctagttattacttcttgctattcttttttattatgttgtgcacactgcacagtagtgcattatcaatttgtgaatcatttttttaggttactcccaagcaagcaatagcaacatgactgccaaggattttaccaacgacacaggaagaattacctacattcaaggctacctcatttccttagcctcggcaataaggtaagctgaataactctaagcagcctcttgctaagatttggcttcagacattgcagtagtgatgtgttgccatgcctgaaaatcaagttgtgtaccctttcttgtggaacaatttgaaggaaaggagctgatgtacgtggctactttgtatggtctctccttgatgacttcgagtggaattttggatacacgttaaggttcgggctctaccatgtccactacaagacactgaagaggacgccaaaattgtcggtagattggtacaggaagttcctcacgggttcactgctgaggagaaagttcagagatgaatctcagcttcataagtttaactcttattaatccatacatgctgttcttccctttccatattactttatgtaaagtcaatatgtgatgctttagcgtacatatgcttgtacttgcatatgttcgcaattatccatcctagaccatatgcatagagtataatatgtactgaataaaagggacggatttttgtgtgtaattcatctccggaagaacgctttgtgtcatcaaagacctttgccaatagataagctgagtttaaggggttcttcacgggctgtctatgcatttagggtgtgttcggcacccattttcctaacccctctccctcgttttccgcgcgcacgcctttcaaactgctaaatggtgtgttttttgcaaaaagtttctatacaaaagttgcttaaaaatcaaattaatccatttttgaaaaaaaattagctaatactttattaatcacgcgctaataaatcgctccgtttttcatgtaggagggattagttcctatcccctgaaactgaacacagcctagcctagttcatgctgtagttagggatggcaacttgggccatccccgacggacagtgaccacccgtccccgtccctgcccccaccgggattccggggctatgacgggggcacacaccagaggagaggaaacacggtgcagcactgtgcatcaatttgcgaatagagagaagggagacacgaatacaaattgagaaaattttggggatttgggagtagagaattagagataatggatacacaaagtcacatacggattgagaaaataatgctgaaacacgcacacaggtgtggccatttccattttgatgtggtaaataagagtgtaaaattactttggtagattttcttatgtcactctatactaatgttatagctctagtattgtaatttatccattataggtagaatttgaacattctacagttcagtaagcatgcaatctatgaatattgtacagcaatttaatggtagtaataacaattaacaaaagaacaaaaaaaacgattacataaatacctgacctctatcttcagatggtgattttgcttgtatttcatcagtggttgagagcattttggccattttgtctgcaagaacttggaatcatcagtgttaggctacactaacattgaattgacgacctgcattctgggcattagtattcaactgaagcattgccacagaacgaaaattcaggaaatcaaacaaagcttgtatctgagatacaataaaactgctgcattcgaaatccagttagtcatacctgcattctctggaagctgaatggcaacaaataaagttcaaggaatgtctcaacacatctgaaagaacaagtcaaaccaccatatgcaaggtaaggtgacagtccaggcagtgtactattcaaattattttgagttttttttttttggcccaaatcactctgtcttcgacatgtctcctttgatgttttctggatgctgtcaagaaaggtgttatttggagtttacagcaatggtttctgctcttcaagtttgtatgaatctgataactaggatgaaatgttgcatacaattactccctccgtcccattaaaaatcaacctagtatcggatgtgacatatcctagaactatgaatctggacatacaagatgtgtcacacctgatcctagattcgatttttatgacacagagagagtaggacagaaccagatagagaatagacatatcggctttcttataattgtatttgcaaaaaaaaaaaaaaaatctcaaagatccaaagtaaacttataaatctcattatgtgaaaattaaaccatccattcttttaattgaaatgccggatattcactaacgaagaaaagggcatttcagggttacatgccaccggagaatctcttacttggattacaaaaagcatcttcatgcagcactaactcttcatcaccacctatagctattcttcctgtgtgggagtagggggaggaggtgtcgatgtcgcaggtgcaggcgccacaaatgtttttgaaggttcccttaaagtcttcgggctcttctcgtcaacgacctccatagcagctctctcctttgccttttgggctctctgaattacttcctcctgtaatgccattatcccccaaaagaagaactcataagcatgtgccatgcattcagatttacagaagaatggtagggtgattataaagttctttgtatatgctatgcagtgatcaataattattagttgcaaaacctaagcaaacctggtgcattgtggctaaggctgtaaggcgtgaagatacattgtactctactccctccgtttcatattataagttgtttgatatttttcttagtcaaacttctttaagtttaaccaaatttatagaaaaatatactgacattttcgatacaaaacaaacatattatcaaaatatatttaatattaaatttaatgaaactaatttggtacaaaagatgttgatgattttttctataaatttggttaaacctaaagaattgtgactaagaaaaaagtcaaataacttataatcaacctgaagaattgtgactaagaaaaaaagtccaataacttgtaatatgaaacgtacggagtatacagctagctctctagttcccaattccctgattcataggcacaattgcaagcaaccacctgagttagggaaattatatagtttttcaccagctagatcgcatccctttccacagttccagatttacaggctcacgctttgctgcattctcatatgaggagttcccatcaagaggaaggagcgtggtgatgcagtacctggaactcctggacctgcttctgctgctcggcttgccactgccccaccacactgaacacctcgcccaccaccgactccaccttctcggtcagcgcctcggcgaaggccttcccaaggaagaaggcgtcaagcacagccttgctctcatcgtcacctacacggacagcaacagcaacacccaatcccacagttcagaagcgcctctctctttctctcggttgcacctttctgaccacacacaccaaacaggtttacctacctggtttgggccctggattggtcccgccgccgccgccgctactcctggctacgaatctggagaaccttctggcggagcacggggcggcggggaaggaagcgctgcggccgcgggggccgggggcgtggagcgagacccagcaggtcggggaggcagccgctgccgccggtggtgggagcggcgccatgtgtgtgctcggggtctgagccgtagttccgtggaattcctcggcttcgccagcggccgctagcgggtgggaattgctgaaacccctccggcaacccccaccggcggtcggcggacgcgcggcttggattggggacagccgggggaaatggagggattgtttctcggtagttcaggatttttttttttcttttgggtttcccgtccatcgagaaaactcactagtggtgggctccgactggactggcccatcacgcttgaacatttggcccaccgaggccttcacgcctgcccgtttcgtcctcacgctgcgtcgcccggagtaaaattcttggtcaactctctatcgtcaacgtcctcgcatcgcggatggccggccggtcaaagagcgctcgctcgctcgctcacctcactgatctcatccgtgctactcctgtctcgattagaattgccagagtaatcggagctccggttccgatccctgtccatggcgcgctgcggcggcgaaaggatggtggacgagctgcgcgacgtgctggacgacttcgcgttccgggccaagcggctggccgcgccgctgctgcagccgttcggccgcgcctccgaggcggtggcgcttgacggcgcggagatcgacgggctcaggcgcatccgcgcggcgctccgggccgccgaggagcgcgtggtcaccgatgacttcgtcaggctgtggctgcgggagctggaggacctggagcgcatggccgaggacgtgctcgaggagctcgagttcgaggcgctccgcgcgtcccgcctcgagcggttcaagctccagctcctccggtccagcgccggcaagcggaagcgcgagctcagctcgctcttctcctcctccccggatcgcctcaaccgcaagattgggaagatcatggagcgctacaacgatctcgccagggaccgggacgcgctgcggctgcgaagcagtgatgaggagaggcgacgtgagccgagcccactgacgccgaccagctgtttgacgaaatgctcccttcatggaagagagcgggacaagaagcaggtcattaag

SEQ ID NO: 14030 - DNA, 11815 bp, Oryza sativa
caacacatctacaatgatgaggccttgagatccaagtttgacatgaaaatgtgggtctgggtgtgccaagagtttgatgtattgaagctcacaaggaagctcgctgaagaagcaacggagtccccttgcggcttcgctgagatgaatcaactacatcgaatcattgctaaacggctggagggaaagcgattcttgcttgttcttgatgatgtatgggatgagagtctactccgctggacaagcttgctggttcctctaaaatctgctgcacctggtagtagaattgtagtgacgactagaagtgctaaagttgctcgaatgatggcattcaagatacaccaactggggtacctcactgatactacctgctggtctgtgtgccgaaatgctgccttgcaagaccgtgatcctagtattattgatgacggcttgatttctataggtaaatctgttgcagccaagtgcaaaggcttgccattggctgcaaatgcagcaggaagtgttctatccattgcaattgataggaagcactgggagactgttgagcaaagtgacttgtgggctaacaatgaagtgattgatcatacccttcctgctcttctagtgagctacaatagcttacagaagcctttgaaacattgtttctcgtattgctcgctgtttccgaaggagtatgtgtttagaaaagacaagctggtcaggctatggttggcacaaggctttgctgcagcagatggagaaagcgatgctgaagatattgcttgcaggtactttcataacctcgtggagaggttctttcttcagcaatctccatcttatgaccataacgagcaaaggtaatgtcacttattttccaactccaaaaaaccatgaactattaattatgtcacagggatgtgcaattatgcatgagtgaccatcctttggttgattgttgaaggaaagttccacaagaaaatattactgcattgttattttacctttatgctcccaaggataaatatgcaattattcatggcatgcacaaaaattgaactggcatgcaaattaaactcaatgttagcgcactccattttatgtaccattcaaatactcaaacatcactagctacaccacataaatgtctgtactgcttacatgttattttgcaatctaaaatagaaatttggcactgaattcgacatggtgacttggtgaatgtcaaaataatgctgctaaatatattttaattttaatatgggaagttaaaagtaaagcatggaagacttggtttacaaatctaacttgaaatgtttcagtatgcatgctttatgcagaacaataatactagagacaacaagaacttctgaagtaaaaaattgtaattctgcatatgcacaaccaaacttgatgaatggatatagaattggtgcagatgtgccgtgttaccaaagatattcaggaaatacagcatgttaagattgctataaatttattatttttaataaaaacttatgtttcatttttctgtggtgcttttattagtattctccttgtaataggtgagtctatacatttttttcttgaaatttccgaattgaatgctttttatggacaatgtcacataagtgccactattatgtagtggagtttaaaccttaatattgctgctattatttccttagtggctgaagagtagcactgcaagagctcacactttgatagccttccatattttccatgtcttaatcccagtggtttgatgaatatttgtattgatggctattgattattagatgaaaagctcctatggttataactagatggatggccttaaacaactactaatgttggtcatataaacattcatttctggttaaaccttttcaggcttcatgttagttaggtataactcattttaatcatattcttgcttcatgggtttatgctgttttaagatccttcagaaacttccataacactgattatactaacaggtatgtcatgcatgatctctaccatgagcttgctgagtacgtagcagccgatgagtactctagaatagagagatttacattgagcaacgtaaatggagaagctcgccatctatccttgactccaagcgagactcattctcatgaaataggagaatttcatgcatccaataacaaatatatgaatgaatcccaataccctggcctgcgaactttgctggttgtccagagaaccaaacatgacgatggaagaaaaacttcgagcatacaaaaaccaagtgttctgttcaaagcttttgtatgtttaagggctctggatttgagtaatactgacatggagggcctgccaaactctattggggaactgatacaccttaggtacctcagtcttgagaacaccaaaatcaagtgcctgccagagtcaataagttctctattcaagttgcacacgatgaacctcaagtgttgcaactatcttagtgagctgccacaagggataaaattccttgctaacttaaggcatcttgaactaccacgcatagataactggaatgtgtacatgccatgtggaatttctgaattaactaatctccaaacaatgcacacgatcaagttcacaagtgattcaggaagttgtgggattgctgacttggttaacttggacaatcttagaggtgagctgtgcatatcaggcatagagaacgtaagcaaagaacaaattgctacagaagctatcatgaagaacaaaggtgaattgcgtaagttggtactccagtggtcacacaatgactccatgtttgctaatgacgcatcatctgtgttggacagccttcaaccccaccctgctctggaggaactcattatcatgggcttttttggtgtcaaatttcctgtatggatggggagccagtgctcgtttaaattgtccttcctagagctgaaagattgtcggaattgtaaagaattgccatctcttggtctattaccctgtctgaaacatcttttcatcaactcactcaccagcatcaagcacgtgagacggatgttatctagcggtgatcatactagctctggtgattttcagtccaggattgcttttcctacattggagacactgaaattcacagacatggaatcttgggagcattgggatgaaactgaggctacagacttcccttgtctccgacaccttaccattttgaattgtagcaaactaacggggttgcccaagcttctggcattggtagatctgcgaataaaaaattgtgagtgtctactcgacttgccaagtttcccatccctccagtgcattaaaatggagggtttctgccgtgtcaaccatttgttgcaactccctctattctctcagcttgagatgctagaacttcggtgtcacaaaaaactcgtatcgctgagaaaactccagcatatttccccatttcacagtttgagattgagaaaagaactagtacaaaaggtatcaggttgtgaagtgttgccattccagaatccctctgttcaagatagtcaggtatttgttctttctcaagtagaaatcaaacatgattgctatcaaatgttgcatactctaaagcattgcatgctttgtggttttctgtgcatttcagaaaacttggacatttttaaggtgtgccgggcaaatccttgaatgtaatgttgttgcttgtactgatcttaccttcggccagacgaatgtccactcttctgaaggtagcttacatttttctttcttgttctttattgccttccaccattttcgaaacttgtgtgctgatggcacccaatcatgttcaaattcgatccatctaaagaatattgctctgatcgacttgtatgtttaatatgtttcagaggaaatcggcaatggtgtaatattccacataggacaggatgaagctgttgagcttgtatcctgcaaaccggtttgggtccaaataggccagccagaggaggttgagattatttgcatagactagctattatgaagtcagcttgatggtcaaatcttcttgtgctaaacctggatactgcttgtaaagtcaatacataatagtttacagtgtgatcctacgttgcaacttgtggtacaagattcttgaatgatgttgttaaacatatagtagatgctgattggatgactcataagcctttgaagctggagtcatgagtaaatgttatcaatgaaactcggtcagatggtgacatggtggtgtggaggctgttttctagtacatttcctatgaaatatatttacgttgttctgaggaataatgcatatatgtactggaaaaaatatacacggcaacactctatactcaaaattctcacttcgatcgatggaggataatatttgactattcgaaatctgtagtgatcaatcccagcaaacatcgcccaaaggaatgtaatatatagcccgtttcaaaccaagattgacggataaacttacacaaacccataataatagatataaaaaaaaactcgggtacttttatcatgattagatgcatgacaataggacatatataaaactgacgcagaaaccacatgtttacccttacagctgctccctgcagctatttataacaacaacttagatatgtcttcctaaatgtaggaagagcactggagacggttcgcctgcatctccaagagcttaatttgtttaaacatcagaatgctcaggccaacttatctgctgaccctgcgccgcgcggtttatcatgcccaggccagtctcgagctggaggagcacgcgctcgtcggcgagcagctccggcgtgaagagatccttccacgactgataccacacggcggccttccccgggatgggcctcacttccgtcacaaacgggtacaccgcgtacctccatttggcaaagaactccgactccagaaccggcaccatgtacctcgccggaactaggagcgcccacctcatcaccagagggaatgtgttgctcccaccccatgtcctcgtcggcgagatcgtcggatcccgaaggctcctgctcaccaccggcacgacgtgccgctgcacagtcacaaactcgtcccacgtctccgggtcgaacacgcccttccactgcgacactttgccgtaggcgcatcgcgtgacgtcccgccccttcatccacctcccgagctcccccgctatgtcgaggtataccccgtgtaggcggtcgacgccgaggtgagggatccacgggctcacccagacgctggctggatccacgggctcacccagacgctggctggctctgtccaccacgtcggcgaccagctccggcatgaccaccttctccaggatgatgaaggccagcgccgatggcgggagggtgtctttccacgtctccaagaaccggagcatcggctcggggttgctgagacgttccacggcgactcactcacgctcggcgggacgacgtacgttgtcgatgagcatcgcgtacgccgacatgcccgccgacggcgcatcctcctcctcttgcagtatgttcctcagcgactgcaccaacgccagcgcccaagctggcctctgcaggatgtcccagcgtccgtcctgtgggcgcagcagcgggcggagccacggcgccgtgaggtgagccgccgtttgcgcgagctggaacgtcccgtacgcctcggggaacttctccttcaacccctcgaactcgcagatgaggccgcccagcgtgagcgtcctcgacgaggtctccccccggatcaccgccatggcgctgacgatctcctcctccgccgggaccggcccgcggtcctccccgtcgtggctcgacagcaccaggcgccgggccgtgctggcgctgccgctcgcacgaagcgtcttctgcgcccgcttggcagcgtaggcggcgctctcttcgcgcagcgtggcgagtgtcctctcgatgtcgagggcctcccaccctgcaccgccgccgacctaccgtgcgatccctcgacggcgccgagggcggcgttcctaggccgggaggtcatctcgatgggatcgatgcgcctaggcgcctagctgagagactacgggaggaaaagggcattctctaccgttggataatgccccttatatagggaggcggcggcgcgaggagagccaagcctaagtggggaggcgcgccggcgccaccgtggcagcgcggaaaccctagcggctagcggctcaggttaatggggcggcgcaagcgccacagctgtggctgtgtggcaaactggcaaccctaacaagcagctgatttggaaagaaacaccgaaacaggaagccattcaaaagcgtacaggataacccaggctggcgaggcgcgggaagaaggataaggcgcgcgaggaagagggaatatagacgttggcgacgggaaactgtttaaacacgggtgaacgtccacccgagagattagaatccacctcccgttggcgacgtactgtttaaaatctttccaaatttcttcggttctccaccctggacggtttcacattttgaggttccaaaaaggaaccattagaaaagatatcaaatgccgtcgcgattgattttcattagaaaccaaaattaaacaactatgttattaaatattatatgctctatctacaagtacaacttgcgtgctttcctgattgctgctacgtactatttcagaattttacaattagtttctggcaaaacgtctcccaaaaattatttcatatgtattttcaaatcaaaagcaagtcaaaatgacattcatagacatagtatagacataacaagcaaagaggcaaaaaaaaaactgaacttaagcttcatatcacgattacatgatagtagatgcctagatggcatacatgaattgacctcggtaaacacaatatctaacacatacaagcttcttactagcaggggctcagcatctcgaactcgtataggcctcagcagtttatgttactaatgctccggcacgcttatctccaatccctgcgtcgcgcggttgatcatgtcgaggccggcctcgacatgcacgaccacgcgcttctccgcgagcagttccggcgtgaaaagccctttccacacttcataccaagccatcgcctcatccaaccggggcctctcgcccattaggtaccgatagttggcgtacatccatttcttgaagaacccttgtatcaaaagtggcaccatgtacttcaccggcacgatggatgcccacctcattacaagagggaagaagttgttgttttgtagccaagtcattcttatcgagatctcgaggtcatggagagccttcctcagatgaggcagcacgtgccgctcaatgtgttcatcccagctcgctggatcgaacacctttttccatggcaacgcaagcttgtagtcgtactcagagatcccaccgcacagccaatctctgagccgcctgcttataatgtacactattcgtaggcgggcgtggctgagatgaggaatccacatgcccacacagacgctcagcttactcggcctcgtcagcctaaacacgtccgtcgcggctaccagcgtcggcaagatgacctcatctaggatggaatccatggtggcttgcggaaggaggcccttccatctattgacgaaccgtagcatcggctccggctcctcagcgctccaccaccacgcatccaagggcggtgccatcacgaggtcgtggatcaggcgagggtacgccgccgatgcgtccgcccccagcttgtccttgagcgcttctaccatgacaagtgtacggttcagcaacggctgcgtgcctccatactcacctgcgttgtactaccagctcagctgcgagtggagcagcggcgccgcgaagctgatcgccttgtacggcatacagtttgtcctgtaatcctccaggaacttcgccttcactcccgcgaactcgtggatcaggccgcccaacgtgagcttccctgactcgttcagctcccggaccatcttcaaggcacgcttgatcgccgtgtacctggaggccatcccctcccagtcgtcggcggcggtggcgtgtttcggtgggcgttgcctgcgcatgttataggctcgaaccttctcgtggcgccgctcccacgcccgcgcggcggcataggcttcacgctctctctgcagcgtgtccatggcgcgaacctcctcgacgtcgacaacggcttccggctctgcttcgccggtgccccgctcgagcttgggctctacaggcggccccgtgtcataatccgagtcgctatcgtacgacgactcgaatttgccaacgcctcctttcccatactttttggtcgggttgatgggatcgataatcccgtggccgtacttgccaaggccggtgccctcctcgtagttcatctgagccatcaaccttgccactatctggttggttgccatgctcccgggctgcggcggcaatgggggatagtaggaattgcagtaagcgggaggggaaaacaacgattgacaatggtgatccgtgtcgccggagctcacgcgcacaaagtggatggtgggcacgtctttgcttgcagccgccgcaatttcctgcacgccactagtcttggtgttggaggagttaggaggagtgcgatcagatgtttccaactcttggcctgcattagtctcgccgtgggaaagactaccaccttggtttctcccctcgtcaccgacggaggccattgaaataaccgaggccaagatcagcattgggtgaagtgtgcgcctccctgttaaggccggcctgtgttatataaggggaagtagcggttctgttctgattcggtatacagggaagtaggggctgcgcgatcctgttctttctcttccgaatcggaaagagacgcgtatcgggattcgggactctgttctcttccgaatcggaaagagacgcatatcgcggctgcccgtgccacgtccgcacctgtccactaatctgttagtctttgttcgctatctatggaaattaatccaaaggaaaatcaacccacgtggggtttgggttgttcccccacctgacacccaatccctccttgtgaatccccctatcgtccacttgcgcgggtggttagtgggattagcagggattatccctgggtttggatagaaggggattagaagggatcactaccattcaaaaataattcagaaatgataagaaaaaaattgatcgtgaaaacagaaaaaaaaatcaatgtgcaaaataactctaaaaagcccaaaaatagaaaaaagtagatttaccatagacgaattctgaaaaatagtccagaatattaaaaaaattcataattttggatagattaaattctacaagcagtaaaacatccaaaataatcatatgttttccatagatatgctagtcacagacaagagattgatttgtcatttacattgtctactagtatagcaatagattagaaattaagcgcatatatcgtcttccatgttcggccctgcatatactgatctgttgaaacagtacaattagagactcctaaatctgcagttctgctaattgaattaccattatactacgaataacagttctgcaggcaaaccccaaaagaactgacgaaactaaaactagtttatcatcaagcccttgaaaacaaacttttccttgtctctgaatttttcccaaaaataaagagagtttggcaactaccaccatcagcttccaaatccatcaaaagtcctgtctcttaatcttaaaaacctgaaaaacaaacaggaaacattatggacacctgaatagtcatatgaaaatttgtttggaaaatgacaattattctgtgttaatttggaaaaactaaaataagaagtgagttatcatctacaattctgggaaaaaaatatttttaagacaaggaagaaggtcaggcatgattaagcctagtacatatactcacaattttcagtttttaagcactcaaccatacttgctatagaaaacaaggactatttggacatataaagtacttaccctgataaacatcatctctacttgtctttgtctgaacgtaccagaaaaccagcgtctcatttttcatattgttcttccctgaaaggttaatctttgaatataagcacagaacttgcaatgccaacagttgcaatatcaacacaaatgagttatatgtcgatttgtccacagttctgcactacatatagtaataattgagctagtcaatgatattcatgtttttgtcatatctgtgagaccatgggcagtggcagcactgctgaatgtggtaaattcatcagatatatcatataattattaattatattcgtgatagagcaggtagctccttggaaaaagaaaagtatgcataatacctgttatatttgtgtttcttggagtatcaaccaataatgtaggacctgtccagcaaagaggaaatcggtcaacttcaaatatctataactacctgacaaattttcactcaagtttcatttgcaatttcctttggaatgtattacattacagagagtgcatttctaaagaattgttgaataggcatttcacacttttcacagctattatctcacaaaatttcttcagctaaactgttaattttgttgatcgaatcatatcaggtgaaccttcaatgttggaacaaagccaacgaaaaaattgatctttgcaagcagcaggacaagaagctgtgctctgcacctctgcatgagagaagcaactggaacaatgacaggctaatactagcacctaacactgaaatggagctgtctaattcacttgatcctgccaactgtcagtatacaaagggagatcgtgcaaaatcagaaagactggtttagcttctactcgctcatctaaggctttggaaacaaccgtgttgctctcctcgtcaccggaggagaagggcatagaaatttaccaggctaactagcactagaggatagatgagatcaatacgggttgtgtgcgtcctccccgtcgaggccgacactcttatataagtccgctgtagcgattgtcttctattcatattcgacgaggggacggtgttccgattcggtaagggattcggcgagggaagtagtggtgttccgattcggtaaagggtctgcagccgtcggattgccaatctacgatgtggtggaccttgttgtaatatgctggagtttagggtcttttttgcaaaaaaaacgctcaattcctatctccgccttctctcccaccctgccatggctgccgccgcctcctcttcatactctgctggtgcctctcctctccatatgcaccgctttggcacgcctccctccatgtccctagtgagagcactgcaaaccatcttcatctgaaatgttagtaacattgttcacagaatttacatacatatgttatagtttataaaatcagataagagatatgtgaattttgtgaataatgttactatcactttatcggatgaagaaaagaccaaaataaaagttatagatcttgatgatttatacaactttgttgttgatggctttttcagttgaaattatttagtatttgaaaatattgtttgaagttgtcatatttttaaattaaaattcaaattgttcaaaaaaatgttatatagaaaaataaccaaaataaaagttatagatattgatgagttatacaattttattgttgatggctttttaagttgaaatcatttagtatttgaaaatgttgtttgaagttgttatattttcaaattcaaattcaaattgttcaaaaaaatgttatatagaaaaataaccaaaataaaagttatagatattgatgagttatacaattttgttgttgatggctttttagggctgcaggaat

SEQ ID NO: 14031 - DNA, 17536 bp, Oryza sativa
gcaaagcaactatagatggtcgaccacctaaaagaatgaagcaaacaaacgtatgaatctcggtaactaaagattcacaaagaccaaatctaaagaatgcagtacatcagtaacagaggttgaaacaaaacagaaagccaacctcttatgctttttatcctgaaatgatatgctcaaggaaatctgagttatttgctaagaacctgcacaaattcagaaatacatgatagtgagaacctgcaaggctgcaacacacatacaaagggagaaagagaaagcatgacaaaaaaggaaaggagtggtggtaagaggcaagcaggcagccatctgaaacattgtctgtgccgctgcccactggtcaccgtcacatatgagaacgacttcataacggcggcaacgacagcaagggactcagatacacatgaatcctgtatggctttggcagtggagaggcacatggagacgaccttttttggccgcatacaatgctactcttgcttgatgccgtcgccgccggtcggagcggcttcaagcttccgtgcagcaccgtattactcatctcgccaaatctagcatggtgttggaatactcagagtagcgtgcaaccagacagagagaaccgtcgctggatcgacgaactcatcattgaccgcccaacacgccaaatcgagctgtgcggcaccggatagagcacctggtcatggagctccagcgcaaccgccgaatcaaggtactcgtcgttcgctgactgagcgtctcaccattgagctcaagccagcaacaccgatgacacgaaatgtctgagattggtgccacatcgccgccgccaagatcaacagatccagtggctctggatctatcgccgtctctagatcaaagagagagagagagggagggggagggggggaggaaggagagcaacaagaaagatgagggtggggagcagagatttccccatggagcttaccgcgacactgccgatgagcctcatgtgctagccctgcccttgcctccgggtgaccggatccgccggcaaggaggtcgtggctacccgaatccggcgagcacggtctaccctccgccggaactggcctcgcggtggcaagggggaggtgcggcgatttggctgggtgcaagaagagtggtcggaggcggaggcggatgcggcggtgtggtctagggagagcgagcgagaagagagaggtgacggaacggcggcggctagggtttcgtggggtgagggaccgggatagggatgcaagttgttgcagaaaacccccttagtttctatgttttcgagcgcagtcctattttctgttttttgcttctttgattagaatatttcttttttagaggtcctatacgtaataacgtagaacgtagaaactgtataccagagatctaaaaccaaattatcaattagtttaagggcttttttgcaaaatgatcagcgtcgggcaggcatggacgcacgatgggcatccaacgacggaggaagcaagcaacgcgcagcctccaaattcagctccggagaagggccggacgacgtgtcacgccccggcaagggccacgccagcggcaaacgctgatttgaggctcaattcttggcagctttgtatataagcgatttgtaaacggacccttagtctgctatatagagacagatatatacggagtactagtacatacaagatcgatacggttgatgcaggcatatagcaactgcaccttaaggcattggatcgagcaaataaaaggagatatctgtgcccacagtggaaacaaacagtaattgccacggtacatgtttgcagtgttggctactttcatgagcagtacaagcaagatctgcaccatacaaccaagatccaacggtggctaaagcaaccgctaaaagtcgcagttgctagttgctacagccactgtactttgatcctgatgattcacatatcatgcattcatgctggcctgggatgctacagtgggtaaacttgtggcatctttcaccgctgccatggtcttcgtgtctatgcaagatgacttcataacgaaacggcaacagaagcgtgtgatggcctacagcaattaaggcctcacatgacgctgcgttttgtacttgagctcccagcgctggccatcttgatctggccgtttaatccactcgctactggtaaacggtagtaggagaatgattccatattagtgtatcaaatgatgatcaatccaacccggtgatgaacgatcgatcgtttggtgattttgttgcggttgaagtgctctcggaggttcagagttcaatgcgtaaagccaaaattgttttcgatcctctcaagaaatcatgacgatgatgcgacgcgtttaactagggatcgcactgccggaaaccatccgaaactgactgattggcaccttgtaccatgggatggcactttatcagaagttggttggcacaacgaacgatctagaaacactttatcgaaagcgaaaatttatggacgataggcaatgacctgattcctattctgggctgtgtttagttgcttctaaagttagaagtttgagttgaaattggtacgatgtgattgaaaaattatgtgtgtatgacatgttgatgtgatgaaaaaaagttaaaagtttggatctaaacacagccctgatatctgaacatctgttccttttttttcttgaataacagctacctcgcccaaattcgacagaaacataagctgtgaattatccgcatccccgtaggcaagcaaatctagcttgctgccgtacaaattcactggaaattgccttttgtcctgatcgcgagcagcgcggccaccgcccgtgtcccacttgcaatttaatccgcatccgcgggcggcgagatggaccgaggaagaagtgaagacgaaccaaaaaaaaaaaacacgcatttcctgccttgtaatccaaccatcccatcgacgacgcaacgcctttgatcgtcgattgcttcctttctttccttgtttttctattgaattgcttgctttggctgagtttatttcctaactttttctttaaacatttaacctttttatcgcatcaaaatttttctacacacataaaaacttctaactttttttttaaattttcaattttagtcaaactttcaattttaacgtgaaactaaacacagcctttgtcgcagacgagatatcggagcggtcgacggcggtagttgcatatatactcaagctctattatctcctgcatttcagttaaggccgagtttagtttcaaatttttttcttcaaactttcaacttttgcatcacattaaaacttttctacacacataaacttctaatttttttcgtcacatcattttaatttcaaccaaacttttaattttagcgtgaactaaacacaccctaagggacgaggctactggctacgtacaaatgcacaggcagcacagtacaggtcactagcggcaataaccggtgacggtgacgcgtaatgcttttcttggcctgtcattcactcaggttgccggtgtgttcctcgacatgtagtcatgttgccgatctgtctaagagaaaagcagggagaatagaagaaggcaactcagagaccagagtacagcacggtgaaattcagagttaagaaggcgatctgtctaagaaaggggaacggaagatggagattcagaatttcagaagttattgaagtgttaagcagcatggtgaaatccagagttaagaagagatggcagttgtggaattcgaccaatgtagggtcacaaaagtcataactagtcgtaggtcaagtgaacatcagaataacatttatgctcacagttcatgttcatgctaacttcggagtagtagtactctactttggccctgtttagttcacaccaaacttctaattttccatcacatcacgtcacatctaaaatttttctacacatataaattctcaaactttttttttccaaactatcaacttttcctaaacttctctccaattttagaaactaaacacagcctttgttgtagatatactcatatctactcctactagtaatgtggctatgttttggtgtaaccgaaagatgatcaaaatttattgccctttttaccagctttgtgccaatggatgaggtggtgggcctggggattttcatgctcttcctttaagcttactcctctctggtctgcggtgtatgcatcggccgggcagccggctggatggcacgatggaattttagttgccactgccctgactgccagcacgggcggcaccgctgaattttgtttgtctcccgtgaaagcttgtacgtaatctttgctctacggccaccgtgtggcgtcacccagtcgtcagcccgtcacacacagcgtctgcagttctgcagtttgcgctagtaacgattggcccatttctcgggttacctgattcacgttttcagcaaggttaaaaatcaaataaattaaacttaaaatattaattacttttaaattattcagtttaaaaacactagaacctgatatatggattagtcttaatttttttaataaagttaaatattcattttttaatatcataatagaaaaatactgttaaagatatgttttgagcaccgtgttattgatcaaaccatcaagattatgaaatcagaaaagtaagttttagttgtagagttcaaaataatttactagttttagttgaagtgctccctctgtcctaaaatttagcaatcttgtactggatgggacacatactagatttgttgtactagaatgtgcccctatctagtacaaggttattatatttttgggacggagggagtagaaccgttaagtacgggttgacatgcacccatcgtcaacaccctatgacaactcaaagactcgtatcttttttgaagtaattgtacatcaatactcttttaaaattatacaaagaaaaatcacttccttaaaatagacccctttttgaaatatatgcagtcaaatagcaaaatataactccctaccactccctccgttccatgttacaagtcgtttgactttttctcagtcaaaatgtgttaagtttgatcaactctatagaaaaaattaacatctaaaatatgaaactagttttttttattaaatctaccattgaatatgttttaataatatatttattttgtgttgaaagcaccactatactctattaagtatttatctacaaactcagttaaacttaaacatatttaactataaaaagtcaaacgaattttaatatgaacgttgcaatgtgggctacaacatggagtgatcaattttgttcctgcatactgcaagtagtgtttaggggatttcatgatttaccgcactttagtcattgactcagaggggtctcatcaccgcgaaaatgtcacgtggagtagccatcaacaatctactacctccatttttttaatagataacggccgttgactttttcttacatgtttgaccattcgtcttattcaaaaatttatgtaattataatttattttgttatgagttattttatcactcatactttaagtgtgatttatatcttatacatttgtataaaaatctattatattattaaaggaatagaaaaaagagcctccacgttcgctctcatgtcctacaaattcttacattaatcggagaaaaagaaaaaacatagttcatatagaaatacaatttagaaatagctgaaattcggaattaaaaaataagtaatattagaataggagactagagtccatatagaaatacaatttagaaatagttgaaattcggaattaaaaaataaggaatattagaagaggagactagagtccatatagaaatacaattatgaaataactgaaattcggaattaaaaataaggaatattagaagaggagactagagttcatatatatagaaatacaattatgaaataactgaaattcggaattaaaaataaggaatattagaagtagagtatagagtctgacggagcgtggggctcctcaccgggagaccgcgcaggcccccctttgccggttcggccgggggcgctaagtgaggttcttcgctctcgatctgaggaacgtcagcgggagaggaagtgcacaagacacgggcgacgtagacaagttcgggccgctgagaagcgtaacaccctactcctgtgttctggtggatctgtatgtgaaggaatacaaagaaccggagagcgagagtgagttcaggctctagaaccccttccccagagtcccaaaacccccctttctcctaggcctgggcctcctttttatctggtcaggggtcaccacatgggcctctctctgcctaagaagggaaacatgctttttacaatgagggctagtctacagccggaagtgacctctgacaagcagagcacacgcctcctgccctgctcgcctgcttttccggtggacgcccctttcaaccttcatttaatggccagcgacttcattgccatacttgcgctgaagtctggaatggatctgaccgggactaacataccaactccaggagttagcacgccggctccggctagggacgagagccaggaaactctcatcattccgacgggacggggcgaggcgtgtgacaggccgcctgttgccacctaacccgcgatctgaccggtctgtgaccggtcacacaccgcgaccggtcacggaccggataagcgtgcgctgcgccgcattaaatgcggcgtggcacgctcgtccaacctgctataaatgcggttagtgagccccgctgtgctcacctaacccacacacgtggcgccaaaaccacagggggtcggggcgccccagccctcggggccgaaacgggggcgccccagccctcggggccgaaacgggagcggcccgacccctcggggagacagagggaggggtggccacgtcaccttcgggcccgacccccccgagggggtcaggccacgtgggtgaccgcggctacccaagcctctagtcacgatacccccggccccatgtcaccgacagagtccatatagaaatacaattaggaaataatagaaattcagaattaaaaataaggaatattagaagtagagtatagagttcatatagaaatacaattaagaaaaaaaatagaaattcggaattaaaaaaaaaggaatattagaagtagagtctagagtccatataggaatttaaaactaactaaaattcagaataaacataataaaatgaaaagtagtgtttagagtccatataaaaatacattttacaaataactaaaattcaaaattaagaaaaacatgggaagaagagtttaaaaacaatataggaatacaatttagaagtaactgaaatttgaaattaaaaattaaagaatattgaaaaatgagtttacagtccacataggaatacaattagaaataataaaaattcagaattaaaaaatatattaaaagacgagtctagagtccatatagaaatatatataatttacaaataactaaaatttgatattaaaaataattaataactaacacgtatataaaatacaatatgaatattaaacattaatagtttcgtaaagttattgtaaaatttaaaattatgttatcattgtaatatattttaataatataatgagaaaacatatatgctattatatgagagaaaatataatgatgctagccgtgcaatctgcgtgggccatcatgctagttttgaataagacgaatgattaaatatataagaaaaaatcaacggcgtcatctattaaaaaacggagggagtatttggcttgataacacaacacagatagcagcacgaaatggaaacatactgtacaaagcaagaaaaggaaaattttgtgtgaaaagggtgcatcactcacacgacacatgttactgtcagttacttcccgaagtatactacagtacacttggagaaaaatacatgttatgcacggatgaaggaaaaaaaaatacagaaacaaaaaataacccgaagacacacttgggagaaaaaggtttcaaagacccagatgtatctcccacccgccaattaatgctccctcctcgggaccagcgtcatcacttcaatacaaggaaccaaaaaagagaagaagaagtaaaaaaaaaaaccttggaagaaaggcacagcagtacagcagccagcagcctcagctccctcgccaagcagagagcgcgaggaagaagaaggaagaaggcgcggaccgggatccccccgtcgggccccacatggccgcgccttgagccccgccccgtcccgcccactccggacccagggcaccgagatgccgccgcggcgagcggcgctgctcctcctcgctctcgccgtgtatggtatgttccttcaagattgtgtgtttcttttcttttttttttctttctacccgctgttcttcttgcccggccgggcgggcgatttcttcggggtttgaggttgcaatgcggagtggaattgttgtctggtttgtttcgttgcaatgggatcgccggcctggaagaagagcggtcatggctggctggcttgcgtggcacgttccccaggggttgtggaaagatggtttcgcctttgcttcatggagctgttcctcctgtgattcgtccgagcgcatcggcatctgaatccagtaggcgtggacatggcgtagattcccgtcaattttctccttttgattctcctctctttccctttcttgaatcaacccatgccgagtctgagaaagtttggaatttttatgcaaatctgttgttaaaaatttgctgcattggcgctgcccgcagcgattttcggtgggcttttactacgcttgatttgccggcttaaacccaccgcgtttcagtactgcaccagctgtagtggttggtgtgcatttgcctttctgttgtattgaaccgaaaaagttaacaagcttttggtgcaatgctcgattagtggtcaaggtttttggcgaggttcctgctgttctgttctcgtcttgcaatcttgcagacacatagttttcgttgcactctgcattgctcatctatagtaattttcttgtttttaatcaaactgtaattttgtagtaattcgcactcattcgtcctgcattatctgtaatatttggctgtagtttcttcaaaacaaaggccggaatgaattccattatctaaaaaaaatatatacagtggcgtgcaaaaccgtgtgagttactgcattagtattccagtttccactccatgaaacatatgttcattgtagttatgctgaagtaatagttaagagtatacagatgttatgtatcatatgaacagcattttttttgggtcaatatccttgcagtgccactgggaacggcaagctcaacaactatcgcgtcgtacttacttgggttatggagtagagcacatcggcattctcttcctgcccctgctccagctccagctccagctccagcccctgaaactcaccgtaagtagaaatactgttgaaatttgtacacttaaatagtaattcaggtgtaacatgttctgcaaacttaaatatttatttcatcagtattcttacattcaatgattttcttgttgtcttgaaccgtcttgtaattttgtcgatcattttggttctcaggacctggtattagacacccagtgcctaggcatcacaggaaaaggcctcatgttgccccaccactaccaccaccatcatcatcagaaagacaaggttctacttttctctactgaccaattgagattgcaaatcttagtattgttagcactgaaggacacaacaataatagacgcgtttgtgcctgcaatgtaacagattgcagtgggatttcctgtactgctccactcacatctactccaatcggctccccctgtggctgcgtatatcccatgcaaattcaacttgatcttgtagtagcaccatatcagttgtttccaagaattgatgagttagaaattgagattgcagcaggaacatttctgaaacagagtcaagttcggataatgggtgctgggagtagtcttcaagatcctgaaaaaactactgtcaccgttgatttggtgccactaggtcagaagtttgataggacttcagccttactgactagcaacagatttttgcaaaagaaggtgccaataaactcgtccatatttggtgattataacgtaatatatgttcattatcctggtgagtgacatatttttttgttgacatcaacttcaatagtataattcccagtattgctgtatgtaatcatagaaattttgcaggcctgccttctttggtccctagtgttccaggatccttgggcccaataagcagtagccaatacccctttagtgcaaatgtacacaatagaagacatcagaagattaactctaaaagtgttgccataattgcattatcagctgttgtgcttgtattaatgagctttggcatttgcatcatatggaaatataaaggatttgaaaagtctcgtggcactggtcgtgtttcgaattcgtcagccacaagaaaaacaggtaacttttggcagtcctggtacatatgctaccgttataatatgtcctgttatatccattttgcatttagacaccctctgttctcgaataactaatactgttgaactgttgactattggcatctcactttgatcacaaattacttttaaactatgagattacgatgaatgaaatttgtatgtttatacttgtgatgccacacactttgacaatataacatattttcaagtatttattttattttattttattttttgctaaaggaagaagtggtcaaagtttgaaaataaatagttccagtatcagttattcgagaatgcagataatgttaatttgcaagttcaattttggccctttttttgtgtgattcaacatgaatagtaaaaccttactttttgactgtgtaattcccttgctgtttgtataacatcttgtttctgtttcaggtatgaggtcatcattctccagtatgaccagctcgacggcatcttttgtttcaacaattgcaacatgcccacctacagttaagacattctctatttctgagcttgaaaaggccacagaaaacttcagcttcaacaaaataataggtgaaggagggtatggccgtgtttatcgaggtacaattgatgatgaagttgatgttgcagtcaaattgcttacaagaaaacatcaaaacagagatcgtgagtttattgccgaggttgagatgctaagtcgtttgcatcatcgtaatcttgtcaagctgatcggtatatgcattgaacggagcacaaggtgcttggtgtttgagcttgttccaaacggaagtgtggagtctcatctgcacggtatgtacacttatttagtctacaccattggcatataagaatctttggtacattttcagcactttcctatgcttcattatacattgttgtgatctgcatatttacttctgttttgatgtttcaggttctgataaaatatacggcccacttgattttgatactagaatgaaaatagcccttggtgcagcaaggggtctggcctacctacatgaggatgccaatccccatgttatacaccgtgatttcaaggccagcaacgttcttttggaaaatgatttcactcccaaggttgcggatttcgggttggcaaaggaagcctcagaaggaatggaccatatttctactcaggtcatggggacttttgggtaagtcgcattcttaccatattcacctgtggctattatatcaccccaaaacacactaaatttgtaaggagaaaaagaagaagataatttagtcatacactagtacaccacagtagattatcaatcttgtaggatcgaatcacaagaactaagccaaccagagggggggcgggggtgaatggttggtataccccaaaacccaaacttttagcggaaataaaagttaccctcaaattcgatgtagatcggactgaacgaggttgatccgccggtctgaccgcgcttgtgccgctggtctgaccagtgttgatcgcccggttcaaaagcctgaagatcgcctgccgcgcctgaagtcgtagcaggtctgactgcctctcctccgtcggtctgaccgtcgctatgtcgtcggttagaccgccgaacctgatgaaacacaaatcgaagaactcttaaaatagatgacaactttattgcttccctctgtgtttacaaagtgcaccaacaacactccttacaaaaatttcgactaaactcgaaaccctaactaaactatcaactcaattgctctcaacagcgataccgggaaacctcacactccctctctatttatacccaaggtaggcagcctaaagccacgaaccaaattcatactagaagtcctaatcaccttaggaaaccctctagtacaagaaacaaactttacataaccaatcataccaaatttggactcctttcaaattcgactccgcatcccatacgcacacaatacctccatcgtatgccatatggaatctttaccaaccacgtgcattgaactctagccttagtatctcgcatgatatctgaccaccacggacatcgccttaccaccaagtcgactcccggtccaacttgactctctcgaggcatcgagtcacctacacatgaaacaaacaaagaaaccatattccgagaccaagctatccccaacttgactcattagtagcaaacaacagtattacatacgcatagtatccttctagaagccataaccatgaaacaatcacggatatccaaacaaacaaactaaaaccgacacagtgtcggccggccagactgcgggctagccggtctgactgctcaatcatcaccggtccgaccggcacacactgcccggtctgaccggacccaaaacacagcagatcacctgtgaaatccaatcatcttcaaaaccacttcgtaaataaatttcaaatatcaaaaccaataaacgtcaatgccaattgttcatcacagaataacaatcaaaaacacatttgattttacaaatcttgattgtagtgataaattaaatatttcaataaataaattaataattaataaagctgtgatctaaacaatacaatagacgaaagctttctgagaaatcgtattagcaaataattaacggcgatgatattgtgaataataagctgaaaagaaagtttaacttttgatcgatttctttttgtcatggtcttcaggtacgttgccccggagtatgcgatgaccgggcatctcctggtgaaaagcgacgtgtacagctacggtgtcgtgctgctggagctcctctcggggaggaagccggtggacatgacgcagccgccggggtcggagaacctcgtcacctgggcgcgccccctcctcaccgaccgggacggcctccagcagctggtcgacccgtcgatgccggcggcgagctacggcttcgagaagctggccaaggcggcggccatcgcgtccatgtgcgtgcacgtcgaggcgtcgcaccggccgttcatgggcgaggtcgtgcaggccctgaagctcatctacaacggcaacaacgacgacacctgcaccagcggctcgttcggcggcggcggcggcgaggagtacgaggacgaggaggcgtcgtcgccgtggaacaaccgctcgtggagccacgacttcgccgcgacgccgccgccggcgtcgcgcaggctggcgttcccgcgggctccggcccgcccgacgacgatggactacagctcggacccggccgacggggcggcggggacgtcgtcggcgtcggcgcggcggcagcggtcgacgtcgagcctggtgctggacaagatcgagtcgctggcggcgtacgactggtccggcccgctgagggccagcagggggaggaacttctacaggctgaggggaagcatgagcgagcatggcggccatccttccgaagattgctccatggagggctactggatgtagtagctaaagctgagtgatgatgatgatgatcagatgttgtctgcagaattgcagattgccttccatttcttgtcatgttcttcagttaactgtatagttttctgctcatttgatgatgataggattttgatatgattgatgccatgctctgaacaacaatcaccacaccacccctggtctggccctcattttttccatgtagtggatgaacgcactaatcatcatatcattatggcattttgcaacattcattgcactagaatttagcattagtctaggcagtatcaaacaagacattagagcatgttgccatgtacatgaacaaatggatagcacaacaaaaaaaagtgccttaactactcaactagctagtttgttttcgtctcaatccatctgttcggcagcggaagattgagatgaaaacacactgatttttggtcgttcgttttatttaaatcatttttatgattaatatttttgttgttattaaatgataaaatatgaataatatttttatggtgacttatgttttttttattttttaaaagatttttaaacaagacggatgaaaagttggatatagaaactcatgattacgtttaaaatgggacgtagtagtattctcctatattctcttaaacactctttaggtttgtttaggaacacatgcctctgtacacgaaaaacggagtagctattattttaaaaaaggttcaatataatttttttaagtaatagtttgaaaaaacgtgcgcgtgagggagagggttgggaacctgagaaaagacgggccacagggtgctggggcccactggtcagagaccgggcactcgaaccatctagtgcagacgtggtaactggcgcgcctttctcccctctttatcaacaccacacgcaggtcgacctcgactggaagcgcctcctcgaatcgaagaagtgtcatggctttcgctgctcccgcgacatgcgcgtgccgcatggcgccgccgccgccgctcgcggccgcctccgtctccgggcgtgggcgctcgccgtcgtcggcgtcgagctatagggcggcggcgcggtggtggccgggcgcgaggagggggaggcggaggaggtgggcggggttgagggcgaggtgcgccgggcagtccgtcgtgaagcccgggtcggagagcgccgccggggagggtttggtcggggaggacccgccgcggccgccgttcgatctcaacctcgccgtcgtgctcgccgggttcgcgttcgaggcctacaccagcccacccgtgagcccctcctgcttcacccgttcacctcaccctcatccttaaggttagcttcattagtccttgtaaattcgcgagtcatttggagaattgttcttcgtgtttggcaggaggatgtgggctggcgcgagattgatgcggctgaatgtcagacggtgttcctatctgagtgagttgtgcgcttatccttcttttttttattattaatttgttaattttgatagaaatatctccctagccgctgtggtgctaaactggaaagggaatggaattctgaacgcattgatatggtcatcactgtaaattttgtgaattgtaccgtgcctatgtattgcagttcatttctccgtgaagtatatgatggccaattggttgtgaggctgaagaaaggcgtaaatcttcccgtgatggatccttgggtacggtgatgtatttgttggcgaaaaaccatttattatcctacttaagttattaccgacttcttgttgatctataggtgaaacaaaataaatctctgcaggtcatacttatatgagttaaatttaccttttcttagatgagagttaaatgtacttcaattaagggatatctgaacttatctaaaaacccattgcttctcataataatcccggattatgaatgtagcccaaacaggcaaacacccaatgatttaacctgcatgttgcaatatagggtcgagcttgcccaatctaactactgttaagcagacctcttcctccagtttattaacaacttcgttttctctaaccatttcaattgcagggcacaagtgacccttacgtagttctacaactgaatggtcaaactgcaaaaagcaatattaaatgggcgtgagtaaccttttcccttttctatgtatgctggggtcttggcggaggaggatattgctgtttttttttcacacattttggaatattttgccaactaatggtttaatttctctaagcaatatttgatatgcttgaagatgttatttttctccatcattgatgcagattgtgatttcagtaattgatcaacgtaggacgaaggaaccaacatggaatgaagaattcacatttaacattagtttatctcgagaaaatctactacaggtatgagcaagctcattttcgtacaagtataataataaacactagagattagagtcttagggtgtatcattctacataccatgtcttcataacttgttgtcctaggctcctagccctattattatggcctctctcagcaaaccaactgaagggacacactacatatcttatatgctcatatttgattattattcttgttttataattcgtagaactctgcatcttggaagtggctattgctcttcgagaatcttgttcattaggagtggatcactgagattactattttaaataaaaccatttgagaaatttggcatgtcaacctctgaaaaaagcttaagctgaatgaacaatattaatgccagacatcttgacaaatcgaaataaacatatatgactcaatatggttctagaggacacggcaagtagttttatttagttaacaggacatacataagcaaactagacgtatcattctagcaagttatggtaagctgcctcgcaaatcatagtaataatagcatgcaattctgtgcagcattactcttccttttttatcaactttattacatattggtacatacagtatcagtaaatgattatttgtttaatcattttcctcaacaggttgctgcttgggatgcaaaccttgttaccccacacaaacgcatgggaaatgctggattgtgccttgaatcgctttgtgatggtaactatttttattgacgtaaaaaataaaaatgcacgctgtttgacatttccttttgttatagaaagagcttggaacctatttctgtgatggcatggatgctggtttcttttaattctgagcaggaaattctccataaagaatcatggccaaaatacatatggaacattctggaattggtcagaaaccataggagctaatcacttttatatatgatggcatatgagaaatgagcacttctcttttcattagtgatgctttcagagtactgattaatcaaaaactaacagaacgatgttctagaacaaacttgatttagcaaaacgaattttgaatatgtaacatgcccccagcatttctgatatcaagcggttcatatcttatttgttggggacttggtgtcaactcacagttgcgcacttactccctccgtcccataatataaaggattttgg

SEQ ID NO: 14032 - DNA, 6854 bp, Oryza sativa
attcctgcagcccattcataaaattttagatgggttttcagtttttttttcaagtgcaagcaagtaaggcctcaaccgtcaagcatgggaaagctagaaaagttaaggaaaacccactcaaaagcccaggaaccccaaaacctggcccatctccccggtccccgacctcgcctctccttcctcctctgctcccactccgcctcgccgccgcctccaccatgtacggcgtcggcggcgggggggcggggttgaagccgcggtggacggggtggcgccggcggcgcaaccacgaggacgacgacgacgaggaggaggaggagtccggcgaggggcgcgtcctcgaggcctgggagcgcgcgtacgcggacgaccggtcatgggaggcgctgcaggaggacgagtcgggcctcctccgcccgatcgacaccaagaccctcgtccacgcgcagtaccgccgccgccttctcctccgctctgccgcctccgccgccgcccgcatccagaagggcctcatccgctacctctacatcgtcatcgatctctcccgggttcgttcccccgtgccttctcctaagcttgtcctcgggtcagtcactccgtcgagcacttggtgagtgcggagttttccgtgagctcgggttaggatcactggggatggcgggcaatgctgatcgtgctaacctctcagtgtttgttaaatgcaacacctcgtgccgaggctgatctggtggtattgcccatggcctcaatttggttcgtgtgaaatgtggactggaggcagtattgttgaatcggtgatcactatgtagtgcttttagcttgatttcatatgctagctatttcagtgactagctgcgcaatcctctccacttccacatcaaggtttgatgtttgagttgatgatctcatcactcatgtatgatttgctagcttgtcttcttgcttaggtgttctgcttttagtccctgagagtgggtgttataatcggtgcatatcagggcaatactggaatctagccatttttgtttgccattgaccagggccataaccagagattgaatggggggttttcgccaaccattgaacgcaatgaagttcacaaactaaaatgaaattgtatatggtttgtattaaaaatggttcttctacaattataatagtttgttttgtaaaggaaaaaaattcttgtgccaaagggtctcctgagatctgtggtaaataaaattctttctataaattactgcactatgactcttatgagcaagctaaaaaggaaaagacatatttcataccccatccctgttaggctcatgctaatagcaattttctcttggttctgtcctatctgaaaacttcataggaatcggaggagcgtgaggtttttcattatcaagattctgaagcggtaaagcgttttggttgatcgtcatttgttttatgtcaaaggaaaggggcaccgtactgcattactgctccataccatttgacattgttggaaagtgttttctgttgatttgagaacactacgtatattttgtgtatgcattcatgtggaaaaagccctttcttcctttgggtgataggtagtaaataagatcctctttggcacagctccagatcttagatccatggtagatttgaagtttataaattaaattataatggtttaaaattctaaatttcatttgaaatgtgcacgaaataatttatttaaatgttattaacgtaatcgtagatctagatccatggatttatggagctagaaatacctagctccaagaaatcttggagagggcctataccatttattttagcatatgtacattttcttctcacaaagtaggctgctcatgattgttctggtgatgaagatatttttactgcaaattgatatgctgcccacgacttcttttacttctttgcattcggttgtaatctccatttatcctggttgtatctttgatcatgtaggcagcttcagagatggattatcgacctagtcgaatggctgttgttgcaaaatatgctgaggtattcataagggaattttttgaccagaatcccttgagtcatgtggggatagtgacaatgaaagatgggatttcccatcgacttacagagattggaggtagtcctgaatcacagattaaagcattgatggggaagcttgagtgttctggtgaaccatctctgcagaatgctctagagcttgtccatggttatttagaccaggttccttcatatggtcacaaggaagtattatttttgtactcggccctgaatacctgtgatcctggagatatcatggagacaatagcaaaatgcaagaaatccaaaatacgatgttcggttattgggcttgctgcagagatttttatctgcaaatatctgtgtgaagagactggcggatcctacacagttgcactggatgaggtcttaaaatatgctttgtgtgtttacctttccttattcagttattgtgaagataaataatgcctgttttattttggcagtcccatttcaaggaattgcttctggaacatgctcctccaccacctgcaattgctgagtatgctgcagctaatttgattaagatgggttttccgcagagaggagcagaggatcttatctccatctgctcttgtcacaagaaaataaagtcgggggctgaaggttacatatgtcctagatgcaaagtcaatgtatgtgagcttccaacagaatgtcgaacttgcgggctgacactagttagctctccacatctggcaaggtcctatcatcatctcttccctgtacaaccatttgatgaggtgtcctccgtgcacccaaatagactaggtcaaaagggaggacaaaagtgttacggctgccagcaaagctttattaaccctggtatgcagttctttaacacgtctaacagtacatgctaccttttcaatgcattttcatacaaggaaagatatccttattgtgctacatatgttgcagttggtagaaaaaagaagagaaaatacataatacaaagcttacatttgtttgttattacatggcatcatgttcttcaattaccaatcctcatacttctcttacatttaatgtttttcactggtttttgtgctagattatactccctctgtcccataaaaaaccaacatagtactagatgtggcatatcctagtactatgaatctggacatacctctgtttatattcgttgtactagaatgtgttatatacagtcctaggttcgttattttttgagacggagggagtactttgcaattatcaggtttattaattatttatccaatatccttgcagatagtcaatctagcctccatgttcgctgtccaaaatgcaaccaacacttctgccttgattgcgatatttacatccatgagagcttgcacaattgcccaggttgcgagagtcagcgtagttcttcatagggatgccattgtggtgttaatctttgtctttttaactcaagaagctacccgttgctgtaagctttctcgtacactgacattggtaggcgatgttgtgaggtaatcaaacagtgtacagatgatatagtgcccggcctccattttgttgacgcttcctgttcatttagatggagtagctagttaagctattttgatacagagtactggtcaaagagttgttgaagccatagcattgttgctgaggggaggtgttagaaatgtacaatgcgactgaaaagtgaaaacttgtaactcttgccgtttttctgaggcaaagatgtattctttcagtgtcatagtcatgccctgacatgccatttacgagcagaggctgttcctttctttttttttcccccttcctctcctgatatgccaatatgctggatatcgacggctcgacgcacgcacgcacccggcgttttccgttgctggttgctgactgtagaatcgtcaaggtaagcagttgcctcgtgcaattaactgcacaatttcaaagcaggcggagacgcagaacgaaacggcaaaacgctggagagagcacgatgttgctgacccaagaggctgatggcttacgtttttttgctgcctcgcaattcgcttctgatgggcggagtcaacacagatgctaactctgggctttttcgttgttccctttcagctttccggtgacgagcagtggcgatcatcatgcataattacatatacgcagcatatccctggttccctacactctgatgaaagtgtgcttcctgtggctatcatgtcgactttgctaaagcgaatggatgacaggcagcggtgccagtgctccttttcaccagttgcacggccaagttgtgggcacgacgaactgcaggctgctgcaccgtcctgtgcgttttcaactgtagatcactcgagtccacttgaaagaaacacaggtgagacagcacgacggcaaccgatcgaccacggccttttccgagcactgcacagtgtgcacactctatggcgctaagcccttttcgtgccctatgctgcctatacacagtcacttgcaacttcctttccttcaacagtacggacgcctcgctcatataaacacatatacgcacatcatatttttataagagtaaattttacaaaactacatgttttatggttcaagttgcagaaaaccacacatattttgacacttggcatttaagtacatatattttggtagtttagtttcacaaaaccacactatcgatgaatggattcacacatgagatgacgtggttgttttatctagatgatgacgtggcatcctattaatttcatgggatggctagtaataagatgccatgttctcgtcctagttgaaacagtcacatcatctcgcgggtgaattcattcattgatagtgcggttttgtgatatcacactaccaaaatatatatacttaagtgccaagtgtcaaaatgtttatggttttctacaacttaaactacaagacgtgtagttttataaaatttactctttttataaacatctctaaagattacatcggtatatatttaatttaagattaacaaaagttatcatagacatatctctctatcatatttcaaagttaccatagacatatatggatgtcatgtgtcgatatatatagtattatctaccactaaaagaattaactagctataaatattaataaccgtgttaagtttataatttaaatccggatcgacaaactcaaaccacaaggtcgaactgagttcgccgcttgcaactttctgacgatgtggtccggcaccggctgggcatcgcatcgagctcgtgcaatgatactgaccccatgatgggatttgcttgctttggcttggagagacaacgacatgattgccatcatgctagttgctcctgagctgcagcctctgtactatggacaccaaacatttttattactcgtatctctgaaccaagcaaacattcagaacccagaaaaaggcagtggtgaatttccttgcatcaaatggctgaaaagttcgcatcaaagtttggtggaaaaatatcagctccaaaaggtgtggtttaccgggacaaagccctttacgccgtgagtttaccaagcccggatttgccggattccctctctagcaggaaagttcattgctgctttacggcagaaatcttcagcatggaaagggtggctatgctaattgctaaagcacatgtttggatagtcaaccatgaaccttgcagagaggtaaggttagctgcacgacctggtttgggaatttttcttcttacaacgaaaaataactatgaaattcttgtgaaattatgtgtttcagacggcattagactgaacatctattttctaaaaaataagactgaacatgtcttcgcgctcaacagaaggtcagtgcaagcaggtgcaatatcgccttttctgatcacaccgaaatcattttgaaagcaacacaagtataactcatactacgcgtgtgtaacatataatggaagggaaaataaacttatgtccgttctaataggatggaccgatggatgaagccttttcccttggtttcaccagcatcttgttcatttatttccactatcccatactataagatgcttgattcaattcaaaagaaatttgaccaataattagtctaacatgaattaaattttatttgacaaaaataatatcattgggttaaaatttgaatgcacttttctatggttgactttgttactataaatattacagtaataatatacaagaaattaaaagtcaaaaactagttttatagattgtgccaagttcaattgtgttggttttttttttctgcatttctttcgatgtcgctacatgcgcttaccgcacattataatttgaaacgagggagtaatatgcatccttcggtcgtcccgtcctttcagcttacgtcgagaaggcaaggacaggtgattgtccaacgagtcttatgtacttgtgttagtggatcaagtgtgcctcgtgcgccattatgttattttccgtcgaactcactgcaattatcaccggatttgagacagcataacagctgccgagacataattatgtggggattattaggatgtcacgctcggtcggtcacctgcattgtacttgtaaatatgtctatcagccgattaacaaacttgagaacaccccagctaacaaacctgaaaacataaatcaataaagaaatcaaatctcgtttgattacactcgagcatctctgcaccggtaggattctgctatggatcagcgtttacctatttccattttgtttttcctgatgtgaatattggctggatgtgagccagcaggatagctttgttaagcctcaaaatgttctgaacaatctgcag

SEQ ID NO: 14033 - DNA, 8205 bp, Oryza sativa
acatcatggcatcccttgtgttttgtgaataaaaattcattgtttgatatgtctcctttgttatttactttacttttctatttgttgtttcagtcaaaatggaaggatttgctaactgaccttatgctagtgcctgctgggtaggactcgatagtcaacattatgttctctttcattcatttacagtttgccaaatgcctggtttcaaagagtgctagcattgtggtacattttgatttatgttatgtttacctgaatatttccaaattgaatgcagactaaatcctgagaggttgggtggtgacttcaaacaagaaattcaagttagtcatctatatctttattcacttgcttctgtatttcacctcactttatgctatctggtatccaacttcttgacatattacatttcaggttcacagcggattcttgagtgcatatgactctgttaggaatagaatcatcgctcttgttaaatatgccgtaggataccagtaagtatttctataatgaaacagtttctaccacaaacatatatctcctgccaagtattaagtaatctttctttgtttctattcatttttccactgcagggatgaagaagacggagaaaacatacctaagtggcatgtctatgtgactggacatagtttaggtggagcactagcaacccttcttgctcttgaactttcatcaagtctaatggccaagtaagaagctctgaatctgatatctgatcttatttgctggatatgagaggaaagactctcatattgaaatttattaagacaggggtgaggctcgaacccaacccaggtcggctagcccacaccttgtggtgctagccggaagacccttgggcctttatcatatctgaccttatttcatacagaccttatcataccattaagttcaggcttaatgtgggaataggtttcagttaaacatttaacgactcataagaaactctttggttgtgaaagatcagatgaacttggcaggtctctgacccaatttaattgtcacgctctagcaaacctttgcaggaaggaagattatatgtgctttgacccagttcaattgtcgttctctagcacaacttccattttagtatgaatagtggcatttaatagaattgaatgaacttattttgaaagatactccattgttgtaataacaataacaataatccattattgttgttgttgttgttgttgttgaaagctcccagttttatatgattgtgctataaagcaacaaatatatgtttgtatagctcttcttctgcaattgacaatctgtaaaattgcattaaagacagcttctatttccctacatccttttctacgatcattcgttcatatttatccgttcaccttttataggagtggggtcatatttgtgacaatgtacaactttggctctcctagagttggaaatagaaggttcgctgaagtctacaatgcggtaactaagaatttcaaattgaaataggcttgcattcattgattttgcatatcactctgtcgttcaaagttcaaaccggttttccttaaatcagtatctaatcatttcatcatatggacaaggttgatagtgcaaataccatctctcataatttgaaacaaaaattgaaagcagtctgcaataccacaatctgccttttgaaaccattgtgattttggactaatttctgcagaaagtgaaagacagctggagagttgtcaatcaccgtgatatcattcctacagtaccacgtcttatgggctattgccatgtggaagcaccagtttatcttaaatttggagatctaaaagatgcactggtgattagtattcttatcctatttcaatcaactttgttgtaggaatgttttttagttccattcaaagttccgtgtttttatccataagattctaaagttctcaactgaaaccattgtatgtattttgatataggtagatgaggagactatagatgatgaaggtgattccataggggagtacacccctgatgttcttgtcagtgaatttgtgagtgtcttgtgaacttaatacatttgtctgtagactcttgactagctagattctcttgattctgatgataagatgaggattctagttttctaaaaataaaaagagacacttagttgttttaattagtttcttcacaatgttctgttgaactcataataccgatgtaagttgaagaggataaatgattcttgaataaacaaatgattttgctcaaattgcaattgaaatcaggtgtattaaatccctgcagatgaaaggagaaaagcaacttgtggaaaaactacttcagacagaaataaatttgctccgatcaatcagggatggttcagctcttatgcagcacatggaagacttttactacgtcacactgctagaggtttcttaccttgcttatttttattttcaaacacacagtttgtattaaagaggaagaaaggggcagaaccatgagcacacaaacaaacctgcacacttaccttgcctaattacttgtccttgataaatattctgtttttcacatcatctctgcttttcatttcacttgttatatatcgaaagcttcctccaagtaaatttaaccaacaaaatacacttaaacttttgcagagagtgaggtcaaggtaccaaacaggtgacggtgcaaatgaagactaccatcagttaaccgcctgatcttagtacatgcttgaaactcccaaacctgggttgcctgtaagtaccactcttctaagcgcacacagcttgtacttgtcttatggatatatttggagttgttggacggtactgtagtttaggggataattcggacaaagaagaaagtttttttgggggtgtttgaggggggattggagtttgccctactgttatatgcgtaaacaaataggcggtgcttgcccaacattcttttactagcaacctagcaattatccaaaaacttcagtggcactagtgcattacccttacttggtgattggtgatcgccacaaagttggttaaccccaaaatcatttgttctgactctgtgtctgatgtccgttttgagttttcagggctactgccgttcagcttctttggctgatagatatcaagaaacattgcaaacaatggaacctgtgcaggaccagtttaggggttatggtcgaactcggaagtaagaggacgcattgcccttggtagtcagtttgtatgataaagcttcaagtaatcaggacagttatctgaggatcctcatctgcgcaaattgcaaatggacttagaatgcaaagaccttcattccccggccgtaagtggtgtgattgacacgcacatccttcctcgtgtgtggtaaattcgtgtaatcaaacataaggcttggaaaatgcccttttatcctcaagtgctttgaactgtaaattatataagctctatgatccttaggctaagcagttagtaaacgtggcaaaaaaaagtgtggaggtataccaaaagatgtaccaaaaagggtgaaataaggggaataaatgcatattttgggtcactgttttggaatcttgatcaacaaaaggatttgttcagttgtttcatctgggccaatatgcacgcaagtctcaaacgaggacaacacacaattttcaaggtacaagagcaaatatgtttatgaccagaggcatctcgattcatatcaacatctaaataaagttttctacaattgctgctgtttgttaaaaaaaaaaaaaaactaagatgagaatagcaacgttccgtttgctcattagctctggcacactgcaaagcacgaaaaaattcatcggacaaatctacagagataaaagtcttgcccataatgaaggtctgatgtatggaattattgattaccgtagtgaagtagttggtatatagatgacagatcaaacagcagcacggaaatgcttctgaacatgatgtgttgcacgcgtggctgaatcaacagtcactccccctttatttgagagaaactagataacatgtctgacctagaatttgctaattccacaattaattcaagtgctgcatgaaataaatatagagttagaccaacacacaaactgaggggttcaaactgacggtgcatgttcctgttagaaagaaccgaacctgtttcaaaggacatctgggccgatcgtagttttggagataccagtgctccaaaggttgatagtgcttttgatcttgccttctgaacctaaggtgcaaaatatcaagaaaaagttcggtaaaattttgaagtccaagaatatagtactacctccgttttaggttataaaattttctagcatttcccacattcatatagatattaatgaatctagacacacatatatgtttagattcattaacatatatatgaatgtgggcaatgctagaaagttttataacctgaaacggaggaagtagcacatagtaagaaactagttggtcaatggggggaagattggtcaaatgaactagtcaatgcacaaagaaaactctggctttgttggcatttacaaattagaatagtgactgctctacttttgttgttataagagacaccatcaattatgctctaatgttttcttccctagatgaagcaatatagcttggtaggtggacaactccaatttataacggttacaaaacgttttacaaaaaagagctataatgtatatatgcgagttccagtcttctatccttcatcatgtatataatgtaggcttcatattaaacttacatggctactagtgtccacactagtagcagactctgccggagttgcatctgaatcatggctgccatcttcttaacacgagaagatacgatgtgagcaaggagaactaagaaatattactaattatggattgtggaatgctaatacctggcgttgctgctgaccctcggtaccttaattttggcttagtagtatctcgcacaccgacagcgtcattggagttggatttttcttgcaagcaccactttgacaggataaaatgtgggtttggctctgaaacatgatcttagattagttcatgacgtgcaacatggaactaccagaatacttagatatacaagacaaaaaagataacacgagggcttctggagaaaacaatgatgtttgcaaatacgttttgacattgctagcaaggattaatagagagatgtttcacctgatgactgcgagtctgcagaatcaaccacttgcagcttgctagctgcagattgctctttgtgatcgaagagtgtactcgaaacacgtgatgtacccatcgagtgacgggcacttgccagatcaagccacccctagagacaaaacaaaaccattgttcatgctaatctgtgaactctgctactgttcagtaaatcagacaaagactaaacagcaataaaggacctcactctttcctaatcagtacatgaacaaggcagccaaaagagttcagttactgaaaattatcgagctaaagtgttaggagctctaatgggccatgtcatccattctccaaagcaagcccaagccagcccaagcaacagtaaagaaagtgaaggctgctgctcctgcagcacacatcgattgatcaattggattggcggagctgaagctcccggcggcggcggcgacttgggcggccggtgggcacccttgtcgatctctttcccctacctctcctcctacctccaaccttctctctctcagttctagaagcttctagaacttgtaatccctagtttcttcttctcttttcaccccaaaacacttgttgcttgtatggtggatgtttgctattgagttggaagaagtgggttcttaacataaaggtaaaaatcagcatccacacaagtttcagggcacttcactcggtggttgttggtgcaatacgagcaaaataatctgaacaagcattcttctccagaacaggattaggagctgattctaagtgacatgcagttggctagaattcaaagatcacgaactcgtttcttttcccctcccgatagttaactgcatgctactcctgtaataactatcgcttcatctggagttaaaactacatcgcagagcaaaggaaatccaagaaaaaaaacacgaatcacaacaaaccaagaaagaggtcgggggtggatgagcggagagcgggagccgtaccgggcggagaacggaggacagtgaatccatgaggaggaggtagccgtccacagagtccatgaaccgcaggatctcgtcgtcgtcgcctcgcccaagtcgtcccccctctgtggcctcgtcgacctcttccacttccccgactccagggacgacggatcccgtgattcgcagctgctcctccgtcgccgccgccatcgtacccggggatcccgtgcaaaccctcgctgtcgaagctcactggtgagtggcggaggccgagccgccgcggcggccggggaggatgcgcgtgggtctcgagtcctctgctcgtgcgatgcgggtgtgtgcgcttgccccgactcgtgagcgctaatacacggccggatctcgggcctacggcggcacgcttttgttgattgatcgtttcggtgtgataccgaaacaggagataaaatttaggaaaagtttatacttactaaagttttatttcggttttactatactatagtacttgcgatagttttttagtcgtaaaaactttcaaatcatgaacttcacatcaagattcatcagataataaaaattctcgcaaaacctgcggaagcgaggagtcgaacctacactgaacggagctaaatttattttatcttgctgaaactcttattaaattttattttagtgaactcttattaagaataagtgtcatgctttgagtacatacagaaaattgacgcgccaataggcgcacccatgacttcttatatctgcactataaaaattaaatatttgatagaacctattaatagcatttttaggtagtactccctccttccaaaaatctgagtcatatttctttttcatcaagaccaagaagcaattaatttattcaccatgtgacaaaaccaataaatatgcaaccaataagtattaaaatggcttcaacaatttaatttaacacataatgactacaaataggacttagacttttggaaaaaccaaagaatgaaatatgtcttagacttttgaaaggaggtatttattacttcatttgttccaaaatatatataataatttttagcttttataatttgttccaaaatataacaaattctccgcatactattctgaaaataaatttcaagaaagcatacgatcataacctacgaacatcctattcctaaccattcacaaccctttacaattctttttttacctacctccactttccatccaatcacattcttccccatttaattctaccaaatttcttaataaccatgttcaactataaaatttcttctattctaggttgaaggtagtaaaagatttacagtgccatatatttctataaatgtaaaagttttgaatgaaacaaaacttttatatgttttcacggttttatccatatttgtattatatttccatgttcttatttgaagtattgtatttgtctttcccgaatatagtaacataaatatttaagcacattaaatatttgacttattttgtttttctcatcaactaaaatacagacaagtaattatttatttgataaaatcatcctatgagtatataattgcatataattggttggaggtactattatgaaccttaaaagaattacaaggatcattctataaatatgaagtggagatgcagttaggcatgcacatagaccgttttctctcacgcttttctcgtctcacgtccgcgcaccgttttcccccttcttcacagttcacactctcctccaagaatgttcgtgttttttttccctaatcacatatgaacccagcccaaccaaagtgcaaccgtttagactcaaggaatcaaggcctagctgcctggagtgcacacgtgggcgatggccgaggggctgctgccattccattgcacgtgaggggcaatccgtgaatcacgccgcgtcacttggtagagctctctgcccgagaacgtgcacgaaattcgtattatagagatagattttctaaaatttttatctagttaaattaaacggttaatcggttaatatcattatttgtagggtttgtt

SEQ ID NO: 14034 - DNA, 8957 bp, Oryza sativa
tacattgtgaaacggaggaagtacaatattactaaaaaatgtataagccatgtgtcatctagttccctaggcatagaaattattatatgacagaatcgtgcttaatagttctgcttgtcagttaaacgattgctgctccagcttataccaagctttagtatgagaatggcattatgtataatccacattttagaacaccatgtttaacctaaaagccaaggtgcatcatcgaaattctgatcataaaatgtacaagctaatttgcgttctggatagactataaagaacttaaatatgagcatctactactctgggtaggccatgtatatattactgcacaaaggaaaggaaacagtacaggtaggacgtaagtttcatcgtaacacgtaaaggttattatttcacccttagagcaagtttaatagtatagcccactattagctccaatttatctatagtcaatctaatagccaattcatacaatagttgcttactatactactaatatatggtcccacctattatatacacattgcgtcttagagtccgtgctgtagctggctacaaatatgtttacagctggctaatagcctgctattgtacctgctataggctctctacaagacatccatgtcagcatattttcctacttggaagatattaaatgaagagagagagcaaaactatctactaacctagaaatagtctatagagaaaaacaatgcaatggattagagagttatatatacccatatagacataccattgaagtggtttactattaatctagcctattgctgagatgtacatgttttatagatagcaccttactttactattgcgggtgctctcagtaagaagatgaacttacttccgaaggtggcttggcccttcctctttacataacttgaattcaggaggtttccaataatttgcagcacatagttcaaaaaggaatgatcttgctgttttgtgtaccatgtcacctaccaagatgattgacagtgttaaggcatttcctctaaaattaaacaatcaaaactgtgaagtgtgaacccagtatttggtaaacacatagtttaaaatgatgttagtacaacgacacggttgccaatctcgtacattttagcacataaagttaaaaagagataacatatattatgtgtccacttgtgcggttgtgcccaacagaacaaaattaagttatttttcgcgtacacgcaacaaaattaagtcaaatgtacactacaaagttgaatggaatatgtaattgcttagtttgagctacaccacaatattgtaactgtaaatctgaatatgtaggtaactgtttagacttccaccaggtttcaaattttctaatggtagcactttaaagtaagaaattttagcataccatgatacacctttttattgcttttctctgttgcttcactaggcagacgaccactctgtgttgccaacttgggttgattgttccttccattattgacatcatgtttgccagaccctgctataatttgattgtggaatttagaactcctagtgaaagatgtttctgtattttgaaaaggtatgttctcttcatgtatatgtggactcttcatttttacagatatgtcagcctcaacatcgattggatcttcattatatcctatcagttctgattccctcttcctggcaacaatcaaaatctcctcaagggacttgtttctgtgcttataaccgtaattctgcataatttacaaaaggaccagtaagctggttgtggcatgcattttaagaaacagggtatttgaatggacagattaacacaaacaacaaagagatattgtgtaaatttggcaagttggactggaaagcaatgaacacaatgaatagtttctttccaatctattaaatcaatgatctttcacattcatgtcaacaattaagcaaaataaaatagatcgttgtaatggctgaggttctgatactcacattctaataataaaataaatagtgttcccgcaaaaaagtaaagcaaatggaaaaatcacaaaaaatatatcttctgtatagactacagagagtgcttcgtgcagctaactgaaagcaaagcattcgtgttgcatggtaattgcagaagaaaatgctaagggaacaaaattgtaccttcagtttagaaagtgtttcttgtgcagcaaactttctagcggcttttgaattccgatttgctgcagtacaaatgataattttgctctttatgttaacttctactttgacatggtactctccatcagctttcataggtttcggaaggcctaactcaaatccatgacactgacaaagctctcgaagttctctcatcggattagtgtgcatgttggcgaaggtcaatactggctttagaagcataagcattaccttccaaacatagttcaggttgaagcctgaatctaaaagcactgcgccaatacaagattcaacaatatcaccaagagcctgtattgttgtagataaaacttataagcttttgccataaaaaaaatcaatcaatcaattacatataactaattgcttacagaaaagatcacaatcatggtaatgagctatgattaataattctctaatacacttgcaattattgataacacttttgctcattttgtagaacttataaatctcccctatcatattgaatattaaacagtatccttgaggagtactccttccgtcccataaaaagccaacctagtattggatattgacacatcctagtactaggaatctagacagagacatgtccagatttgtagtactatgatgcatcaacatcaagtactaggttgagttttgtgggacagagggagcaaccacaagaccatggtctttcttcctctcggctaaaaaagggttactacaaaggtgcagatggaaaaaaatctctgcattaacgtcaataccttgggacatgctggttcttcaagcaagtctttctctgaattggagagcttcacatacatctcaaatttacttattgctgacgtgagatggtttgaatcctttataagatgcttatggatagatttctcaaccgccgcataagcaagcgaatcattaccaacagctaacgatcttagatctgttatttgaccaggttttatatccggataagtagagtagaggtacgaagttatcacatactccaaaacagcgtctccaagaaactccagtctctgaccagaaatgaaaagaacatagcaggtgagcaactatcaagaatcacagcacctgtgcaatcagagagagagagagagagagagagagagaggggcaactctgacctggtagcagcctccagaatgttgactaaatgaagggtgtacgaatgcttggagaagtagacccttatgtttgaacttgtaacctatcaattcttcaagcccggcaatgtcagtgtagtccataagagataaattgatggagcttgaatctaataccctatagagagctggattattaaaatcaacgtctattccaatccaatgcaggaaagcaaatgcagctttgaatccaccctcaacaagaaatgctccaataagcgattcgacaacatctgcaatcactttcctatgcagccaatgatgtgaccttgtacatctcaggttacagttttctctgttatctggatgaatatccatctggtgtagtctcacttccacgtcagtattgcaaacaactttacaaggccttcctggagcaaagaactgagtcggttcaaactgttgatcccgtatgtatacctaaatttcacgagaaagcattgctgattaagaattttgcaataaatacttgacaggaaagttgtatcttctacagcgataaaaggaatccatctaaaaataaacggaaagggaaccgttgtataaataagcagacaaaattaatagatcacaagtgtcacaaaatgtttgtcaatattgctactacctccgccccaaaatataagcatgtctagctctgaatctggacactagattcagagccagaaatgcttatattttggtaccgaggtagtagatcataatgaaagagccagatagtgcagaatatgatgattctggtagaattgtagatcatacaacttagcaataaaaaaatgggttcaaggttaactaacctgcaatttttttctgatcgataactcatataaatgtgaattgttcactacatcagaacgtctcctggtcaattgcccttcatcaagtccttcatatgtaataaacttgtgacgtccaactacgtacttcaagaaagcatcgcctaggacttcaaatcgctccaaagatatcctctccaaacatttctcagtagtaagcgcttcaagtatctgaaatgaacccgtctaagatcacaactattttcggcatggataagcaaattcaaactagatgttcaggatcaaaggtacaaaagatggtgcaacttacaccagaagcactaatttgagatgcctctggaaaagaagataacatcacatccttcaactcaatagccaccagcaaattctccaaacgatacattaaagaaggtaacaaggacagggaactgcccatatcttttgaaaacccaatgaccttcaaagagcataattctggaggtaactccacgaagtgctctagtaattcacggccctccgattcttaaaaataataataacaaaagatgtaacaacattagaagtactatacctggatcagaaccatgcaaagattcacagcagagtaagatattcaaaataggattcagtaatgcattgggtcccaagattataaatgtactactagtctactatagtaatcccagtatacaaaagccggagaaggaaataggaaaaataacagatccaactgattcccaagcagtttccaaactctaaagcaatccacaagcagttcaataattttgaaacaataaataatagaagtttacaaagcaacttctccgcgacatatatgtagttatataaaatttattatgctctttctgagctgtggtctaatggatgacaaaacattcttggtagcataatgatatactgattacattttttatcatgtcataataatcagaagtaatgaataaggtgtcttgttacggtgggacaacggaataacctgtggtctccggtaaccgattatgaagcaaatttcgcaggttgaagatctgtttagccttcaaaagtggctgttcaggatgtgatagctcaatacgaaacctaattaatgcataagttcatcaggacatgtataaagctcttaaacttgattgtgttgctatatctaccttaaagaatgctcaatagaggtattgcaatgttgtactttatttagtaaaatcccattaaaaaaacatgtaaaccaggaaggtgagcacggataataattgacttattacctttccttgaagtgttctgcataagttgcaccactgtgctcgctccaagcatttatttcgtccagaatgccatcaacaaagaaaaagatattgttgtggggactaaagactacactgccaactacatcggttttactgaagattccatcaagaagtctcagagactcatttgatgaatatgaggcatgcacagacacatctatagggtctttaaaaatcggtgatgataaacagcgctcaactgctggccagtcaatcataaatctatcaccataacacttttgcttgatgggaagcagaaggtaaaatgttgaattgatttctaatgtaacatcattgcccaatttaacatggggtgaagtaaactcagatctgtccaggagaatcttcagacacatctcttgaaacttgtgtgcaagcatcatctgaaaataaaagaatattaaataatatccaacaaacaatcatgtgttatcaattgaacagatgagcaggatgatgccttctctttctcaaatgctattttccccaaatgcttaattcctgctttcacaatcctgccacgagcaagatgcaaatcaacttgcaatgtttcagcttccacaggaaggggattgatcacaaagagaccaaacatctgatatcgcctatcttctggtatgggaataaatttaacatagtagaaatgcaagttcgataaagaatccaactttaatcccgaaggtttgagaactgcaggaattaacatctcatgaagctcttctcttagactatcatctgaaacaaggaaacaagagttaagccagagccagcattatgcgcttatggtactgtatgaacaagtgaaaataccttcaactttgttgtttgatgaattatttgttactgatactttattctttcttgaacctggacccggcagaagaaaatctgtcaaagcacccaatttatgaagttttacgcatgcctttaagcatgcatctctcttagcttcatcttttgacagacatggttgaccatctgcttgacggaaagcagcatttggtggaagaattagtctgcagattattccctcgatgccatcaatgtagaagaacactggggaaggagtaaaaaaccttcataaaaaggagttatattagcatcgcaaagaactaatcaataaatcattgtcatggcgagttggtgacagactgaagagcaaaaaaaaaaaatcttgacatacatatccctaggaaggttgtcgcagtagcaatgtagtagagatacactacaagcagtgctaatggaagcaccggtgttatccacttgataaatgttctcctcgaggcaatcaaacatatcatttgaagttcttgagtctatctcttcattcataatgctttcaccagcaatataaccattaagcaacttttcatgagactgattttctctggcatgtatcaaaatgagttaggtcttggaccataattaaggactaaaatacagttgaatcttacaatatgaataacacttatacgtaggggaaaaaaatcacctctctaggagaacaacgtatttagatttagtcatccgggcacgcccccttgattggataaaactagcaacagtttctggaagatcaaatcgcacaacaagacaacacgtctgaatatcaagtccctcttcacctacgcttgtagcaaccaaaagattcacctgcaaacatcagacgaattttgatgcaagaaatacaatatatgaacagcataatttagattcaagtggtcaccacaattactttaccagtatatttcttaaacatatgaaatataaaatgcagaactaaagaccttaggcccacacattcaaatgaaggattatttgtacactaactatgctatgaaatcaacgaccttaggcctgcttgaataaaatcaacgaccaaaacaaccttatgtaattattagtaaactaactatgctatgaaagtcaataatccatcccttttgctttgagacaataaggatgataacttaaactcagtaagaaaaaaaaatgaattaatgcaggctgtcacatattcaaaatacatagccaaagaagtgttagaagaaattgttaaaagaaaacaaaaaaagaggaaatatcatgaaaggaatggttattaattatacctcaccagaagaaaacctttgaacaatagcatccatcttattccttgacatgttctttgatcctgagtggcagcccacaagaaactcacatttccaaaattcaagacacttcaagttttggagaatgtttgatattgctcttgcaacagttattcttttcacaaaaacaatgcatttcatgttttcctgcaacctgtttacggaagtggtcaacgcagaagaaccagcatgatcagaaaagacacagaccaaaagtttctggaagctataagctaaaattgagatgaacaaactgtttggttctccctaacacttcaagtggaaacagctaaatcaatggaaaacctaaaaaataatggcattggtaggagaaggtatgttcaagaaagatatgataccaaacataattacacttacccgtatctcgaaagaacattgataagaacagaaaatttatttgagaagaaaggttcttcaagcttctcaaggtcaaatgaaccagcgtgggaacctaagaagcacttcttgtcagattcaatcattttttataaaaacaaatgtatatcagctgacaattatttcatcacaagtcctctgaagaaacaaaaaagaccatatccttacaattccaatactgaatgttgtttaaaaaattgagcagccctaaaagcagaccctgccaattctggtttttttcagatgaaatttcgcactttttccatacaactctcactctgattttcaacccccaaccacagtgtcaggtgctatctccaacgatagattctatgcgtccaaggcctggtgtaggcactctattacaatagaatgagcgatgccatgctgactgtagcaccatgacaattagttcccttggagataaatagattagtactatctatttccatatgatattaaatagtagtttggtacctaagtgtcagttaagaagtttatgggtacagttaggaagttagagatatggtttgttagggaagtttagattatattcttaaagggtaacgttactgttgatagaattttttttccagggaacaaactaaatatttgcatatcattgcattaagggaaagaatgttaggttacaacccctgcccagctgaaacagccagcaacaaccacaagacaatcacatgctgactcctcgcaaaagaatgagcgacctaaactcgctaagaacagtaggcaacctgatggaccaatctagatccagagacggaaacattacatgaggcactgtagcagcatccatgttatgtaacccaattaacattaagcaaagagatcaagagttgaactaaacccagtctctaccacatcagggagaagccctgccattag

SEQ ID NO: 14035 - DNA, 2535 bp, Oryza sativa
ctcatcaggagactgtactcatgaggttagctctaatggaaacaagtttcattcttgtgtgttccacccgggctacaccgatctccttgttattggaggctaccaggtaattattctaaaacatggatcttagtcatttattggcaaaacatagcctacttttattaggaagcagctgttgtaggaacaacttgccatgcactgtcatacttgtgtagtggcgtaatttctcagccacaaaaactgtttcattgccaaccattgggaaaagaaaggcttaataatctatggttcgcggcaaaatagaccacatgcaacaaaattaatgttagcttcgcttgtaatgatcaaatctagttatgttttaattcaaaacagcgcctccgatgactttgatctttgtcgcttatttatttctgatgaaaattgcaatgatgcagtctctggagctatggaacatggtaaagaaccagagcatgacagtgcaggctcatgaaggtctaatcgcggcgttggcgcaatcaccaattacagggatggtggcttccgcgagccacgacaactctgtcaagctgtggaagtaacaatggctgcacttcggtaacatagtttcttatagttagttgaaagtttcttcagccgaggcatagaatgggtcacagccgaaagatgctgttgttgttgtactgtatcgggaggcaataaaaggatgtcgaatttgaaccgttcagtgctcattgcagcgagattgtgggagttgcatttattatttatttatttatattaataggtgttggtgtcgcccaaaatgatcaaagaagaggaaaaggaacgaaggccatagtaggggctctgttttattttatttatttatgttatatgaaatgtaaatggtaacgtggtattcacaatatgtatggcgattgatgataacaccagagcctcgttgttctatacgcctcagcctcagactggaaatgtttagggcttgtttagttcgcgaaataaaaattttttagtatcacatcagatgtttgattggatatcggaaagggttttcaaacacgaattaaaaactaatttcataactcgcccttttaagtttaattaatccatcattagcacatgtggattactagttatggttaatcatggactaattagacttaaaagattcgtctcacgatttcccccctaactgtgtaattagtttttcttttaatcttatatttaatgctccatacaggtatccaaagatacgatatgatgtttttgggaaaaacttttagggaactaaacaggcccttagtgatgatcacaaacgaagttttctacgtctttggtaagattcaatcaatcaggtgtatgtggttgaagaaaatatttcatgcatccagcaaccatcagatcaataaactggtgggtatcatgcatgccacagttgatgctcagatatgatgctggtacagttgattataaccctatcttcaattgcaaaaatgatatccaacacccccaaaacttgtttcccaacagtaacaatgtagtgcctacaatgatgagtagttggacaacgttgtcatttagtccctttctttagctatcctcttctcctttctcttttgctctcgtgtacctatagaagaagaaagatcagaagaaattaatagataatgctgacagacagcggacatctatttaacatgtctactaaggtgctacaatctgcagtattacatgcaagccaaaccgtacggacatacaaagatttttgctgttcaacctctatttagagtaagcttcctaaagatgcatattcatcactcatcaggtagtttgcctgcttcctaaagaagaggggtagaagaaagcttacttttcttctctttttgcttctttcgcctccaattttcagcaagccttcgcttttctctttgcttgtcaatgctcacacacacctggaaaaatacaaaatcactaaatagataagcaacaccaaaatataccataccataaatcccaaaaatgatgctggccctgaacagaaataaataatcttgtagaaaaatctcatttgcacaaacctcttgcccagaattctgaagagcttgcaagggttctatttgatcctgaccaataacaacaaatcgggatcctttatttgcatttacactagcactgcccttaacattccttttggacaactcttccagttgcttttgaagtaacggtgaaacaccagcctgaataattgttttagtgattcaagtcagataagttgatataagatactatagcagttccagaaacaagagctgtgccagtaaactaaccccagctaaatagcgccgcgaaaaagtcttaggctgcaaggggcgttgcaagagctcactcaaatcctacatcaattcacagaaaaatatgttgaaatataggacaaactatgaatacctcataacaacttggttttcccaaaaactacactaattatataaccgaccctgctataatattgtaaatcattcaaacctgttg

SEQ ID NO: 14036 - DNA, 2524 bp, Oryza sativa
aaccggttttacggttcaaggatgattttataactcgatggcaagttgagggaccttcggtgtactttttccaagtatggcaggctaaggaaattcttggtccaaccgttcaggtgtgcattttgcagcccatggtcccatcgatgcctcgttaaggcagattagtcccaatagataggttggttggattaagttggatggaatttaataaacgtggaattgttttttataatccctctcaaaactattgagaaaaattaaccgaacaagagagaagagagaagaactctgggtagaaatatgagatatataatatacagagttacatgccaaggtaggggacatcccattttctttcaatttttaaggaaataataattatacaaaattagtgaatataacgcgctagacttacatgacactcatccgtattaaaatataaaggattatatcctttaattttatctcataattaacggattatatattcccgagataatttattcattgcatatatcatcttttgtacttttattccccacccacgatattttctactagaatatttccctaccagcttttgtactaatttattcttcaaccattacattttatacccataagttacttgaagtttgatattttacctcataaatcatttttgttgcaaatgcctacacacctacttagttctgttgcaaactgaataatacgtgggcatttacaacaaattgatacatgagatgaaatatcaaatttcaagtgatttattgggaggatttcgcaatttcccctttatactatgctttgtcctttttccactttctcacttttgaaaaaaaagggagcatactctcttctatcatccggtggagggagtactaatcaaaatacacatttagtaatgcttacctttacttcaatcacagaattttatatgtcaatcacactttcaggttacagacacatttcaataatcacatggatagtacataatgtatgttccaaccggtaaaccttatttccattgttttttcagatggacaaacatgatgtggctatagctatagtccacacaacaacacacacaagcaatcaagcacatcccaggtcccgggacgatgaaattaggaggctacttctgcttctcatgtgcctcccttctctgctgggcaatcgactcgaataggctcccatcgaagcagcggcgaacagcctccttcctgaggaatccttcctcatctttcgcaagcacgtagagcaatatccactcccccttactcgcgatcctgaacgcacacatgcatgtatttacaccagcaattcagcatgcagaggtaggaagcattcagagaacgaacggcaaagaaatcgctaggtaagtatcgttgctgcatatataggagtgttgatcagctgttctcacctcccaagcaagtcgagcgccaccctttggccttcggtcatccgccagatatcgccgaacgtgagcttgtccggcgccgtgcgggcgttcttgctgaagatgctctcgaaattgaccggcataaacctttcgtagtttcaggacaaaaaaggcaatgaaatgtcaccgtgtaagtactggattattacaagtctacaacaactagcagtgtgcaatgggtcgacgatggtttaccttccctcgttgtcgtacgtcgagctatcgctgccgtgcttagccctgtggatgttttttatgtgtatagggaacaggagagatggtatccagctctgcacggtcgatcaaattttcaatgtctagtgcagagaaatgtataccatcttggcatcttcttggtagaaaccccaaaaaaaaagttacttttggacttactggcagagttgggtagcttagaccaacgtttatggctatcgccaaaaagaacgaaacaatcacgttgaagcccaattcccgtagtcctgtgtaatttttacaccttttcatcaaaggttttgtacccctcaacaagtaatgttcggactaatattgtgaaggtgaaacggagataccgccgtgacaacaaaagagacgtatgaatactgtagaatatgattctatcgggctgaatgatcttccgatatatacaaatattttattcggctgaacaataatagccgtttaatttttttttccgcagcaacaatggagctatatgttttgtagtatgtacctccataagtttcccatggataaacgataccgtcgccatccaggtcgaagaaagccacatgctgctgcagcacactcatctgccggtggtcacgcccctcggttccttcaggatggtacacgtccggagcaaccagagctcgggccaaatctgcgatcagaatcgttgttcagccgaattcagaactagaactagatcgacagacaaaactaaagctgtaaccgatctcatcgaggcaaacagatactcacagggcttcggaatctgcacttccaagtccgctcggaccggccgttctctcgtcaccggcgcctccgccgccacggacg

SEQ ID NO: 14037 - DNA, 3087 bp, Oryza sativa
ctctcgccgtcaccgtccgctgccaagcaccggggaggccggtgcgtgcgaggacgcgtgacgcgggactccgggcaccctcctccttcctcttccccggcccgagaacggagagctcgctcccgcgccgtcggcgctcgacaccgcgcccgttccggctcggtagtgcctccctcccgttccccttcctcactcgccctctccctccctagctcacgtggtagctcggctagccttccggtagttcgtagaagccgcccaagccccgccgccgcctggcatggcctcgccgccattaccgcccgctcccggaggctgccgtcgtcgccagccctccacggtgccactccaccccatccgtcgccggaaaacgggtttcccaactcccttgggtgctcccaccgccttgaatcgacctctcgtctaccgccgccgtttcccctctttgctcgccgccggcatgcgccaccgcgattcgtcgccgccggcctctctccggtgaatccgggccggtgattcgctccctcttgtccctcccatcactccggtgtccttccccctcccttgaatccccgtgtgttgccccggcgaatgtcgccgccgtccgccgtccatctcggcctcccccttcttcctccacacgccggcccgcgtggctgccacgaaggcgcctcgtcggcgccagctcggccggaccgggtcaagctgaccccggtcagccgctccctccgtcccccgctcgcgcgcgtgggcccgtcgtctcctagtcctccgtgcaccgcgccgtgcaccgctccccctcctgaaccccagcaccgcccctgcgtgcgcctccctcatcgtgaaccaggccgccgccatgcgggccccacccgggaccccgtgaggtgaacttggtccaccggaccgctccctctctcccgggcgcccctaatgggccgcctcctcgcgcccgcgccggcccatttggttcggccgagccgcaatagccttcaggccgcgccctagccgcccgaaggaagtctaaatgacatccctctttccttttcttttccaagggatttaataaatcctttttcccctattctataaatcaattccttattccaaaattctataaatcatttcccttgatcctgcacgtaagtgacagtcaataatattcttgagaatattatttctataaatttcataaatcaatttccccttgttccacaaatatcttccttcgcccagaaattccacttaaacttccaaaattcatatatctcgatccgttcgtctgattgcccccgttcaacttccagtaattccgtaaaattgagatctatggcactattaattagtctaaatagggtctttcttttggtcttttggttaggttttcgattgtttgcatatagtcgcggttaccggattttcgtcgatcgtggatttctcgaagattcgtgaagctcagtgaagaccttgagcaaggcaagtcaactttgaacatcttgcacctataatttaaatctaagtatttcttttccgcaaatattgcatgaataggatttacataagtaattcggccgcggcttaagagatagcctgccggcccccaaatcctaactgctgcaattaccctccttgaattattgaacacttaaacctcatttgtcagctgttgtgcttcgatgcatgggtcctcaggcacacgcatcggaacaccttccctcaaatttaaaatatccaacgatgggtaaaacttggggttttacaaaagacttggaaaaacccgacacctgggtcggtgcttgcgaactaaatgaatttccaaaatcgcagaccgggggatgtaccgggagtacggtttcccgctcttgcactaaggaccgtttccttggaatttcatccgaacataagacaagtgcgaccacatgggcgtaatgggacgcccctggctgagtaattagctaatcgggggagccatgatgccaagagacatgtggattcaacggggtggtgccggggagaacccccgggtttcctggcacagtatggtctgggacctaacctggtgttggtctgggacccctctcgttggcataagatgaacctgtgtcgactttcgaaatgccttgtcatgaaagcctcaaggtctccagatgtggccgttctgcacaggctggttgatccgggttagtaatgtcgtgtgggtaaagtgtaccccatctgcagaagttaacaaactgttcgaatagccgtgcccacggtcatgggcggatgtgaagtgattcctagcgtagttttgtttgactactgttttgtgaaattgctgttgtgaaatgggatcgatgtttggaaaatctgtggctgatgggatcagctaggctcgggtggccgtttgaaagctgttgccgggtgccaaccttgaatcaattcaaagactgatacattgcacatactcagactggacgagacgcactgtctcatccgtgtcgtttgagaagtactcatttagttgttttaaaaggagtttaaataaaatcaattgcaaaaacaacagccttcccttgaagcctgcattaaacacttaattcccatggcttgctgagtacgaaagtactcacccttgctctctctctctctctctctctatatatatatatatatatatatatatatatatatatatatatatatatatatatatatatatatatatatatggttcctccgccttgaagagaagatgaagtgaagcgaagattagggtttcgtcttggttcctaatcgttgcctgtggtgttgggtgttagttcgttggttccgctgctgctgttgttgttggtgtttcctcgtccgcgtcatcggttgtattctcgggctgtcctgagctgcaacctaagttaaagtaaataagtcctctatttaatttaagaattgcaatgattcatatttgtcaccgtgggtaccagcgctatgtcctgggactggtactgtgatcgcggtttcgtaggaagcggttcgcgccgtttttcctacgacacgctcctatcaggtgtcgttgtacggcggtgcccgattggggtgtgacaatggagg

SEQ ID NO: 14038 - DNA, 8030 bp, Oryza sativa
cccggcggcggcggcggcgccatcttgttgaaggtgttgtagatggagaaggagagctccgtgtggaggccggtggtattgttcttgctaccaccaccaccgtcggaggacgggtggagggaaggcaggtggccgtcggagaaggctcgccgcagctggagagaggacggcgcagccgccgccgacgacggcgagaggaaggagtgcaggaacggcgtcgacgagctcctcagcagcatcgtctcgtttctctcacaccgtctccgcgtcgtctctagctatagcttggcatcaaattcctcgagatctcacctcccgtgtcttcatttatagtatcacatgatggatcgagccgtgttagtttaatccgtcggcatggttgttttcagacttgctggtaaggcattaaagcgtgttcaagttggtgcatgcacgtgaatcctcatcggttttacaaggaaagaaaacccctcgagattgagatcggcaacgtttgctcggtctagaaacaaaaaaaagttcaaccatgcgtacaagttcatgtatacatatctcactgacctcgtgactctggcttgacctctcgttttcaacgacgagcatacagcccttgctagtgtgcagttgcttagcctttctttcggagaagccgctagatttttgggccacttggccgagatcttatctcgttgagtcgttggattggcttggtgaccgcgagaacctcgtgggcatggacatgcagctgaacgatcaccgtggcctccggtttagcctacctccacgtgcacggccctgactccgtggccgcaagtcaaaaggcataatatatatgagtactacacgcatagtcaaaatgccgtgtaagcagcaaatgcaccgcacaagctttggagcaaaaggattacttgacacaaatcgtcaaacaaaaacgacaccagaaagaaaatgagaaggctagctacgctgacgagagaaaagaaaaaaaaagggaaaataatgatcctactagtgcattcatcaatcgactagcgtgaaaccattcttgatgtactgcagacaagggaacggcaggtccagcgcgtgctcgaccatgttcgatttcgacagaagcttgccaagaacaaagtccctacggctaagcccaagccgtgcaccgcttgctatggccctgtcacggcaggcgacgagggtgatgttgcagagccaagggacggccgctgtgaaggctagcccgaaatgctgcttgtacgccctgcagacctgggagacatgtttgcccagcggaagaatgctatccacagaggaggttttctccacaccagcaacagatagctccgagtcagagtgtaggttcaccaccacggtgccatggacagggtggactttcatctcaaggttcttgaggaatgttccctctgcgtcccagagcttgcgaggaaatatgtcgtcgccgtcatacgcatcgatgaagaccaaatcgtatacattgctgtcgtttgcgacgaaatcttcagcgtccgcgatatggaggaaaagccggtcatggatgcctccccacaacagctcattgccattggcaggcttcgtgggctccggtggtaaccctttcacaggtaatgaggggaaacccatagaatcaattgaagctgaagcaacaactggatcaatttccacaatatgaacaacagcacctgaaagagtcgatatatgatcaaacatatgtatcaagtgcaaagctacagaatttgaagtttagactccagcaaattaagaaaatctggcaggacaaaaccactgagtatcaacaatctgaattcaagcagttttgtgaaaggaatacgctttttatgaactaatagaagttggcaattttgcagttaaacaagttaggtgtagcttgactacagactgcaggaagcaaagtatcggaaaactgaaatttccatatgtggtgtactagctagggaatgagcattcttgaggctagtgactatatttacctctgaatttgctagccaaaaccaatggtaagctgccaccaccatggccaatacaaagaattttcatattgttctgtccagaaactgcttgatggagatcataagaacaacaaggtagtgctgtcaaccctgctgataccatactcttaacatctgtaaataccttctgtcagatgtgtaatatggtacggaagcaaaagataaaatgcagaagtcaacccaattgctttactttatcattgaagactttgatgcatgtgcaggcaaccatattatgatgataatgacatctaagtaacttgcacttgcaatcttgtagcaaataaataatcaggggaatcattttactgatatcatttgactaccacgaagtatgtgtacactgtgtatttgtgttgtgcatatgaatggatttttctgtgttgtggattaacagatataaatgataccgtgaagtaaaacctaacactgacctattatggtcatcaagatttcatcaaaagattgaagtgaactcacaaggaacagccaaacaatgtggttgctgcatcaagtacatccccgtgtcacccgaagacctgtagcaggccattactttggcaacactttgccgcgtatgatcattgaaccgcattactcgccactggtaacctagtatcttaaactggttggcaccaaatgaatttgggtatattcttgcgttcctttcttgaagccatctctctgttactgtccactcgtcactggcctgaaccgcacaacagttagtctcaacatgaatgcaaaacagatatcatcaattcatcataaaaagctaaatcatggctaacaagctagaactttattaacggtagagcttccacagtgattgctgaatagaccatactccataggcacatctagattaggagaacaagtgttgccattgacctaaacgctttgcccgaaactggaactacaccaaaacagcaagcttttgactgaaaacagcacgattgcaaaagcccgatctctacagagaaatctgaggcctaagttgcaaacatttgaggaacggaggctgtactgtctcgctaacgagttcctgtccccgcttcataagtttttcaatcctttcctttctccggccccagcaaggaagcagatcaagccggaaaacagaggcgaggtttaccgggcgggatgcggggtacgcggagacggagacgacgccgttgccgtgctcggagtggcggcggaagacggtgtgcgccccctcgccggggccctcgtcctcgccccaccactcccggtggtaggaccagtccccctcgtccagaggaggctggcgccgagcgcccgcggcgacagcagccggggatgccgccgatgagagccgccggatggcgccgcgggcgcacctcgacgccgccgcccgcagcatagtgtgctcgctctcccccttgattgcgcgggcgtgtcctgttgacggcggcggcgagagccggtgacccgcacaaggagaagcccacaggaaacggcccaaaagcccccgaagtacaagggcccaatcctcctgggaagctgagaatgattcaactggacctctacatggatgcttgacatttgtccactcaccaaccctattccattgctaccatatgtaggaactaccaacattcaaatgtctttacatgtcctctaaaaaaagtctttacatgcagaaaatgcataaatatcttaaattgtttcagaaatttgaaatgtaccaatagaaattttgggactcaataaattgtttcagaaatttgaaaatgtactgatatgaaagagaagaaaacaatgtttgacaaatttgaatatgtaccaacagtataaaaatgtttcagaatcagaaatttgtaaaatgtactaagaaaaagaaaaaggaaaagaatgtactaccaacagaaaagaaaataaataaataatggcccatgcaggtctcgaacctgcgaccttcgcgttattagcacgacgctctaaccagctgagctaataggccgagttgaggattttataagctactcattaattaagttactaaaaagaaacattaactgcgcatgattcgatttcccgacctcgcaggccacacgctaacaaccgagcacgagcaacattgcgacgccgactatggttgcgacgccaaaatttctggctctcatagatcacgttagtaaccgaacaacgtgacaattaaccaaagcacacgcgcgagcgtgcgttggctagatgcatagtcggccttggtgctcggtgcagagccgatcgctagtcaatgtacgcaaccagccaccgctctaccggtccgcggcccaatcacgccaagtacagaagtgaagaggatcataatccgcagccatcgcgcgccgcaagcacagcaccaggagaagatgatccgattgaagtgcaaaaccgtgccagtagctaaacattattcgcgcatatcgcatcctccacacgttattcttatttctcttgcatcaagatacaaagttaattacaagcagacacgacacgcatctgggtgttcttttgttatcacccagagtccagagagaacaccagacctaagccggcaggcagagcaccgttgcatgtcccctgcgtcacaggctcgatctcacacccacagaccgatccagtagctaactaagctaatctaggacatcttagcgtgctgctcccgctgcatcgccacgtactcgaacaggctcccgtcgtacatgcgccggatggcctccctcgccaggtacccttcctcgtccctcgccagcacgtacaggatcgtccactccagcttcgccgcgaacctacacacacgtcagcaaaacaaaaccaatttcagtatcatctgtcaattgagagtactgcattgtctatttgaacacatctagtgtgttaaaagactgatgatggcttaccatccgaagagatcgagcacttcgcggttcccctcggtcatctgccacacctccctgtaggtgagcctgtcaggggacgtgcgcgcgtacttgctgaagatgttctcgaagttcaccggcatgaacctgcacccccacgaaatgttcggatcagtattctgggcagcagcgagagtgacgaaattcagaagaggatgtatgattaccggccctcgttatcgtaggtcccagagtcactcccgtgcttactcctgtggatgttgtggatgtagatcgggaagaacggggacggcagccagccctacaatgatcacagttcaaaaaaaaggagtttgagatgctatcgctcaagttatacccaagatcgatcagctcactcacaggcagcgtggggtagctcatggacacgttcacgaccagagcaatgaggaaggacatgatcatgttgaacccaagcgcacggcaccctgcaggttccgtcagtgcaccgatcatgcatgccatttgattgcaagatggcgatcaaatgaatgttagtatagtaactcatttgggtcaaatatatactgtaccttcgtaggtttcccatgggtagatgatgccgttgtcgtcgcggtcgaagaaggcgacgtgctgctgcagcacgctgaggtggtggtgctcgtgatcgtccgtcgtggttccgtctgggtggtagatgtccggcgccgccagcgctctcgcaagatctgatcatcaaacaacgagagacgcatccatcttcagctaattgtattattgttgaagtattcgaaccatggagaagatgtgtactaaagaaggcatctcgcatttgtgcttacatggcttggggacgtgttcctcgaggtcgccgcggacggggcgctcgacggtgaccggcgactgcagcgcgacgatggtcagcgagtccttggcctccacgcccgacacgccgcgcatgtccccgaccttgcgggctgccacggcggcgccgcccctcccgtcagtcgccctcgtcgcgcccggggcttcggtgccggcgcggtcgccgttgcgcccggccttggtcgtcgttgtcccctgcatccctccgcttccgcttggcgcggcccaaacgaccgaaacacactcgattccctgtgaagagctcgtagtcttttgagagatcgatgagatcgactagtcgcagttgcaacgtgtagcggcggtgcaggaagtagcgtcgcggccgcggcggggatatataggacgtcgcgatgggcgcgtggcgacgtgtccaccgggaagggcacggtggcgcgacgtgggcgcgtgcatggcgttcggagagtcgcgcggccgtaacgtgtcgctcggtggacagagagggggagcgtacgtcgtcgtgtcgcgagtcttcgtgtttcggtttcggcatcacgcctcctccgggtacgcctcagaaagccaacaggtggggtagcaatcttgtcccatccgtcacgccgacccagaatcccagatggtacagaagcagggggacgttgcctcgttgcacttgcacgttgctctgtatcgcaagtctgcatcattgcaggtaaggttaaaccatgggccgggcccaattaatgaacgagctcatatcatgtagtaagagaaatatggcggaaaaagtacaccgaatgtctcttaacttgtcgtcgagttacaaaatcatccttgaaccacaaaatcaaatagaacgcatccctcaacttacaaaaccagtacaaaccagttctctctgcggtttttgactccgggtttatctgatgtggcagctgactcaacgtgggactcatgtgggtcccacatgtcggtctcttgtttccctccccttgttgaatagcctctgtagaccaagtccacatacccctgcctctcactcctttttttttctccctgcctgtcgcatagagaagcaccagagagagttgacgggcgatggcaggaaatagccaagggaccatgacccggtcggcagcggagggagtagatggatgtaacgctccgcttttcgtgagatgttaaaaactaattcgccaaaatcctatatgcgaaaatttcgttatttgtgtgagagtctaagttgtgccaagatctcaattcaaatctccattgttgttccctcccgtcgccatcaaaatcctccacctctaaaatgtcaatcccgattcatcttctaaagtcaaacatcgaaattcaatcccgtccttaaaattccttgccaatatttctctcgattccaagaatatcaaatcccaaccttgaatccctccttgtctatcgatctatctacctgttcatctatctatctacctatctatccatctatctatctatctacaagttatccatcggttcgtccgtctatctaacaacctttgaattcctgtcccaactccaaggatgtaaatccaaacatatcccagccttgagcttcaacctccaagattcctcctttttcctctttctttggaaaccaccccaaataattcttcggctctctagatacaaaaccaattcgaaaatattgagttttcactttgatctcccttccttgactccaccatattcccatgagtccaaatatcaagttcgaaattcaaattccaaatctcaatcccttcggaatcgatctcctcggcaaaagtctattttgcctccctcttggtcgttgggccgattcttcctccctcggcccatctcccctcccagccttcctctccccccctctcacgtgcgccgcacgtgcctgctcagccgagcaagagagaggcagcgcctctcttcttcctcgctctcttctcgtctctctctctctctcgccgctccccgccagcgctccgccgattcaaaccgccaccgccttcgctcgttcccgcgcgcgctctcgtcgtggtggccgaccgccctcggtcgccgtccgccctggcccgcctgcgccgtgcagccgcccgtgcccactctgtcgtcaccccacctctgcgccgctgtgcgcgtgcgtccaagacgtggaggcagggcctcggctcccctctctcgcatgctctcccacctccct

SEQ ID NO: 14039 - DNA, 10279 bp, Oryza sativa
tttgttacaaggctaaatgcaaattccagtgttaatacctgcttggcaagctccctggtgggtgttaaaataagagcacgaagtggactttctctagaattttcatcttgtgtactctcatcctcccgagacaatctcatggccttctcttgttcttcaagaaggcgctgcaagatagggaggccaaaagcaagtgttttaccagaacctgtctctgctgcaccaataacatcctgttacaacataaacatcaccacagttagaagaccaaaggcatggaacaacaataaatagtataaaaagttatctcagttgcatattctcttatttccactgaactgagaggggtccaagctggcatgattagtttatggcactttatccaggtatatgttaggcgacttttaaatgtggaatcataagaagaaatgtctaacttcgactaaataaagtaggctatcaagttaataaccaaagcaacaaatggtgcataagcaggtgaataatgaaatagaagttcatcattttcccatataaaagcttggccaatggcctacaagttagcacttgacgaaccttgccttgatgagccgctgcaggaaagcaagccttttgtattggtgttggttctttgaatccaagcctgcgcaccgctgtaataagaagagggtgcagtctaagctctcgccatgcatagacttcatcctctcccaaaatcagcccatcattgttatcttgttccatgtcattgccatcttgcatatctgtgagcacacaacagtgttaagtagactcgcaatgctgatccgacaaatttagtaacaatgactgctacaaacccagacagaagaaatgctgaaacttcagtacgtgagataccagataaaatgctcctaaaagcctttaagtgaaagcaattagcaccttccacattgtcatcggagacatcttccttgctctccattgtttactgcatttccttcacctttctcttcttcctgctcctcctcttctttttcaccctcttctcacccttctctccctcctcctcacattcaactaccaaatcaccatcaccaggtaaagcatagtcatcgtcacctcgcttccgcttcttcctcttcttcttcttctgatcctttcctgccttcctgtcaatttctcctagatcctccacggcaccgccaaagattccgaagtccgcctcgtcgatctcctcaagctccaggaaccctaccgcccaatcaaccaaacacctcctcgtcagagaccaaacgcattaactgaaccaaggatccaatacacgataaattcaaacccttacctccttccttgcctccggcgagtacgaggaaggggtcctcgaccatcgtgccggccgaggaggtcgaggcggcggcggcagcggcggctctcctaggtttcttcgcgccacgactcttctttcccttgcgtacctggctggtctcctgaggcggagtggagggatccgaggactgcagctgcggaggcggtggcggcggcggcgctgcggccatcggagacggaagcggcgggttggggggaggcggtggcggtgtgggcggcagcaggagggggaagaagaggcgagggttttggttttggacttgtttcctacatgggcctttttgggcctaatggctaacgggtcaacccgttgtggctcgacgaaaaaaaagcccgagctgaaacggccctccctccccaagttggatcgttattcttgggtaagcctgggccgttcgatggagcttccgtggcccagatcgcgtagggctgaggggcggagagccggagaccatgttgcacgcaagaccctgcacgagcataattttacgctttgcacctcgtggacttggatcggccagttttggataacaatcatccaaacccgtatcgttttctgcaacttagaccacgatatctagagttaagtgaaatttacttcaaattttgtaacaccagcactaagtatagcttaggtagttagtgatgaaacatgttaagttatatacttggcacatatcctcgtatttatggctaattttttagtggtcgaaagtaaggcgttacagtaactttgccaagatcaatatatgtcggagcaattttggaggtgctcgtagccgtaaggatagaaaagtattcctggtttggggcgttttcaatgaagtttccatagccaagatcgagtaagtgcaaacattcgatattgttttttacatgacaccctatttgacatgatttttttttcgcaccctcttgagttggatctcttattcgaaaagagattttgtggccatcgtctaccatatgtctgtatgactttgccattgacatgctccactttatgggaacctatgttctatctgtggcgcgtattctcgacttggttttgcattgactagtgtcgaaattgtgccctcaagattgcaatgtcttcaacaaacgttgagcatagcgtggccctaggggtatgcggttatgggcctctctcgaagctctcaccccttatgggtagtgcgacgctgtcatgtcagaaatagttatagcttgcaatttaatgtgttagtgtcttgatgcgccctagcaaactaactagagtcttttgggttcggcgccaagccgccaacaatctgctccctccgtccaaaaaaaaagccaacctagacaccgataaagacattacatagtacaacgaatgtcttatttttttgggttggctttttttggatggaggaagtacatcagcaggttgtagggttggctagttagaaaatgctatacatcacatttcgagaaaaaaaacaaggggttttttataatatcattatttgttttgtgattaatgttttatctccatctccaacgaatctctaggacttctacgggtttgtcgagtggttagattgcaggattaaggttggggtaggtgtttaagatgtggttacgaagagaaggggcggtgggctgtcgggatggacggcagaggaatggtgtgataagggagagagaaatatgcctgagagtagagggtgttcccccagctaatcctgggttagacaccttacccatattaaccgtggaccgggccaaatcaaatcttcacccacgtagcagcccacgcccccgcatcgatccaccgaaaaactaccccgccgcacgtacggatcgaccgacgcgaggtgaggtgggcacctggcgcgactcccgcgacgtcgactgccacatcccaccgcgagtccgcgaccccacacacacacaaaagaaaaccgcgctgtctgctaccacaacccactgacgagcgggtccccccgcccgcgtcgccctcaggagccccacccgccatcgacagagtacgagacgagaccgtaccgccgcgcgtctcatgtgccacgaccgaatggagacgcgaaaaagaggaaaaaaaggaaggcagcaaaagctggccaagggaggcgaggccagcgcagtgagaggaagaagagccattttaaaaccttcccccttctccctcccccgatcctcctccgcccccacgaatccccatcccgcattcgcctccgccccccccggcgcgaggagcggcggcggcggcgagccacgaaccctagccgtctccttcgccgtccctctctctccagccgttgcgggaggaggaggaggaggcgcggttgctgttggtggcggctgtcgtccctgacgcggagttctctcgctagggttttttttttgtgtgtgtgtgtggggggggggggggggatgcgcggcatgggggggcggtaccacatggagatgcccaccgggatgagggagctggaccgcgtgcagcagcagatcgccagccacccctacgccttcgaggtgagcgcgcccccccttctaggtctctgggtggggttttgggtctgattcgtgggaggccgcggtgtttggtgtgtggttggtcgcaggtgtgctcctacttcttgcaggggtactacaacgtgctcgcgaacagcccggagctggcgtgccaattctacacggattacagcaccgccgtgaggctggactgccagacgatgaaatcctcgttcggggagactgttgaggtatggaacgaagctagcatattcttctctgctgtattttcttgcttagcgtcagtaaattaatcacctttgtgctggcccttgcgattttcttttttcgcgagatattcaatgcaaagataatgtttgttcgttggaccaaatgtgtgctatgctgttatgtttttttttactgggattagaatatgctgtgatgtttttattattgggatgatttttggttcatggtgagatttcatcttcaatcgttgtgtatggttggtgaacaaatgtgccattgagttttgacgacaaacaagcagtggctgttgtgtccagtaagaattagtgttacgaaaacttaccacttaccggcagcagtttttttttctttttctttggtatgtctgatagtctgagtatgtttctctatacatgttttgcggcagggttggtttgtactattgatgtggcaacttctgaggttgtttatttagtccaggcgttagctggctgtttattaattcaccagctgggaaaaaaatactgtggacatgggataccatagatcagagcattgtggattggggtgatggagtccctttgtattatctgtgcattttattagttatgcagggtccttgcttgatgattgtacctgtttggtgcctaactgctcaatgcccttttatgttttatttcattgatcactttcttgaaaactggggtttaaattatgaaatccactatatgtaggttattttgcttgcattgtttctgtttacaaaatatcactatggtataatttaacttgtgttatcatccttgcaaacatcggcaggaaatcaatgacatgatcatatccatgaatgtacacaagattgaggttaagacagctaatttcgtgcagtcatggggtggggctctccagatgttggttactggcctagtgcaattaaaggactaccctgttcgcaagagatttgctcagactatgcttcttgctcctcagaataatggatattatgtattcagtgacatctttaagcttatctgtgatgaatatgattactatgaaggggctgattacagtcacactgacaacattctccagatggatgctcataataccatgactgaaacaggtattattttccaacggcgctttaatgaatttcagatctaaacaatctgcatatgttcatgatcttctcctacttttttttgggccatgttttttattacatgataatgttttgcaatgtatgttaataaattaagcccatttcagtgcttgttttcttttgtaaaagtaagttttcttatattctgtgaagtaaggtatgcacgccacaaacgtcttctttgatatattctctagagtccagataatagaaaacctcatcactagttcaccagattcttctgttttttgtcgctaagtttaatccactggctacattctcattgagtacataatatgaagcatctgaatagtgtgcttctccacataaactcctcagttatcttgtttccaaatatttgttgtgtgtgtgtatgtgttttgcattgatgttgttagaaaatttctccaatggtaaccgtgattatagtgataatgtttactttttattgttggttgattctttagcgtctgattgtatgcctgaagaacttgaggcaaaggaagctttagctcctgctgatattgaggaaaggggtcctgcttttatgcctgaaaatcatgaagttcagcagcaagatcctttggaatatggggttgtgatcgacgatgattctccttctgaagagcttactccttcgttccccagttctactgacagtaaacaggatgcacctcttggccccattgtccatccttctgtaactacccctgaggaagagcctatgggagaaccagccaaacaaacatacgcttcagtggtaagcaggcatatgctgccttttagtcaagttgaattcctaatttctttctttggttgatgttgaactctttggactgaatggaattttgtcagctgcgaacaaaaggacaccctagccatcaggctattcactccattcctctcaacaaggccacggcaagtagtgtggagtcacaactgaatggacatatgactaagcaggtgcagcctgtgcatgaaaaagccaacctggacacccgttatgatgctagcggccctgaggatgaaggtttggcttttgtatacaactttgctaatgcttctgatcattttattatgatcttttttgaaattgttttgttattactactagcctactaggtataggaaccaatattggactaaattcacctagcccttctctatttcaactaccctctgcctttttagcactctaaatagaattttaatctaatttttggtagttattcacactttcctgttttttaatgtaaacacaatcccatttttggattgttggaactcaatttctttacctaaccatcaattgccaaccctgattcaacatttaaacaaccctttcctttattggtgtaattgacacttcctgttctggatgcaagatcaaattccttttatgggtagtttgtgagtcgaaatattttatcaacgccctttttagtggccagcttatgagttaagtaaattcttacgtcgatagttgttgctagcacacgagcgcatattcggtggttgtttataattattattttctttcgcagtattttttggggctgatgtgttgtcatggatgctaattcttgcttattgcttatttcaagagttgttacatgctaaacaaattactttttaattgtgataatacactattagttttgtgagtgtcttgtccatagtcattcggcttgatatatctaacttttatatgcaattggtatgcactgcttttgtgggtacagtattctattgtctgtcttcctgtagccttgactgattttttgaacttgtgtaacaaaggcactatgcacacttagtttttattctcgtgtcaaatatatttggttgtctatttttgtttgcactaaatggtatgcactgtttatccaaaaattgctgttggaaataatctttcctgattttctgctgtggacctgactgctgaattatttctcttgtcttagaagagtttttgtcagtttatatcgggaacctttctccatctacttcagtctttgatcttgagaaggtattccaggcttttggaagaattaaacctgacggggttgctatacggagccgcaaggtttcttgccttctatgttgtgctctcctccccccccccccccccaattttttctttgttatttgcttcctaatttcatgtatttgtgtgtaggaggctggaattttctttggctttgttgagtacgaagacatgtctggtatccataatgctttgagggtgagtttctcttagttcagcatatgaaagtaacctgaatacagaagaggaaaaaagagagaagataaatggtgccttgagacacttaataggccgtgcctgctatactctatagaatatctttttatgctaatctgaacaatgcatagaacatgctacagtgtctgcataaagggaatcctataacaatagttttctggagctgtaatattctacagcggaaggagtaatattatgctaatggctgagaactgttgagtggtggaccaacgaatgcttgttttgcaaatagtccaaagcctatggtcaagcatatagtagatgcattgttaaaacaaacgtcttgatttctcagttttgtttaatgcatgatgtttagagttcatagagcaatgaaggttagtgtgctgtaatggtaattaatctgtatgatcttacattagttctgaatgctatcttgttttgattaatatttgtacatcaggcatctccaatagagctgaatggccgcttaatacatgttgaagagaggaggcaaatctatcggggaggtggagcaagtaagtatcgatctggattttctcatccatatagttaagcagttttttattgttttgtttagactattttttgtaccgataatctagacaaccatttgtattaatgctgaggtagcggcagtaagaaagtagggttatagtagaatgtgccctgactagtgatgtttaagcctgaatttgttgaatgaggttcctgaaacctcatctttcttgagggtatatatggacttctcattctctgacgcacattatctttttactactgtttagtgcgctatagaacatcacctccaagacattgttattactagtatgaaatattttacttgctcccaaagaaacatgataaatcatctgtaatgtacatatgcccagtaactgagttttttagtaagccatgtctgtctgtttcctgtgttacccctttgctaggactgttaattctagtttcttgctctgcaggacgggggagaggaagacctgctgacttctctaggggtcaatcgggtgggcggtatgatggggattatgctactcggtcaaagggaaatgggtaccaaagaagggtttgacgccagtacgatggctaaagtcaaatttctcacctgctctgctggtgaatggttgtacccccttggtgatctcgacatggtgcggtccggccatatttttgtcacaacaaagcgtaatattaggtggtagtcatttttggatgggcatctgttaccattttgttgctggtttttgccgtcgtttggtcagaacaaaacctcagctgcatcgacctggaaagatttcataatgttatcgctgaattggtgtccgttgagaacaccattgaaaagttctagtctcagtgatatgttttaggaattgtccttttgctgccatgtcttgtttcacaccggcagcggcaggagcgattcctgcttgcaaatagcttgataaaccttttacattagcttataaaatctcatgttatctcttagactcttaacatagtatgttggttcactgcttcattctaatttgtgcgtggagcagtgccacttggcacgagctcgtgcactgggcggcgaacaatcacatggccggtgtccatctaccgcctagtcgcacgcacaggtctcactcgctagctgccttgatgcatgaagccatgcgctgacgactgatgcatgcgcccatctccgtgccattctccggcgtcctatagccaggaatgggcgagactcttcttttgcctcgcggtagaaccagtaatgggcgatactcttcttttgccgggcgaaacattgagattccaccgcgaggcaaaagcaaacaactttggggtagatgcaaaatacattcatcggttttgattcgtgaaaggaaaaagagaacttcatgatatagttacatccaacttccaaccgcggtattatttattcttcggtttgtaagcaccagcgcatttagtagtagaaagcacagcgcatttagcacgttgtcagcccgtctcgcacggatcaaacggccacggaagccagctgcctcacatgccccggctgcgccgccacggccacgtcctgctcgccttctccgaggtcgtcgttgtcgtcgtcgtcctgttcccacaggaagctggcgtacgcggcgaggacattgctgccaattccagaaaccaaagacaaaaaaaaaaaaaaacacgccaccacggttagcgctaagccatctgatcagtgtaatactccgaaatgtactcacagcgccgcggggctcgcgggtggctaccgagtaccgacctgttgtgcggcgcggcctgcacggacttgtggaagtaggtgagggatctgtccagatcgcggtgcacctcccacaccagcttggcgtactgcgacatgatctcgccgtcgctgggatccgccagcatggcgcgcgagtagtactcctccgccctcctcgcgtcgcccttcacctgatcgatcatccagtgatgatagcaatcaaaatttatgaatccacgagtttacgagaaccattgatcacacggtgtttcacagcattataccaggtgtgccgtgcttgatcgatgggtttttagtacagatatatacctcgtgcaggaactgcgcgtattgcgcaggaacagcgcgtcgcccggctgctcgtccatcatcctcttgtactgcgcgtcagcgccgccaccttctc

SEQ ID NO: 14040 - DNA, 919 bp, Oryza sativa
attgatgtacaaaatattattgtgcggccttgtccatggacactcaatatataatacaggtaggcatccttatcatcatcactacacctgtaaatcaaacaaaaaaataatgtgacaatttaatttttccatggaaaagtaaaagctagaaaaacgacagttaaaaaccccaaaaaatctaaaagcagaaaatacatactcaataaaagactcttcaagtttctcaggtaagatagaagccttcgtcagatcaactatttctgcgttaggtttcatacgggcctgcttcgaaagtgcttcaatagaactcaaatcagtagatgcagacgcttttgcagtaactaggcctcgcttcaactttttccgaaaattagctgagagagcaagtgttgctgagaatacaaatgtctgtctcttctttatttgcaatataggcacagtttcgcaacttggcgtggtcccaacagtttgttcatcagaaccgttagtcactggtaacatctcaatgatagattgcagttcatggaaatggcctcgctctatcattctatcagcctcgtccaacacgaagaatgataatgaatgtaactgggtacagaaacaagcaatgttacaattaacactatatcttcagcataaaattatcagaaaataaaaaccacaatgagaagaaggttataataaattttatttgtataatagaagtgtatgttctacttctatctttcttacaaaagtggggctttgctatgaactaacaaggcaaacgaaaggcacaagaaatgatgagcatggataggaatcctggtggtcaagggtggaaaaccttatgcaagaaaataataagtactgaaaaaagttcgcctaaaaaataaattggattcaacatggcttcaaatgccttagtaggatccctatc

SEQ ID NO: 14041 - DNA, 2156 bp, Oryza sativa
ggttgatgatataagttatattttcctttaaaaatggtcccagtgtcccacatgtcatagacttgtattagttttacagtatttatttgattggtgttataactatggctaaccatactatttcttcgtatggccccacatcatagacttggatttttagttaactttggctaagtcatggctagcatattctatgtcaggcatgtcttacttaaagtgtagtttggaaaaggtagtaagcaatcaatcatctgctaagagtacgaaaggcggtgctaggacccatatgagacactatcaggttgcgctaaaaaggaataagtatatttgtctccctcatctcctgaccctgaccctagatgaatcgtctttctcaagtctcaatcgtagaactggtataacacctcccacatattcaaaaaccggtgtaaattgactcctcggtggtttcaaaagtgatttcgtcctatgtggcacttatgagacccacatgttagtgaagaaaaataaaaaattaacagtcccacatgccagtcatcttaatctccttttctttttcctcccctctctcggtgacaccggttagcattgttggggtaacagtggcgaggttttggggaagagaacatggagccacacgagcgcgaggcaggggagggacaaacgggcgggaggacacgatcactaccatgacatccctctctactgctgggcttgtctccatggtgtcatcaccaagaggcgttacattaagatgggtggcacgcgggagagaaactcgccggctggctgcaaggcgtgggcttctggggacttggccagctctagtgcgtgcgggaggagaagctcgtcggcgaccacgcacgtggggaggacttgactggctccagcacgcgtgggaggataagctcattgcccagctacacacgtggggaggacctcacggactacacgtgtggttccaatccttcctcctactactctcctgcccctccctcccccactcactcctcagtgctcctctcccttttgtcgaagccattttcgctcaccttcacaaccgccgcctagagagggagagaatgggagagagaggggacataaaagggtgaataaaaagaaaacggatgttaggacaactaatttgtgaagctattattttctctcagtgacatgtggatcttatgagtgtcaggtggaccaaaccgtttataagcaagagagcagatgaaatagaaaaagtagacttattccgtgtaaaaatgtgggatcgtttacagcgagaaaaaaaatgcaccagccgggaatcgaacccgggtctgtaccgtggcagggtactattctaccactagaccactggtgcgcttgatgtccttttttgaagaaaagttttattgaacttatcaataaatcctgaaaaccggggccattactctcatcggaatgatcaacgtacgtttggatgcattcagggcctatacggtttggaggaaattcatgggaattttgaaggaatttaactggtgactgtaaaattttctaaaaatttcatgcgtttcgaaggagcgtatcaacgagatccgccccagattaatgcaacttgggaggtgcagtgagcttccacattgccttcacaccggaacatcatttgcactctaagataggtcatccataagctcgtaattactctcgaaaatctatttcgagagtgtcctatcagcgtgagctaggggatcgaacagagtactaaaatcttcttccgagtgagctacacagcgtccgcagcgaatataaaagatactcacgtgtgactagcaacatgcctgttatgctctccagaccttgcaggcataacttgcatatgtgatggacaacgcacattttcgtcatgtcttgcaatgacagcatatctcattggctgataagcaatcaatcgataatgaccttttatgccagttgatgaataaaacacatggatatacaaaatatcgtgcctaaacccacaaaacagagaattagcaccgaaggcaattagaacaaggctctacaagattgcgcaacctcccgccgataccactgtcgtctaaagatagaaacgcaaccactgttgcaggcgacttccttctgttttcttgagtctaagggcagaatattca

SEQ ID NO: 14042 - DNA, 4642 bp, Oryza sativa
gggcccgcccgtcgtcgcggacctctccaagctccgtcgtgtggctcccaagctcgtcgccgaggtcctcagcactcgcccgccaccgccgccgccgctcgcgttcccgttcttcctgtgggcggcgcggcagaaggttcccggtgttccacgtgcacgcgagagagagaggaggaagggagataagaggggaaagagagggtgacgtggagacctgacatgtgggtcccacgctgactcagccgccacgtagaccaaaaccagggttaaaaccaccaaaaagacctcgggtgtccggttttatgtagttaaaggacccagcatatctggttttgcggttcgaggacgttttcgtgtcactatgacaagttgagggaccttcggtgtactttttcccactgccaaatgtaccaaacccgcacaaaagcggcccaattcctacgtgaaccttttatcagcacaaaccgaatgctgaaacataaagtaaaaaagagtgaattgtactttcaatcatttgcattcttttcactttgaattagctattgttattatttttgtactataggccatctaaacggaattagttatcaacatcctcaagcacattagcatcctcataccgaatattttatctatttacgtacaactcacatctttatccgagaaatgttatatgtggttagataaaagagtttaggtgatccaaaacaccaaaaataaaaagagaaaagcctagtcgaaagtaaaaatataagataaaagtggtcaaatttcgataagaaaaaggtgaccaagacgcaatttacttatataaaaatcatcaaacgttctaagcacaggggaaaaggctctaaaatgtgtcacacaatgaaacaactgattaatttctattggcaacggccactctacatgtaaactgagtacagattattgctagttaaaacccaaataacttgaaaccaaacactgttcttcttcctttcatggaacagagaggccgatgtcgcgccctttggacgacacgtcgggacggtatctcttccacggcttgtagtccttctccccgagcatcttctccacctcctcgaactgcagtcccttggtctccggcacggtgaagaagacgacgacgagcgcgaagaaggagacggcgcagaagaggaagaaggtggccgacgtgcccagcgccttggtgaggctcaggaacgtctgcgtgacgatgaggttggacacccagttggccaccgccgcgatgccgccgcagacgcccctgaaccgcagcgggtagatctccgagttgacgatccatggcacggtgcccatgcccggggagtaggagacgatgtacgcgccgagcgccaccagcgccagccacccgaagttgttggggcacccttccgtgtagaactcccggttccccgcgtggcacgtccgccgcgacgcttcgcccgccgccaggcacgcgccggggaggagctgctcgatcgtccagaaagctcacttctcatatcaatggcaagaacagcaagaacaacatcaagagacaagaatgttagtaccttgtttcctccgtgggcgcagaagccgcaggtggactgggccttgaggcagttcatgcagttccagcgggcgctcgggctgtactccgggcacgtctggttggcgaacacccgcgtctccaggtcgctgaccggcggcgcgtggtgcgcggcgccgaggaacgtgccgccgagcacggcgagccacaggacgatgccgacgaggctgatgatcatcaggcgacggcggccggccctgtccacgaagaacatgctgacgatggacccgatggcgttgaggcccgaggtgatgagggacagcgccatggccgtgttgttcgacgcgaagccggccagctggacgatcgtcgggctgtagtacatgacggtgttgatgccgacgaactgctgggcgacctgcgcgatgacgccggccatgagcccacggcggacgaccttgctgctcagtgccttcgtcagcttgccaaccagactctgctcgccgatggagccctccagttgtttctcatgttcaattgatcggcgcatcgaatcgatctcttcttcaacctcagccgcggggtaaatcttccttaatatggcttcagcctcctctttcctatcctgtgcagaattcagtaatttccagcacaatcttttagcttgacagagtcaaatttgctacaaaatttacttgtgatttgtgcatatgtaacaatgtacttcccttgtacatctacgtttccatgtaacaatgaactaaacacgtatgtacatttttttttctttaagcaaagcatctgtacataaatactgacctgtctgtatagccaccttggtgattcaggtagcatacacatcaatatgaactgaataaaagcaggaagacctgcaatgccaagcatccacctccatgttccctttacctgacagagtcattgagatatgattactgctgcaccttgaaaaagacatggtacagcacgagctttcagtgtacacaggtgagtaaccttagtgaaggccagattaatgaggtatgccatgaactgccctccggtaataagaagtccatttgtgctcacaagtgcacctctgattctagctggagaggcttcagaaatgtacaaaggtgctgtcatggaagccattccaaccccaagaccaacaaagatcctcccaataatgatgacaaacggtgttggggcaagggccatgatcaaggcacctgcgaggaacagggaatcggcgatcaagatggaaggcttccttccaaacttgtcgttcatccagccaccaaatcctgctccaactatggctccagctacagccatactcactatcgtttcctgcatttcagatcagggcaaatcccatcagattttgtcaacacggaatgctgtattctgaagaaaagcagttgtactacggaaagtgaaaagttaaatcaaagtgagaatcaggagaagccaaatgtaccctaagtacagtgctcttttcgaccgcagtaaaatcatctcgaatatacagaagtgctccagatatgacacctagcaaaacagtagattaattaaaaagaatcgaaatttgtcatctgtgttgcatttccaaagtggagctaaatgtttggaaacataaacaacattatgatacttaatagactacagagatacttaaaaagtaaataaatggacaattgaaaaggacataatagcaaaacttgaactttgacaaaattcagtaaattatttttgttgtagcctatgccatgtaacagtacctgtatcatatccgaaaagaagaccaccgatgccggcagagaaaacaagctgaagaatgtaaggctggctccaggtcagccgcagacattccttaaattcagccttatcagctagagttgcacccccttccattgcattcaagggcttttgcgcacccaacgtaggttcagattagattggtcacgcaggaatgaaacataaattgtcctgtattattacacagaattaaaatgctacagaattaaatagaagatttgtcaatgtaggacctataataatactatgaatcgcaacaacgaagaagtgccatagattaagaaacccagcaaactatttattctgttcagtaacagaagtttcataatacgaatgatggttcactgtttcaaacatcatgattgctatacttgtttggatcacatcatataaaactgtgagcggcatcaatcgattataaaatcagggaagatagagatgaatctcgatacctacgatgtaggacagaaaaatctcctcagaatgtgcctttccaaaccttcaggacagaagaagcatggtgtgtttctcgacaggagtccctttcttttataggatggcgcaaccaacatttacaacggaagaacagccttaaaaccacaatccctaaacgtaacgacaatccaaaatcgcgtgtttcatcgcagggaggaacgcggataagtctcaccccgactcgcctaacataaacaacgaaatctcaacgataagatctacagaagaaaccgactcaaccgatctcccgctaaaaaagaatcctttcaccggaaaggagccacaaaccccgagaaccccagataattcccgaccttgcgatccgtgaggacgccgcggcgccacgagtaggaagaacaagaagaagaactggcagtgtgctgagacggaaaacttcacctcaccgagaaacagaaacggggagagaaaccccaggctgccgggagcccgggacgagagccgcgcgagcccagcacagcacacgaaacacactccttccccaccccaccgcgcctccaccacggacgacgagcaaagtggcaggcgcgctgcggcagccgggcgattttactgaggacgctcccctcccttcccgtccacccgcgcgtggcgtggcaattcaatgcgggggcttaggctggcacgcgcacgctcgagtgacgctttgccgattgccagtgtgagtatatccgatagatagagagaccgacgcgcgcggtggccctcgcggaatcgccgaatcgagtcgtggtgataactgtaactgctcgatccctttgactcgccggattc

SEQ ID NO: 14043 - DNA, 2746 bp, Oryza sativa
ggtgtccgtgccgcctgcgatgctgggttcccgggtccaatgcggcctaaatctaccggcggtcagcatcctgttcgcgttggtcaccacatatatatacctctcctcttcgtcgtagcagcccaccgcaggttcaccgaccccgcctcatcgctctcccctcatctagttagtctctgttcatctcccatctgcctcgtttgcaagttcaagacctatctactacctccgtcccaaaataagtgcagtcatggatatccgtgcccaacgttcgatcgtccgtcttatttgaaaattttgtgaaaaatttaaaaatatttagtcacacacataaagtactattcatgctttatcatctaataacaataaaaatactaatcataaaaaattttcaaataagacgaacgatcaaacgttgaacgtgaatagtgcaaaactgcacttattttgggacggagggagtagttattaagccgccgagccatcagccattgtggtccaccacccggtaattttgagcatctgggaatgggagtctaggggcataggggaatatgtctgctcatgcgattaattttctgaaaataccgtacattaatgcaataggcatcatatcttacaccaatatggtttgtgaattgggcgaggagtaacgtttatatttttttcagccatcatgttatgattcattgaacgaacttatagctagtattacacagatttaggggaaccacaaaggttgtaccgctgaaggacattaagctaacggccagtagagttcttagctcttcttctggggctatctgcactctcaagcatgaattgctaacctcgattcttggccatgaacgtagtttgactttttgcatctgaaaatcaatgatacatgatttggtagtatttatacctctcatccatagctgcatgtacataactgagtactgtctattgttattgacttgagtatatgatttttctatctgtttttccttccttttagggctcgaaaatacaaactctggttgacgaggcagtaaggatatccagcgttctttaacactgcactcaacattgcattgttgcagtagcatttaaaggtccgttccagaattcagagagcaaggttttgtcagaggtttgaatccatgcttaatagctgccgaccaagtcttctcaatggtcatcatatcatctccacattcatgcatttcccaaccttctaaagcatgcaatattccagcaatgcgccatgcactcatcacccttcttggcagccaattctgttcatacagccagtagtatactcatgtcaatgttggtaaatttaggcatggagaaatagttggtatataacatatgggcccattttgtttagctcaaaatacctcacaggtgtggacattctgcattgtctctgggatcttcattgctgggttactcaagtaagtgcagtccttgcgtgccttcttaagggggaactgtgacgtgggaataaatatagttccctttggtgccctcccttgtgcatcgtctatgctatctcctatccaaatctgttgcaatgggagtataatcatgaatataataagcttgcatgagtttttttttcttggttatctcttttatgaacctctgtccacaaggtatcctagctgttttttttttgagatattaaggatgaaaggaagagatgcatgtaccccctcattaatgatgacggatgttaggggagtgggagggtggtttgggggtaaaattgggtgaaaattaaatgactggtagttgggtgggagaagtagtactctaaggaccccttaggtcaatcctaacccaagacactagacatagtttccataaactccgcctcatcaagaactagtactagacactactatttcaatacaaacaccaatattccatacttaaatttaatgctacttatctcacatgatgtcttgggtgttgtgtagaaactatgtttcatgcaagacataattttcttctctttcctcatttattcacttgacacatcatttttcatcataggtgctagcttatttaatgctatggacatcatcctagtcattgggttgggaatggtcttaaagttgtggacaaattttgaaggagcattaaagtattactaatatacatcacccactaatttactcgtcatttgatgcaatcccaatagtggttatataatatagtgtcacacatatgggaactcgtgtgatagcatgatgcatgaataacttgtttgaattcttttaacaaggtttatagttgagatttttactagcctaccaagctccagtagtgtctatggtaccacagtactatttattcaccaatttatgcttcttgaggaaaactccctccttattttacctgtggtgtttcatcattagagaatttcagatagatagctctactctctggaactcgagacttgagcattccatattctttctcttgattcaggattacctgcacaaaaatatgtggaatagtctggattatagcaagatttataacccaagttttaatacattaagataatttaatataaaaaataatctactaaatgattataaaaatgtatcgaacataacaaagtgggaggctgctagatttacctggacacctctctgacataaagctatggctgttgcacgggtcaccttagaattacttccacagagaaaaacttgctttgtaccaaaaggtatgctattgagcacca

SEQ ID NO: 14044 - DNA, 15164 bp, Oryza sativa
atgtaaatatagtacaatagtagtgtaattaaattctagcttatatgtaactacactgtaaccgatgtgtaactttcatgtaattttgaaaaccgttagatttgctttaagattcgtgcaaatggagaagaagaaaatcacaacgcacaagtaaagggatttggtcccatgatttccgcttcgtgaaaatagcatgttatggtaagatttttaaaagttacatgtaagttacgatgtaaatacactgtatttacacctgtcaattctttatgcgaaaatttgtcgataaatgtatagcaaaattgatatggatagtcatagtgtaattatattataataattacaatataatttatatgtaactttaaaaatctcgcagtaacacgaaatttctaagaagcagacgtctcaggacgaaatgccctcacacatatgcacgatatgattatttccttcactgtttgcatgaatcttgaaacaaatattgtggctagaaattatgtaaaagttacatgcaagtaacattgtaattatatacaacttagatataattacactacaattaaactatatttatatttgataaatttttaggagaaaatttatcagcaaatgtatagcaaagtcaaaataaaaaaatgatctggacgacgtgaacttgctgaaatttacgagctactgtatcaatttaccactaacgttcagtacttcagtctaccatgatatgaacaggagccaggagggccaaacaaatcacaaatgtatgtggaagtggtcaagtaaataagccaacttgcagggtaaggcgtgacagcgtgaggatatgatgaatccgaatcgaaagaacagtcagtgtaaccatagactcaggattgcagtgggctttgcagaaatgcatgaacatggaaagatgggcaataaccggcgagtagcatcttttcacaattatttgcaagcacgcaagcaggtccaaaatccagaagaacttctgcaccttcatgtacatgaaatgaaattggcttcacactctaaatcttacacattcttacaaggtggacaacaaacaaggacttggcacacttgaaaattttcaaacgcttaaatgaagagaaacaagctcatgcagaggatttcttcagtgctctatccagcctgacattgaagggagttgagtgccagtttacccttttgtcctgcagcaacccactgaagcatcagtacatcattcaaaaatctgaagaaacatatgacttgagtgttgaatgcacctctctgtatttgcttgtcgtattggggattccattggttcctgaatctgatcttgaagaacagtgtgcattgtcttgcttggtgctactccagtaacttcccaccgtacccaagatcgcctcttcacggttatggctgggagaccttcgtggagatgatgtagctgatgattgcttaaggtcatcgaccgtcaaagcacccaggacaggcctttcatctcggtttacagttgaaatggaacaaggagatccactttgcaccttgtctactgttgagttatctgaagaaaccaaccaagtagagaggctcgcatccacagaaacttccttcttgatagaattttcaggggttgcacctacctttggcactgaatttacattctccttattcgactttttagctggtgctgcttgggcttttacttccttccactgtgacatattctgaaccggattcagcacaggacggacatactggcctctgtcgcgatgattgtttctctgaattagagggctttgttcctctacagaggtactactgctcttaggtgcagggctgctgacttcattgtcattctgctgatctttgtacatttgcaatgagaaaagagactcatgggactcctgcttgatatcttcagtgtacagttcatccttgtctactaaatcaatcttgcagtctacaaaatcctcctcctcctcatcactatcatcaccgtagttgtcgtcctcaccatactcatcttcttcttcttcgctgtctgagcaattccggtaacggtgattctccgggagcagcacatccttttgcatgtgttttccatcttcattttctaccatactgacaggctctggtggttcctcctcttggtcagccggtgcagtgttttcatatgccgtaacattcatgtcgaacgttactttcttcttgccactgctgcggctctcttgtccgcccacctccctatgcatcaagaaagacggcatgttaacaggcacacaagccgaatcattcatacactaatcatttcgttaacctacctgagttctggatcaggagtgcaaacaactgcttccgccaaaggtggtgagtgtgccaccggggagagtggcggtgttacttgcttctccggcagcaaagagcttgctggcgatgccttctgctcactgcaaacagattaacagtaagaaatacaacatcgaatacaaggtgaaggtacagccatagaaatacggaactaaacgtatatggcatttgggaattaggcaattaacagttataagcaggctgccgagcattaggacatgttcatatccatgtcagtcaatactacggtgctgcttctctgaggcgtttcagcaaacacccgagctgcaattctctccctaccagccattctcacgcattcgcataagcattcgagagcaacagcgaaaattcacaggcacgcaaagacgaccacagtggaggctacacgcacctcagctcctttccgggccttgcgccagtgaccacctcctccgcagcctccaccggcatgggcggcggtgccagcaacacatccttcgcctcctgcaacagtggcggcggttccacctcctccttcgcctccacatccaccgccgtcaacgccttgccgagcagagcaacctgcggggcaaatccgaaacccatcaggaactcacggaatcaccatcacccacccgagcgccctaccacaggggcgagcacccgagaccagaatctcacatggtccggccgcggcggcggggacctcgccggagactgcctccgcggctgccgccggcggcggcggtcgccgaagcaggcgaggaagcagcccatggaggcgaagatgcgggaggacgggagcagccgggtggaaggattcgatggagtggctcgattttgaatttttttccggggatttcgagaaagtattttataaattagttttggtagtggcggatagtgcggattcggtgaggaatctgaccgttgctaaccaagaattgaagaccaagagggccagggtgcggcgcgggcaggtaggtggctgcactgattgctattgtctgatttgctggtttgaattaggaataagtctatttcgccccctcagctattgcgttgatttaaaatgcaccctcaaatttcaaaaccagatttttagacatctctcaacttctaaaaccgttcaatttacccctcaattcaaacctgagtagttttgatatacatgaggctgacgtacatatctagccagtgaaaaaataatagtaattgcatggcccacatgtcattgaccataacattttcctcctctctctccacgcaccaaccttgacgggcctatttctcctctccaggcaccaactgctggtattctctgatagagcagtgactctaacttctccttattggcgcatcgccgctaggggtggaaaaaaagctcgggcttggctcgagcttggttggcttggctctgctcgtaagccaaacgagccaagcccaagaagcctccttttcagctcgttgctgaaataagccgagctgagctagctcgcgagccacttgttttggctcgcgagcctagatcattgttgtcgaggttacgggtctggcataccctctacccttcgatatacgttacgtatcgacgtggcatgcccacgcgtacgcggacatttccttcataatctaaggaaacttttcacgaaatcaacagacggaaagagtccttctcggacaaggactgggttacctacgtatcgtgctaggtctggtgtgttcgagtcctactcggagagcatcagacctatggtataaaagggatcccccggagagggcataggggatcgaatctcagagccaacacaacccacacagtctatgaagccggagcctgcgaggagccaagtcgtcgagagctagtcgaatcaactcgactacaatctcgccggatctgacaagttccatcttttcctttgtaacctgtgttttccgctatataatcccatatcaactggattagggctattacctgttaaggggcctgaaccagtataattcctgtcttttgattgcttgatgtcgtactacgtagatccttgtaccagcgtacccctatacactctatatccggtctacgggtatcacccatcgacagtggcgcgctaggtagggggacttggtactcaaggttctactactatgccatcaagcttcgtctacaacaacgtcaacacccgctccagccaaacactctcgacttcaacaatgctggtatggactcaagtcggcgaaatcgtcttcccggtttacaccacgatgccgatctcaaccggtcctccaatgactgaaaacgagaacgcagtggctacgaaccaagacggttccatgtcgaaaaacccacccattgaaacggagaacggattaccgactacattcaaactcgggaaggattctgatgcggccaagtcttgtccctccgacaaaatacacggaccggcaaagatgactcccgaagctatcaggtcttggtgtcctatctacaaaaccaagaaacatacccttcaagattgctgggtattcatcgatgtccgtgctgaaattcgcgcctgcaaagaacgtggaattcagcgtatttctccaactcgggatatctattgtcctatccacaagacaaagaatcacgatctctcgagctgcaaagttctcctcggcgccatgaagaccccatctcctaagtcatacgtccccgccagggataacggcaaggaacagggagcgactccagcctcagatcgattcgttggggtaatcgatctcgatcctcacgaaccattgttcttacatctcctcgaagactacgggtcatcgacaacaagtgcaccgcgggaggtattagttatcgatgacgttggcacgtcagctcaagccaacgcagaagcggcaaatcaatcgactactccagctcagcacatcagggctattcaaactatactgagggaaactcctttcgatcccgttctgaacgatgacctcgagcattggacagaacgattacgggagtcggtgaccaaccttagcaatgcgttcgaagaggccgctaccgcatcacactaagatcagccaccaatcgccaaccccaatggtgaagatccggagcggagggaatcgcctcgacaggctacccctccacctcgtggcactggtgatcttcgagatcaaattaacggtcgccgagaagcacggcgcacatgggacgatgcaaatcgctctcggcgtcatgtttcttcacggcgccatgatcgaggagaccgcccaaacgaggaccgagaatgcaacgatcatgaacggcgggggccagacaatactggtcatggccgtcgccgcaacgacgacgacgaaggagatcggcgccgagataacagcgagagacaacgacaagattcccgggatccaggtcgtcatcctcgtaatcgtacgccagagccaagcgacccctcgtcatcgtcatcatccgcgtcctcttcatcgtcagacagacatccacgaaggtcatgcgaccgccggcaacccaccgcccccagtgctgggtatagggctttcggtcgttccctacgtgatgtccgatggcctgagagattccgacccgggccattgaaaagtatgatgggagcactgacccagaagaattccttcaagtctactcgacagtgctttatgctgctggagcagatgacaacgcattggcgaactatttaccaactgcgttgaagggttctgcacgttcatggctgatgcatcttcctccctactcaatctcttcgtgggcagatctgtggcaacagttcgtcgccaatttccaaggaacatacaagcgccacgcgatcgaagacgacttacacgcgttaacatagaactctggggaatcattgagggaatacgttcgcgctttaataagtgcagaaacaccatttccgagattaccgacgcttctgtaattcgtgccttcaagtccagtgtcagagatcgctacactacccaggagttggcaataagacgcatcacaactactcgaagattattcgagatcgttgagcggtgtgcccacgtggatgacgcgctaagacgcaagaacgacaagccgaagaccgggggagagaagaaaccagccgcagacgcatttgagtcaaacaagaagaaaaatcgcaagaacgggaaaaggaaagctcaagcggaagtcctcgcagctaagtacgcgaaccctcccaagcgcccaaacccacagggcagcgatacaaagaaatcatggtgccccatacacaaagcggacagacattctctggaggattgccttgttttcaaaaagtcgctcgagaagcacatggcatttgaaaagggcaagcgggtacgtgttgtcgagaagaacgaggagacacctcctcatgaatcggactctgcgtacccgaactccgacctccacatctcacacatcttcgacggctccacaacgtactcctccaagcgagaatacaagaaagtggaacgtgaagtctgttcgacgtggcgggtggctgcacccaagatgaagtggtctgagcagagaatagagttctcggaggaggaccaccccaacacctctgttatcccaggtcgatatccgatcgtggtcgagcccactattcggaacgtcaaggtagcacgagttctcatcgacggtggcagctcaatcccacaaagtgagttgacaccaactgatcaacccttccatggaattactccccaatcatcatccagacctttgggcaagatcacattgcccgtgaccttcggccaagccaacaacttccgaacagagcagatcacctttgatgtcgctgaatttaatacagcttataacgccatcatcgggagaactgcacttgcgaagttcatggccgcatcccactacgcatatcaagtgctcaagatgccgggaccgaagggaacaatcactattcaggggaatgcaaagctggcggtgcagtgcgacaagcggagcctcgacatggtcgagcaaacgcccaccccacctgccatgtctgagccacccaagaaagtgagcaagctaaacaagacgccgaagccagacggcgccatcaaaatcgttccgctctctagtgctaaccccgacaagactgtcaaaatcggggctacactagatgagaaataggaactcgcgctcatcaccttcctccgcgacaatgccgacgtgttcgcttggcagccgtccgacatgccgggggtccccagggaggtgattgagcacaaactaatggtgcgacccgatgccaagccagtaaagcaaagactgcggagatttgcaccagatcgaaaacaagccatacgagaagagctcgacaaacttctcaaagctggcttcatcagagaagtacttcatccagagtggctagccaacccagtcatggtgcggaaggccaacggaaaatggagaatgtgcgtcgacttcacagacctcaacaaggcgtgccccaaggatcactttcctctccctcgaatagaccagttggtggattcaacagccggatgcgagcttttaagcttcctcgacgcttactctggctaccaccaaatcagtatggcgaaagaggacgaggagaaaacaacgttcatcacgccgttcggggtattttgctatgttaagatgcctttcggactaataactaccgggaatactttctagcgcacggtccagggcgcacttagcaaccagcttggcaacaatgtcgaggcttacgtcgatgacatcgttgtcaaaaccaagacgagcgactcattgattgatcacctgcgggaaacgttcgacaacctccgacgatatcgccttatgctcaactcagagaagtgcacattcggagtaccgtcggccaagctactcggattcctcgtttctggcagagggatagaggcaaatcccgagaagatcaaagcaatcgagaacatgaagtcgcccacaagactcaaggaggtgcagaagctaaccggatgcatggcagcattaagcagattcgtcgctaggatgggagaacgaggacagcctttcttcgccttgttgaagaaacaagacaaatttatatggacacaggaagccggagaggcatttattgcactcaagcgctacctatcaaacccccctgtactcgttgctccccaacctaatgaagaattattcctttatattgtcgccacgccatattccgttagcactatcattgtcgtcgagagagagaaagtacaacgaccagtttattactcagcgaagctctccatgatgcaaagacaagatatccacagattcaaaaactgctctacgcagtcatcatgacatcaaggaagctacgccactactttcaagccacagagtcacagttgtctcctccttcccacttggcgaagttgtgagaaacaaagacgttctcggccgcatcgcgaaatgggtagtcgagctaagccagtttgatatccactttgtgccgtgaacagccatcaaatctcaggtactcgccgacttcgtggccgattggaccatgccagataataagccagacaaccaaggcgacaatgagacatggacaatggcgttcgatggcgcactcaacagccaaggagcaggggcaggatttatcttaacatctccctccggagatcaattcaagcatgcaatccacctcaacttcagggcaaccaataacactgcagaatacgaaggactactcgccgggatacgagctgcagccgcacttggggccaagcgactaatcgtcaaagggaactctaagctagtcgcaaaccaggtgtacaaagactacaaatgctccaaccccgagttatccaagtatctctcagaagtcaggaagctagagaggaggttcgatgggatcgaggtccggcacgtctaccgcaaggacaacgtcgagccagacgatctagcacgacgcgcatccagacgagagccgctcgagcccggcacctttctcgacgtcctgacgaagccatcggtgaaggaagtaagcggtgaagttggcccgaacacccccgacatcagctcggaggtcactgaggtagaacgcgccgttgttgacatcgaaactacagacgactggcgcagcccattaatcaaattcatcagcagcgaggagttgcccgaggacgatacagaggctgagaaaataatccgcaaagcaaagatctactgtatggtcggcaacgacttatacaaaaaagcgccaaacaggatatttctcaaatgcgtctctaccgacgatggcagacaacttctcctcgacatacatgaaggcatatgcgggtcacacgccgccggtcggacattggtcagcaaagcctttcaacaagggtttttctggccaaccgcccttaaagatgcatacgacatggtccagcgatgtgaagcctgtcaattccacagcaagcacacaaagctacctgcacaagcgctccagacaatccctctgacttggttgttctcatgctgggggctagacatacttgggccattcccacgaggacacggcggctacagatttctatttgtagcgattgacaagttcaccaagtggatcgaagcagtacccaccggggagatcaaggccgataacgccatcaagttcatcagagggatattttgcagatacggactaccgcaccgcacataaccgacaatgtctctcaattcatcagcgccgatttccaggactactgcatcagcttgggagtcaaaatatgcttcgcctcggtctctcatcctcaaagcaatggacaagtcgaaagggcgaacggcatagtactacaaaggataaaaacccgcgtctacgacagactcatgtcacacgacaaaaaatgggttgaagaactcccatcagtactatgggccgtacgcactacaccgacaacgtccaataaggaaacacccttcttcctcgtgtacggttctgaagccatgctccctggcgagttacggcatcaaagcacacgagtacagaagcattccgacgagagccaggagaatcagcgagagatcgatgtaaaccttctcgagaagcatcgtgagcgagttgccatccaagcagctagctatcaacaggccctccgccgttatcatgagaaacgaatccgagtatgcatactttcgatcggcgactacgtcctcagacaagttcaaacccaagcggggcgaaacaaactctcaccaaaatgggaaggaccgtacgcgatcacacaagtcttgcggccaggcgcattcaaaatggccgacggcgacggtcgcgaactagcaaattcgtggaacattgaccaactacgtaaattctatgtatgagtcaataccgctatacctgtaagcacccttgcagtatcaataaagcctacttcttggtctcatatcacgaccaaagtgctttcacccaatgaccccttaccctaacgacgcctaacgttgaaacccgacaaggcctccgaggaacctaagggatcttcggctggggacgcccagagccgataaggtcttgtcagatccttcagagatgaaagaccatgtaagatctggtcgtgtaagagttctcgccgtgcgtattaaccaagccgtgtaatcggaaaccgagctttccaacttcacggctggggtctaggatcagagcttattcaaccaaaacaggccaagggtccaggagccttgtcacccgaggaaatccctccgacgacaaggctgggggctagggagagtgtacgacccaaacggctaactaaagtcgttaactgagaacacactcttacacacaacacccagagtaagaaaacatttcttaaagataaatttctttattcacaaaatattccttacagtttatacataaatattttgctgcattatatcttcccctaagatatttggtcgcaggatacaagcattaccaagacggccaacgccagtccattgattggaaaactttctcggccaacggcgacatcgacctcgcaaggtggtctatctccgccgggttcctccgagaacgtggaaaaacttcacgtaaaaattcgagatccagccgcgggcggtgatctcgcaggcaagccagcacgtgtcctccggcatatcggctcgctcgacgacactcttgcttcaaggcctcatcgattcgcttgccaatgccatcgagttgggcacaggccccgttgagccacgagatgtacccggccgccaattcctcaggatcaccgcagattacccgaagctcccggcacaccctggccatcgaagtgcagcaactcttcaagtaagacgagaaccacacctcgcggcctcggagcgtttccacagcttgctctttctttacggctagcattgccctcttgagttccgtcacttcaaatttcgtcttccagtataggatacgacgatcttgggtcgcaagggcatcctcgagatctactaaacgtaacgaccgctaagacaacccggaaacccccaaaaacagcatcaaggttgataggctactcacttgaggcagttgtcgtcatctcgacttccacatcaagagttgggtcctcggcgtcatgtgagacgtgcggttcaaactcgagtaccagaattatcgccagtgactcgggttgcccgcgctactggacatcctcgttattagcatctctacaatttacaaaaaaaacttccgagatcaacattgaacaaggatggtaatcacatgcacgaaggcaaccagagttcaagatttacaaatgacaaaaatacaagaggccctactcttcaaaaagggggaggacagactccccccggtcactaacttcttccatcacctccctacgcgtgtcgcttgccgccccctgatccaagatctcacgcagatcgagttcagggcgcgacaaccttacacacgcaaggacgtgacacgccccggtgaagataccgttggacgtctcctccgcgatcctggccgtatgcttggaggggatttcccccatcgccgtcgccagctccacaagagaagaagtcaacgagaactcatcggggttcaccggggtcgtggactcgacgccgcactccctggcgagctggtggaggccggtgtaggtcacccgcagcgaaccacgaatctcggagagattgtctcccagttccgatatgcggtcctcgagccctttgcgttggcgctcgttcccggccaccagctccctcattttcgtgaggtcctcgtgggcctcagccagttcccgcaccaaccgctcggcgcgcgcgtttgccgccgtcgtctccgccctcacctctgagatctcgcggccaatgccgcgagcaccagcttcgagaaggtgccccattttgacttggagctcctcccaggtgagggcggcctctggcagactacgacccccagcaggatcactgacggggccggtcggcgtcgcctcccgactcccgaccacgggaacgacatctgttgatgccgtggcaggggatgcgctggatgttcccccggccttggcccgagcagctttcgcccgcgcctccctgtaaaccgccacgaatcaaaactccactcgagcagaagacgcgagaatctaaaagtttcttcacttacttctcgccgatcgtcacaatgcgctgacgtcgtgcaggcggcggagacgtgtcggaagcctgcgagacaaccgacacagagtgagaacaaaccttcctcgtcatataaccggatgataaggtgaaaattaccgagggagtctccgtcttgcggcggtgtccgagcacagacgagaatttcctcgccttactcggagcttggccaccactagtagtggcagcgtcggacgcctccttgacgaccttctctttcagagatgccgccacctgatgattcgcgagtggaccgacgacatcagtcaaaggaagggcctacgctaaatcatgtcataagctgattttgagcaaaagaaggcagacgcttatcgaattaactcacattgattgcttcgtcgcgctccgccgctcccttttcacaaaggggcgcggggatgtcgctcaccgtggtcgggccgctgatcatcacctgaccaacacgccgctccacggtttccctgctcagacctgtcaagaagaaattagtttttgataggtcagaggggaacgcgagtacaagcatatcgaagtaaatgcgagaaagataccccgaggagaaacccgggtcgcgtcatctggcccggaatagttataggccgggtgggcccgagcctggagcggctggattcgcctaccgacgaagtctgcaacgacttcatatcccgataaaccccgttctcgaagattatcgatgatgtcgataaacgattggagagagggggtcaaggggggcttggcggtctagactggaatcttgtccggttgttcctcgggaacagcgaggaccggatttgaatccttgatctcaaggtaaaaccacatgttccgccatttgctgcgaaaagagggacactggaaggggacataacgcaacttcatgccatcacgaagtcggaacccgacgcaactagatatcctattggattccatccagcgcaactcgtaataaaagcggaacagatcaagaaagggttctaccccaatgtaggcctcgcagagatgcacacagacgctaaggaaagtaatggaattagagtccaagtgcagaagagaaagcccacagaaattcaagaccagtagaaggaattcagagggtggagggagaaatccgcagacaacataatcttcgatcgcaaccatgcgacctaagacgggctgaggatcagtacctcctgcttccctctccgtagttccacggctaggaagggcgccatcctcctggagcttcttcagggtcgcgctggtggaagccgacttgccgagatccatcacagctgcaagatcaccggagatgaacctaaagctgacgaagctagggttctgtacggcgacggagaaggcgaggaatgctaacgggcggtgtgtgtttgacggagtcagcggactccaaaatgcgcacccaaaatccctttaaatagacgcacccccgacggtgcaaattccaagggactgagagaaatcctcgccggaaatttctaggtccgttatgcgcggcagtttttgacttcagttcaaaattcactcgtgactgttgggcttcaaacgacatgttcgattacaagtcatctccgaggtcctcacacctggaatgatagcgttctcgacacccgaagtcgcgaatggtcacacgagttcattttgagcagaagtcgggggctactgtcagggttacgggtctggcataccctctacccttcgatatacattacgtatcgacgtggcatgcccacgcgtacgcggacatttccttcataatctaaggaaacttttcacgaaatcaacagacaggaagagtccttctcggacgaggactgggttacctacgtatcatgctaggtctggtgtgttcgagtcctactcggagagcatcagacctatggtataaaagggaccccccggggagggcattggggatcgaatctcagagccaacacaacccacacagtctacgaagtcggagcctgcgaggagccaagtcgtcgagagctagtcgaatcaactcgactacaatctcgccggatctgacaagttccatcttttcctttgtaacctgtgttttccgctatataatcccatatcaactggattagggctattacctgtcaaggggcctgaaccagtataattcctgtcttttgattgcttgatgtcgtactacgtagatccttgtaccagcgtacccctg

SEQ ID NO: 14045 - DNA, 4430 bp, Oryza sativa
aaacagtaaaaaagcaatatgttgtgaatcctactcaaatattttacctggattactgactgaggcaaattattgatctggctttctgaagcaccagcatgctggtggttattttcatctaatgcaagcagtgcatcataatcatttctgcaaggaaacttcctttagttaaaaaaaatatcaaattttccaatcaaataaaactcgttaatatcagcaaaatggtatcacggtatatacttccctatcattactgtatactagcactattacttttcacaggcatagaagaaagtcacccagcaaaacaagtaaataaagattatcaaagaaatattcaagttggatgacaacttatatgaaccagctatgatattcggtgaaaagcacagcaggtaaagcaatggaagtaacaacaggagaaagtcacttacagatcaatattaggttgaatatgtgcagcagggtatctggaaagagctctctgcaaaaatgttggctagaagctgttaattatctttcggaatcatttcaataaaagaaccaccaactgtaaatgtgatgaaaggctttacttaatctgaagtaatctactacacaacaatgtataaggggcagcctctcaatcatacacacaacccaaccgttaggtaacacaaaaggggatcttgtttcctttgtaaaggacaggaaatgcatgaggggatcaaatactacaaagagatgaaatcaaccagtttgataaaatatgaaatttattgaatctactgaaaagctcaaacagagctaaagtacaaaacgacggttgaaatcagtgtcagttttgagccataaaataaacgctttattggctatagaaggacatataaaaaacctaaatatttgcccttccaaatttcagtgtatgtcacaaataaaaaaaaacatagaacaactttcatagcgtccttaagctatttggcacattttacaataggttaagaactagaatttagtttatactgtaatgcacatgacatggaagcaaagcaagataaatgacagttgactttttaaaccaaaagatttttcctgttcagaagtagtatcaagttttataggcaataatattgttacaggcaagagaaagaaataccactcccaaagttattagggtagcatacctggtaaattattcttctgttgtttgagtcatatcgaaccctattagcatgctgaggaacagttgaacgcaatacccttggacctctctaacaaaaaggaacaaggaaaagagaaaacatgtcaatgtcaacagattagtgtattgttaaacaacacattcaaggaactctgtcataaaacaaagcccatcatttggatcaaccacaagaaaaggctggtttgttatgggcagcatgaactgtcataacttgtgcaaactgaaggattcctgtaatttcattttcggcaactgtgatctcacatagtaaagacaacagcagtgtgtgctatagaaagctaacagatgtgtggatggcatactactgacgaatggagcaacaactatgagacccgaccctcattcacacaggcacgctgtgatatggagaaagtaaagatgaacagcaaggtgctcttactgtagtgctttggaaccgcctcgcagttctagatgtcggctgcgcattatcttcatgttgaagtgacattgctatgatcgcatcaatctgctttattaaaataaaatatcattgtacagctcgcaaaagtattttgagagagagagagagagagtcaggaattacacctcttctgtgggaacaacatgaggagtttcattgtaaagctgctcctgaagttggcgagccaataactcatcagactccaactgttctcttatgttgggatccactgaggtccgattgctgctaccaatcccactcaaactaggccttacttcaggagagcatatgtcatcaatatctactacaggaatatgatgacggtgagtggtatgatttctagcagctgttgagtctgatgatgcaactctaggttgatcaacatcaacagagctagagctttcaccaggatggtaagaacttgcgatgcgcttcctctttctgctactgatccttattgttctattaacaaaactagcagtctgcaatgtttttgctccaccaattgagttattgttgtctcctccctcaattgagttattgctgtctcctgctgcagatgctcgatccagattagactgttcagaagatccagattctcttccacaactattggtcatcttacctgatagtggcatgggtatattactagtattattgtgcgttgttctccaaccttgctcagaacctataccggtgtgatcattgtttgcaacggaagaagaatctcccatggatcttggacaaaccctaacaatagtgaaagtgcaggtaaaggttctagacatgcaataatctaaacatagcaacaaattaatcatgcatttttgtaagtccaacaatggagcaaaactagtttagtcatactgtatgattttaaaggaaggttattttgctgaaaaaaaaagatttgtaaaaagaattagcatctcctgcttacaattttcaaaagttcacaaattgtaaccacatgcacaagaattttgtaaacttaaattcaaccaataaaattactaccctaaaagccagaatttaccttatcgcaaattcacagttcttttaaacaaaaacatttcctccatatcttgtactcatattgatacatcctagatataaatgaaatgaactgacaatgcccataggaaaaaagagacaggacatacctcctcatataagcctctccagactgcttagcacccacgacatcatgggaaatttcttttcctttattcttgttaccttcagaaaaaatactgttcacttgatttgcagccagtggaattaccgtctccccagctctgcctattgccgactttctccctgaccttttttccatgtcagttgcagtgtttccctgccttcttattataggtgaactatcagtaagatctatcacatttcccttcccagaagcatcaacctgagtatctggatagtgtaagagtccacttgtagagcatatttctcgcttttcatcaaccttcagacttcttttggctatgttggagggagaaatacaaccattccgcaccagctttctttggcccacatgcctttgaggaacaatgcttggtgtagagcttgaaattcctgttgtgcccttgtcagtgatctcttcccctttgccctctctaggactcgatactgaacagacattagcacctactacttccttcggcttcttaaaggtgatagtccccattctgtttcgtggttttcccaccgtagtagtaggaagacctgatcctaaacagagaaagtcagcattgcagctattggcatcccgtgcactaatatccccttttctgatttggcaactacggtccctttctccagagcccctgcaatttatattgtttgaaatattcatgctctgatccaaaccagatttttttggcaccttttcattctcaacagatgtctctatcgtccgacctgattttagcaaggatgatcttgcttcaggatcttctgccactggcagcaatcgtgccaactcggcttgtttaaaaatatcgccagcatctaaaggtgcaggcgacacactacttgcattgcctctacttgattgaccctggatggagttatttgtgatcttaaatttaattcttcgcgatggtaatggagttccagctgcttttgcaatacctctcctagcagctgggctagatacagggcatgttgactgctgtattcggtcaggggtgtccggaacctcaaagatgtgatcagggtttatgtcaaccatggtatcccaccgaaactatttcagttacagatagcttgcctcctctcctttacatgtcaatttatgattaaaattctccaacacttcctacaagatacagagatgttatgaaaagagctgccttacaacaagaaccagtaagtaagatttgttttagaaagaacaaataaacttagcaggaaaatttggtctgcagtaaaaaagaaaagaaaaggggaactgtttctgtagtaacatgcagcaggtgcttggcaccagaacccacaagatgatggccaacatggaggtggatgctggaatccttaatctggttggtgaaggaacgaggtcatgaagtgtaagtaacaatgatggtctggaccattttcactggattcacaagctgctcccaaatatattgccaaagaaagaaatgtagaagtaaacaacaaactggactggatcaagtgaatactttcttcaaagagcatgcttccttgaatactcaattctagcttccagatataattattcaagtg

SEQ ID NO: 14046 - DNA, 739 bp, Oryza sativa
caagtccaatcttttccattgtgctgtgtgattagtcagctagtacaaaataacactacgagccatgaattgctagagttggataatcttgaaataatattgaatggtccagatttgtataatttgggatcttgggtacctcctaacttacccttcaaagtttcaagttactatcggtttctttcaattgacacaacaaaggtgtgttatcaggttttgtactttttttcaatttgttaattatgtgctcattttatgcatgaagtgaggctgaaatttatctatttggagcctgcgtaacatcttggaaagtccccagtggaaaagacctcctatttgtcagaccagatgcggtgttcaacggccagaaacccatcaggttggcgctgaagtttaggataaattatctgaagcttaacaaatgtcatgctaaccatcttctttcctgaaaccagtggtggaatcccacattgcttcccccaattcggtcctggtaccatgcagcaggtttgtgaaacccattttctgttgtagccatttagataggaaagaaactaatatatttaaattctcatcagagcatatgactaaacagactttgatacagtcaagtgaatgatatcatatttcagattgatgtcacatttaatatatacatcaatctggaaaatgcatgtagtaacatgttaagcagggaacccaagttagcctgaaatgaactacctgcagcctgccaaca

SEQ ID NO: 14047 - DNA, 2407 bp, Oryza sativa
tcatgtggctgccatcgctgtcgcctgcaggggcgtctgatgcagatgtaccggtgcatcatcttcagatatcaggccatcttttaccggcatgggagtgttgtcgcatttctcgttggaccgaggaactgtcaaagctgcattgtcaagaaaataaaccaagacaaaccagtataaggttctgaatatgcaaacttctacgtatcaaattgtcttgactctttctcattccacaaaaaataaaaatcttagtccaacttggctaaatgtcaccattaagaaaatgtaaccacatatgtaccactatccaaattattttagaacactcaaagaattccaagtagttgtaatgttagggtcggaatcgtctccacgaagaaacgcaactacgcggatgtggcaaccgggccacgcagcgtcgaaggagatcacgcgagctgaaaactgacgtggcatgccggaatagggataatgatccgattgcttacatttagagaagagtttgttatccctttttattagctaattcaattcaattgtaagcctacttaagggccacgaaatcatgaataaaccaagcaagattcaatctatagtcccatctccaattctctactctctcatcccctgcttttgctttcgtcgccaatcatgggccggacgtcgaagaggctgccaaagcctcgacctccggtatttaattcatatcccattcggtcattagccggtgctcataacacgtattaagatagaaagagaatatcaaaattacccacaaggaaattatatgagcatatttgtcagctatatactatcctttttaacactgctggatgacaggtacttcctccgtttcacaatgtaagtcattctagcattttctatattcatattgatgtgaacctcatcttaataaatctagatagatatatatgtcttgatttattaatatcaatatgaatgtgggaaatgctagaatgacttacattgaaacggagggagtatatcgcaaagagagcggatataaaaaaacatcaaattcctttaaacaagagggcgcatgatctatttccttataatggtatattcaaataaagaagtgaacctcatcttgagatgattaaatcgggagaaaattatttgaagtaccatacctgccgcctcttcattaggcactggatgctcacttgttgaggtgtcccaagaggaggatgcaaatggcgctgagcttgatgcaaaggaagaaagatgagatgaaggcgatgagagctggtttcctggaatctgttgtaccatacctctagttgcacttgactacatcaagaaacaaggacatggacaattagttagtatgatattacaaaattttcgtgaaaacataaatctaggcaataaggagaatcccatttaaatttataacttgctggcctctagggagttttttaatagaaggaacactctagtattttctctatgaagtgttaagaactactgaaaaaagtatgattcatgttctggtacccaattagatcacctcattagaaaagggatcttcaattcgagcacaactatacaacaaagtttccgttcgtcatcattttcagttggtagtgagaaactggttcaaattggcatacaactttctcaatcaccagtaactcaaatctatcaaagataaattaagtattgacataaggaaatttcaaaggaaacactaagcaaattgtttttatttctttaataaaatgtaagtttacctcagtgacaacttcaggctcctcaattctatcctcatttaggtgtgagatggaggccaaatctttacttggattattccttaaaagttcaatctcagcaggttcctcataagtgatctctgaaatttcactgtttcttgatctgacctgctcagctttctccgaccgttggcaggactgggaacttctggtacttagagaaaaggattgtactatacaatcctgacacccagaaacatcaagctgaagatttttaaggttttgaagtgattcaggtagtgctttaagtccaagacattgtgacaaattcagagactctaaattattaagcttgtcaaagcacgatggcaaatattcaagcctagagcagttcgagagattcaaaaaccgaagagaggtaaggcattcaaaggattccagcagtttaagatcagaacaatatgaaaggtttaggcttttcagatatgcaagttggccaaatgattgtggtaatacctcaagtttcaaacattttgacagatttaaatactgaagtgaatatatgttgccaaaaaagtcgggcaacatttggaattcaaaaccacttaagttaagatctaccaaagaacagaggctagcaaatgattccaaaaatctgataggtaatgctg

SEQ ID NO: 14048 - DNA, 1193 bp, Oryza sativa
cagcatagtaccagaacttcgattgttccggccaattagcggtggccggttcgatacccctctcaagcaagctaacctccatctcctcccacttcggcatcgcgatgctttagccgcctgaccccaagtggtgatggtacttcttcttggcggtattttctttgtttctttccatcatcgcctgcccttgttcacctgtcttatatgcaacgaactcgtcccagtgatcccttagctttgggaatgtgtcgaagttcggtgtctgccccttgaggatatatttctagtacagatctcccttgaagctctgaaattgttctgccattttcttcagagtccaccttttcactttgtcctctgtacccgcgggaagggtgaatgtctcgagcattgtgtccatagcatctctttctccgaatctgggacaaagctctcatgatctccgcgtgcccttgttctgcgccagtacaccgtactgacaggcacgttatcccgcacaacccaaccgctgtgacgtacatagttcttggcggcttctgccggggcactaggtcgtccgtcttcgtccacttccgttatgatgtgctgaccctcaagcttcttcgcggcacctcgttgcccgcgtgccctcttctgtccaatggagggttgacttccactagcctcctcctcctggttcccctccacatccctttccgcgtgcccctcctggttcccctccgcattcctctccacgttccctttctcgttcaaatactggtttggatcctcgttcccctcttcttcgttccagtactggctgcttccctccgcgattgtatcgtacaatatctgttcctcatcgcgatcagccatctgttcatacaagagtggtcgtatattagaaccctacacaatcttatatgctaagtctaattacaaatctaataatcttatactaaaactcaaatagtgatatatgctaagtctaggtgacgtatattataggaccctagctagtcaataattatatactaagtctaattacaaatataataatcttatattaaaactcaaataatcttatatgctaagactaaaatagtcatgtatgctaagtgtaactgtcgtattttagaaccctacacaatcttatacgctaagtctaattacaaatctaataatcttatactcaaactcaaatagtgatatat

SEQ ID NO: 14049 - DNA, 1222 bp, Oryza sativa
ccgggactaaagatattttcccgctatttccaaattctttttaaacccggttagggttaagaaccgggattattgataagcgcactgaatattattttccattacatatgtgtttctaaaatagaagataatgcattaaaattatttaacgtacaaagattaatattaatgacaattacttcgaaaaattattgttgtctgtaataaattaagtggataaaatgtaataagcaaatatatgatttaaaattaataaaaaaatctaataatcatatatacttagacaagtccgagaatactgatctctttgacaaggtgacaaagcagatgcgtcattatattgaaaaatgaaggtggaaatatcaactcaaaactgacgagacattgcaccacatcattctgaagggcttctaatctatccggatcgatgaccttctgcgaaattgcattcatgaatacacatagctttgttattattgcccggacattgtctggaaggataccccttattacaactagtagcagttgtgtcatcaacacgtgacagtcatgagactttaggtttgtgaacttcttctccttcgtgcttattattcgcttgatattcgtggagtatccagacggtacctttatgctctccaagcattcaaacatactttcattctgtgccttgctaagagtgtagctggctggattcaagtaatggcttcctttctcctttggttccgggtgaaggtcgtcgcgttgttccatatgcttcagatcattacgtgcttccagtgtatctttcgactttccgtatacacctaggaagccaagaaggtttacgcaaaggttcttagtgaggtgcatcacgtcgattgcgtggcgcacgtccaagaattcccaatagggtaactcccaaaatatagagttctttttccacatcgccgcgtgaccatcttcgctctctataggctggcttccaggcccctttccgaacactactttaagatctttaaccatagcaaacactgttttcccgctgcgatgtttaggcttcgtacggtggtcagccttatgttcgaagtgcttgcctttcttccgtaccgggtggtttgctgcaaggaatcgacgatgacccatgtatataaccttcctacagtgcttaagatacgtattttctgtttcatccatacagtgagtgcaagccttgtaccccttgttggactgtccggatagg

SEQ ID NO: 14050 - DNA, 551 bp, Oryza sativa
ccaaagcatccaggacaaacacgagggaaaggggtgattccttggaagattgggttcatggaggacatccacacgtacaggagtcggatgaggagcaagagaggtactgaggcgaagattgcagatctagagttcagggtatcgagctacgagctcagcatgcaagaggaggtggcaaggaagatcgatgaacgcatggccgcacatcggtcccatgatccccagccgaccattcctcctgtaatggtgagcccgtcaggaaaccgtagcagctgcgcctcaacggggcaggtaggatcacagagcatggacgccatgcaaacccaggacgaatccacctgccccgttgatgacatcactcagcaggcaccatgtgagctgcatattcctttcaagaacttatcaataaaggtaagctcgtagtttatatattttagatttggtcattccgctagttgctgcttatatatgttgattactaataaataacctcccaacggacccttcaggtacttaccactacaggccgattccagcaggatactccaagg

SEQ ID NO: 14051 - DNA, 2234 bp, Oryza sativa
cagtatcactattgagatcataatacatactgatcagtgtgtgaatttcagtttaagtatgtagattagtacacgtcgaacacagcgtgacgctcagtatcagcagaaagattagtagctggacaaacacatgtaattagaccagaagcttattaagacctttccatactgaagcaacaaaaccatcaaaacaccagcacatcctgcatccagccgctaagaacacagcgcaagatatattaacacagataatatcaagcaagtaacagatgcagccagtaatctcacaagagccaacatgagactccgatattaaccattgacacgtgaaacacattaaggtttgataaataaaaagatctccagctggagtgtgacaccacatagtctctgaggactgtctgggactctgggtttatttattgaccaacattacagataagaaagcgcacagcacaaacaaactcgaagcactcatgacgcgaactggaaatactcatgacgaacgaaatactgaaaagacgataaggcgaagtaggcgatgattgggaggagattcggcgcatcactcttcctcagattcagaatccgcgctctggagccactccacgaacggcttggcattcttcaccacctgggactccttgccaccagcaacagattcattataccactgagttatcacttcttcatccaggacgtccccatcatacagggccttgagaacaatcggcacctccttcacagcttcggggcttgacttggcgccgaaggccaccagcgcttgcagcaggaccatctgggaggcttcatcaggcacagcagcagcgaggaatttcttcttcttcacaacctccttggcgaatcctttgccgaggccgccaaagagtgcatcaaaaagagcattcatagcatcctggggtggcagcgctgaggaagtcatcagacccttgagctgaacagcattggcacccttgctcaagttatccttcatctccttgaccagatcatcataaggactgcttttagcctcttcaaccacatgttttgtacttccgttggaggcaccctccttgtgtgaggcctcatgcttcttcttcttctcaggttcttcagtggacagcattaccatctcagcagttgcagcgctcagttgttcctgcatgcgctgttttgcagcctccaacgaagtgtcagtctgccactggacatcatcatcatcatcctcatctgcagccacattgtcaccatcatggctgcgagttggtgaatttgaatgatcctcatcagagccagcagcagccttcttcttcccagcaccacttttagaggaggtactttccttggatgcacctttcttctttgcttccttctttagcttcttcatctcctcatcagcagcctcaccttcctttagacgctccttctcagctctcctcattgccttcttgtctttcccagcacccttcttctgttcaggtggattcttcaggataaaagttgtgagcttgtccctcatgtcaacatctgacacaaaaccacaggcagcacacttcagtgtaatcatctgggtcttggagattaggacctcagtctcagggttgccacatccatagcattggacatacttcttgatgaagttctcaaggagaccagccagcttagcagtatcatgtgccccattaaccaaggaaataccagtcttctcatcaaatttagactgtgcaccaagctcacatccaaagtactttgttgtgtaggaagcaggcctggctagggcttttgctatatccaccatgttcacaatgttagtcttgatgccattgccacggccttctattttggtgatcatcctgggcatcttatacctgtagaaggcatcatcacggtttgaagcaccaatgttttgcagagccatcttggattaattttctttcgctgagataatatcagaagcaccaagagccaaaaggaacagtagtcttgtatccttgaaatgaatcagcagaaaccagtgcgcagcagggccttccaagcgagagcttgtgcctttttctcgttgtccgagaatattctccaagcaatccaactgatcccaagtaaagcaagtcttgttcagacataaaagaagcttcaacttttagaccctccactttgtcagattgcagcgaaactgatgttgcctcctgcatcacacgtcaacatcagattcttcattcaggggctgcaggaat

SEQ ID NO: 14052 - DNA, 2746 bp, Oryza sativa
tatttggtctgatgaacctccagaaatcaaggtgtttgtagttctttcagtgttagaaatgattgtaggtcatatacaaatcgattgaagttgggctctttcagaaaatgaaatggtggttaactgattgtctgagaacaacagttatataatatatttaccagaaccgctaactttcttctcattgtaaacccccgaatattttcttcaacctcaatttgatgtattcagtaattttggaaaaaaaaacacttatagttgttcatcattttgtgggagatttcaggaatgagcaatgtaggcgactactgtcttgttgaaatgctaatgctaaccttatatgatcaaatctttacaggtgactgtgccacaaggctctctttgcaacctgaatctgaaatttaaggcaggattacctccagacgcagtttacaacattataattgatccagagaacaaaagagttttcaaaaacatcaaggtatgtataagcaagttcctgaatagggtaacaggaaacatgaaggctcattcatcatgatattgtggcacttgcttgatttccctgatttggttactgataccaaatgagcagaggaattgctctagtatcttaaccggccaagtactcgtgagaaagttcttgttccaattttcaggaagtaatatcacggaaagtcgtgcttgatgaaggacaaaggcaaatagttgaagtggagcaggcagcaatatggagatttctctggtggtctggtgtcttgtcagttcatgtttttgtcgaccagaacagaacaaatcacactgtaaagacttgaaacattgctactagtctttgagaaacagctaagatacattctctgatatgtggcttcatgcaacaactattggcaggtaaagttcaagcaaggaagaacaggttttatgaagaaatttgaaggttgctggaaaatagagcctctatttgttgacaaggaagcatgccatcctttagacccatgcacattagaaaagtatgattcctgcaccaatggcacaggaagagttggatcttcaattaccttggatcagcttattgaacctgatatggtacccccgcctccgttttcatggtatctgagagggattaccacgaggacaactgagatgctggtcaatgatctgatagcggaaactgctcggctgcgaggtttggcaaataatgctattgacaagcaatatgttgagggaaagtgtgatactagtagagatcatctaacagaagagtgcaatgatattaaggaaagatggcgtcagagaagaaaaacaggacggcatggaaactcccttagattaactgctcaaggataaactaggcattttcgcttctggacaggatgcattttagggccaatttacctgtactccaatggtaggtggttttcattgtagaatttgatgaattgcagggtattcatattgatattttgtagatggctaataacatcatgtgactagtttgtggactgtttcacacgactctttcgtacagtaataatgtaaaatggatgttcagctgtgtacaattgatgaggtgaataattgcccagttaaaatgtctgctactgaacactgctcttccatttctaccatttatctgaagcacagttttttttaacgaaccggccagcgccaatttgttcaaaagaaaaaatatatgtgcatcagactgaagcaaaattgaacttacttgaacctcacgacagttcaaacatgataagtatgcctgacacaacatttttatatgtgacaatatgaaatcacaattttggtacctcttttcacgaaaaaacatatgctaaatcggtgactgaaaactgaagctagatagaacaacagataccatttcctgagcctgaagtcctgaaccaaactgacggcaaactcaagttcagttgacaacacaaaccagttcatcctttctccaaagctgcaagccaagaaaagccccaaattccttacctttcttgacatgctcaaggcaacagcaaacaccttccttgcattgcatgagacttatgaacctaaaactctacatagcttcatggacagttcaaacaccttcgatcactcgatcgagctcgtcgaccccagccatgtccggccagcctccgccgccgccgtcaccggcgatgccgtcgcagccgcagccgtttcgcttctggctcccgtataggagcaatgtggcgtcatcctctcggcagcaaccgcggccatcgtcagggacggcgccggcgccgccgccaccaactccggcagatcgtccgccgagagcgtcaccggcgccggcgcgggcaatgggggaagatatctctgtccatggtgagtcgtccgatgaatcggacacgatccctgtccagagcgtggactcgccgcggtggcgcggagctaggcggcggccgtccgtgccggacatggagctgacgctctcgaggtcgccacgcgccggcgaggaacggaccccgcgcgccggcggcgaaggcggcgaaggcaacgacaccaagatctccatctccgggttcccgaggtcgcgcctgttcgacggcgcgcgcgcgccgtaccggcgggagatcgaggacgggctcaagagccttgccacccgcggccgcgaggcgccggcggcgagcgcggacggcgtccaggggtaccgcgtcatcacgctggccggccacaacgtcggcgcgagcatggttctcggcggcggcggcgg

SEQ ID NO: 14053 - DNA, 521 bp, Oryza sativa
aattcctatgttcttgtttggatgggctcagtttggcccatataaactgatgggccgagattgaagcccatcaagcaaggcctgggtggggtaaggcgtgtgtgcatacttgtacaactgcgtcgttgaacgtaacgctccccgacgacgtctcctcgacgattcggcgcctcagtgcggcgtttttggtgaacgcgtagacggcgagcggcctcggccgcgctctcacgaaggcgatgctgtcctctatcttcttcacctgtgagaaaggtagccgtttcatttgatctgtctagtggtactccgctctgcatagaggaggatgttaagaactttttaatttaccgtgatgatgggcaggagagggccgaaaatctcctctgtcatgatcgcggagtcgagtgggggattcagcagaatcgtgggctcgatgcacctgaaattttttcgtgagttggtcaactttgggttgtcttaccgacagattgatcaacgacacgcagttttgttcagaatttaca

SEQ ID NO: 14054 - DNA, 693 bp, Oryza sativa
atctagagcaacatattgaacttcagtttttatgacaacatatttttcccaaccaatatctccagaacctgacaaaaggagttggttgtgatgacaaggcctttacccatcgcatccatttcaaaccatttttttaaggatcatttgtatatcgtcacattctccgcagatttcatattactagtgtgaacaatgttgcaagttttccacatgtaaggatagaacaaaatagcacatttattttaaaatccattgcaaagcttttggtgatatgatatcacaagtatctaagtagtatgggagactcaatttaggcagcagtaaacttgggctttgattaaccttaccctgaacagctgctccaagtgcaacaacctcatcagggtttacagtcacattgggggtcctttccagtcattttcttcacaagatcctgcgcagctggaattttggtggagccaccgacagggatcacctcatctatgtctttaaatgacaactttgcatctctgagggcattgtccacaggggtcctcaacctagaagacagtggataaaacattagcagtgtatcattttttttctatttttgagttatcttaatagaactaattcatcatacatacagtagttgtcaagtgcatatacaaaaaaatacatgcatgcccttggttaaatgagcattaattagca

SEQ ID NO: 14055 - DNA, 611 bp, Oryza sativa
aagaaaaattatcaatttaatacactttacttctttcccaactactgttgagtgaccacgtctttcgacgtatgcggtagtcgtttcgacaacagctggcgccgaccatggggatttccgagcgaaaccactgagagcaaatgccaccgaaaagggtcgtgaaggagaaggttacaaggcgaaaggaaagcgaagccgaggtggagatggtcgccgaagagggagcagagccttcggcgccagttgccgaagatggaggagcattgtctgcctccgcacctgcaccatcactactgccttcggctcctgccacctctgcgcaggtgctgaatgcggctgacatggcgaaggcagtcgcggcggtaagggcactccagaccaggcggagatcctttcgacaagccaactgctggtgctccaagccgctccgtcgcagctggcagcagcctcgattgcgctcgccgctgtacaagcccaagtcaacccagaccccgaaacacaaatcgaagccgacatggaagccatgcgacagaacatgacacgacttccagacatgctttggcaaatgcaagaacagcatcaggcgtatcaggcggcgaggcggtccaagg

SEQ ID NO: 14056 - DNA, 647 bp, Oryza sativa
attcccacacggaaaggaataccatttaggttgtatttatcggctggtgaaaagtcaatcggctcagttctgattcaagaattggaagggaaggagcgagttgtgttttatcttaatcgacggctcttggatgctgagactcggtattcccctatggagaagttatgcttgtgcctttatttttcgtgtacgaggttgaggcattatctattatctaatgagtgcactgttatatgcaaagccgatgtagtcagatatatgctgtcgactccaatattaaagggatgaattggaaagtggatattttctttgactgagtttgatcttcggtatgaatcaccgaaggcgattaagggacaagctatagccgattttattgtggaacatcatgatgattcaatcggctcggttgagatagcaccgtggactttattctttgacggatcggtacgcactgatggttgtggcatcgacttagttataatttcccctaggggggcatgtttttgagtttgcttatactattaaaccatatgcgactaataatcaagctgaatgtgaggcagtgcttaaggggttgcaattactcaaggaagttgaagccgatactattgaaatcatgggggattctttgctagtaatcagcc

SEQ ID NO: 14057 - DNA, 541 bp, Oryza sativa
actacgacactttatgcgtaatttctgtgtgctgatcgatgaaccaactgctgtctccgcgttactctacgcatgcatgcttttatataaacatgcatatggcgcgcaattgttttcgacgattactatatcgcatgattcttctgcatctcctgaaactagcatgggttctgaggcgcctgaccctgccgttgctgcatccgtgcctctcgtccgcctgaaccacgtatgctttcagtgcacgtcggtggaaaagtacgtcgacttataccgccgagtgcttggcttcgagctcatcaagcggccggagtccctgaacttcaatggagcttggtgagtaattaattaacctacattacccctgaagcgttcagcacaaaaggaccgatcaagatgtaatctgcaatgcatgcaacttcgtagttagaaatttgaaccagttgtcgagctgcatacacaatgcctgatcatttcagtgtgaaatgctgcttgttacaggctatacaagtacgggatgggaatacatctgctgcagcggggc

SEQ ID NO: 14058 - DNA, 508 bp, Oryza sativa
gttttcttcttttttttttcctttttcttttatacaaagtccttcctggagactggaacgtgtcttctacagggatgttttatgaggcttcaggattcgtcatcgctgttggagcccaccgaagaggatgatgacagtgaacttggagcctgatactgcacctgagcctgagactgttgctgcgcctggttcctgaagctttgaggatgaagcgggggacgatgtcgaggcgggtgcgaggagctcttctggttgtgactcatgttgatgactgctgttatgatgtccattattgtggggagaaacccagatgtaatagtcagaaaacctgagagctgcatatgaaagaacatccttgagatttagtttgaatacatgccgtgtaattcagttgaactgaaatgcactagatagaaatttaagaccagtttggctctgtatatccacttgtggatatagaggccggatttttatccattatctaaaataaaaatttaaaagcagaatt

SEQ ID NO: 14059 - DNA, 578 bp, Oryza sativa
ttgatgctcctgggttctcattcaaatccaaagggaaatttcagtcatttccttttcatcttcaactatcatattgtgaagaataatacaagcttacattatgttgatagcatcacccctctgtcacatccgggctggacgacatacgatgttaaagtgagactgcaacacaccaaaggctcgctcaacatccttcctctcttcctcttgacgggctgcatataatatatcttcatctgtctgagaaagttgtattgtcttcacgaatgttttccactcaggataaattccatcagcaaggtagtaccccgtgttatattggttcccatttacagtaaactgcacacgaggagcttcccctatcaatgcatcaatgaacaacggtgacttgtttaacacattgatgtcgttattggatcctgtagtaccaaaaaaaagcatgctatatgcgaaggtctttcgatgctaccgcttagaggatcatggtaggaactcccttgtcaccacgagtaaattggccgcgccgagagaccgggcaattttttcatgcccaatgcatgcagtctatacttcctaac

SEQ ID NO: 14060 - DNA, 603 bp, Oryza sativa
gttcatgggttcggaagaaatgctattaacgtggagattgtggtagggagcatgctggtaagggagttttccttcctcggatacctctatgccttttagatgatgaaatgttcccgtttcactttaagagaaagttgtttccaattagactatgtttcgaattgacgatcaataaggcataaggacaaacaattccaaatgcaggcgtctacctcccggagccggtgttctctcatggtcagctctacgtcacgttgtctagagcaacttcaggaacaaacatcaagattctctcatgcaggacaaagagaggaagaaaaacaaacggtccaaacatactacaacgtgcacaaagaatattgtgtacaaggatgtcctcatagcatagacgaggtatatctagtgtgcacaaagaatattgtgtactaactaattatctttgcaatttttatattaactgttgaaatcattacctactggaatatcagtcaaacttatttcatatttcatttaccgtacacaatggtttatcacatgcagttaaacatgatagatccggcatgcatttatcacattctttttttttcaattattgttataact

SEQ ID NO: 14061 - DNA, 2488 bp, Oryza sativa
ccttgcccaccgaaagggggggacgactgagagaaaacctgaactctaggagaagaagggcaagagagctctccggagtgaagggatccttgtaacacttaatcataatcccaaacacaggagtagggtattacgctccacagcggcccgaacctgtataactcgattgtgtgtaagatagccaggagccttagtggcggatacgtgatttctgagaagcgagcctcttcccccggccaaactcacgaaagggggatctcacgacctcccgctatcgagggccttccctcgacacatagatttatcaatattgtacaaattgtgcctgcatcatcatcaaaatacaatgtcaatcagtcttttcatcattagagttattggatccagtcggcttgaggtcggtctcttggaatctctcgactacatcggtggctatcttgtcaggagctttttgtgatcactaatgaggtcgagggcggcttcttcacttgtcccgtctgcaaagccatcgacagcatcaatgtcaatctttgggtacaaggacttggtcatcgccaatgccagactcgcccccatacttccggcctctttgatgttcttaaaatatgtatccgaaccggttcttagcttgtcgaagatttcaacagcatcaaacgaactcggaccactgttattgaaaaacatggcttgaataagtggtgtagcggcattggcgacctcatctctagccccttcaagcttcttgattttgttgaccaagacgttgaattgagcctgggatttgattttgcgatctgcacaaatggtctatgtcgacgaatgaatgcaaagataagaaaggttttgaagtttcagctatatgtaccttcgacatctttcagagccgagtctctttgtttggctagttcgcccttgtctttttccagagctttgattcgtttttctagctcggatatcttggcagcttgcactgtgttgttttctactgtttaattacacataggtggcaacttcaaacaagtcagacaagagtaaggattacctttggatgaaccgcttagctcaatgttgaaatcttgaagctcggtgatccggtccctgagatcatgctcattttttttttggcaagctccttgactccatgaagctgggctctggttgcgtctagggttccgagatgggggaccagcttttcaagtgttgtggtttttgcttcattcctaaggtggattctctgcattataaattcatcttcattcagtaaagtggccgacaggatgggtaaagctatgagcaaagagactacatttacgagacgagtagcttggttaagcgttttggccagcaaagatatttcttcgtcttctttatgtttatgtatcacaattccttgtggctgcatttcatcatcccaccatttgactaatatgggtgggcgagagtcttcagccgaccgtatccgaaggacctcctcttcgtcgccaatcattgggccttatacattcatgaataatggtgaagcaattgaaaaaagtttgtcggatcaagacagatttggaggattagtttacctgttataatttccggtcggggacaagtaggtccttgcatcctgacaggagagttagttccagggtcagcaccaatgtccgtcctgtgagggctgttggcttgagtttccacttctgggatatttttattttgttttgtacccgactggtttccagtcgggggctcctgatcagcaccaacttcagcttcagccgactgattcccagtcgggggctcgttgctggtatctacattgccggatgccggttgattattacccggacggcagtcggcccagtttctgctgaaggaccagtctccgtgccaatcggcgtggggtcttttccagagggatctatgtcagatggtttcctacaaatttgagatatgctatcagctttgcttcaatagtgagtgactagcgaaacaggggaaattgttagatgacacatacctggatgacttccttatttttggcatgggatgactggatgttttcttcttcggattggcttgctttggctgtttctcagtcccctcttttttgcctgtcttttttgcgtcgtcaccttcatcgtcacttgaaaccaacttcctctcatgagaatctggctgattagttgacctcgaggggttgggttggacatccgactggatcttctgccctccactagcttggctagtgtgccggcgaggtgagcggcgttgaataatcggaggatcagatttcatcaaagcgaattcctgtgcacggtattccaagtttttcagtcgaccttacagaagatacaagtatgatttgagaaaggctgaggtgtataatacgtaccggtggaggagggttgaaggcgttgtatggcacaactggcattaagtgtgaatagctgaccacgatggcattcgagaagatcttgtgcattctctcctacatagtttt

SEQ ID NO: 14062 - DNA, 13648 bp, Oryza sativa
tgtggactatggaattggggtttaggtgatgcaaactgatcccatagaaatccaaaatctcccggaagaaacttgaagtcgaaagagaagacccgccataaaagaaatgggagaacaccaccacctcgtgtgtcgggggttggaaacgcttcgccgaatgctggacgccacccgatgatctctttcgccggaagaactctcgccactttccccaaaaacaaagaagtttcgcactgtagcagagaatggggaaagtggcgagagtttcggcggggaagacgaagcgatgctttgtttttggtgttatttcattagggtttcgggagtactaatgggcctaggcctaaacagtactttagcccaatttggttatcggcgtggctaagttgtgatccttagggacttgggcatttttgcttcggcaatacttgctcacaacaatatagcccaatgttgctaaaatcctttttgacgcagttaaataattctttggaattactacgatgcaaataaaaaggtgcccaacggaaaagtgttatactaattttgtaagcctttttaggctgcaaaagctgtttgggttttgttgagatgactggtttttgaatggtcattctctcggcatgttatatgcttattttttattatggcgtgagtcatagcctaggctatttggattcgtcaattgtcatgatttaaaccacatttgatggatctttttgagagtttttactcggattcttgtcatatgtgttgatttatggacctttagagtatttcttactcgggtttctttatatcttcatttttggtatattaaagctaaaacagtcggctagatgttttacacagcgtcgcatatgcttagctgtatgatacttttgatgattcagttgaaagaccactcggttggatgtaatttgtaccttgactatatgtttagtttttaactaatcacatagtcgggggctacagctaattaggtgcatctagtcgatgcacctaacttcttttattttcagcccttcacagtctttgattttagtactcgggaggccagagcagaaggagttggatcactcggattattgcttcggattacgagagaagactatttcgtcgactgtaaaggtctcaggggctactatggagattatggataccccatacctacacggcatgtataatccgattgggtatagggagccatgtatagatagaatatctttaatgaggcccgggttaagttccaaacttgtgtgttaaggaagtacccaggatcctagttggttacgattaggtcatatctgtaactacctattccgttagggatatgggctgtattttgtaatacggactccttctcctatataaggaggggtccgggtgcctcttgggatacgagattctactctcagatcatacgatcaataatacactcggcggatcaaaccccagacaggagtagggtatcacttcttattaagaatgcctgaacctgtataaacttccttgtctccaaacccatccacttttctagcttgatagccacccccttttagtattgccgaaatcttgtttcgacaccacccacggcgcgctctgcaccgtcgtcgccacgccggccacggtggcgagggtgtgccccaccgttgactcggcccggcggtccgcctcaccgagttcccgctcgacaacgccacctcctcctccacgctcgcccgacgtgccttgtggtggacttctgccacccgtgggcatcggagctcgccgccggcctcgccgtcccgcggctcaccttcttcagcatgtgtgccttctgcctcctctgccagcacaacgtcgagaggttcggcgcctacgacggcgtcgccgacgacaatgcgccggtggtcgtgcctggcttggcgaggaggatcgaggtcacgcgggcgcaggccccgggcttcttccgcgtccccgggtgggacaagttcgccgacgacgtggagcgcaggtgttgggcggcgatggcgcggcgcggccgtgcttgagcgctggccggctcggcgcggtgtggagcacagcggcaaggtggaacggagggaggcggcatgggaggaagaaggaggtcctccagcagccactggtgccgagtaggccgcgcgtgctctgggcgtcgccgccgtcaccgagcaagtcgcgaccgggaggaagaagaaggagggagaaagaaaagaaagagaggaagacagatggagagctgacatgtgggcccaagggcatttttgacatttcacgtgatttctctcctctttaaccggaaattattattttaatcggcgcggtgtccataggcaaattaccatgtttatggagtgttttcgcccaaatatgagtttggacagtgtcctagggctaaaaccacatataagcagtgccatgtagcaaaattttcccaatttaaatctgggcactaccattgattaggtcacaatccaaacctacgagtttactattccaataaccaaaatattggtatggcccagttttgcagttttggtagcaaaccaaaacggccctgtattcttctcgtcgagactccaaactacaatttcattttcctttagcaccgctttccaaagtaaacgatgcattttattaaaaaaaaaatatatatatatagaagtatcttaaaaaaagaaataaattaattttaaaatttataatagctaatacttaattaatgatgaattaatgagccgctctgttttacatggtgctaatatgctgctctaatatgaacttacaaacaggcactggctcactctctatctccagtttttcagccacgggctctagatattctatatatttaaatatgaaatatggtgatttttgttttccaaaatatttaacttcgcacatgaggcagtggatttgtctcaaactcccatgtagtctacaatgaactatttgtcccatttggatttgtggacaattttttgggttttcaatgaactatttggatttgtggacaatcttttggattttcgatttacaggtatttatttgaaatggacaggtgccaagctaatactacaaaatatcgccaatcctttcttaaatctcaaaaggtccatggagaacaggctgctaaattgcaagtttgctacagacgacaaggctgtacagtgatgccaggtcagtaagggctgcagacgacagtgatatacagtgactaaaactcaactttactcttcagttgtcaatagctacagagctcatctctcttcatcagttacttgtcaacatctaccacaagtgaaaaagcctgaggcgccctactggtcacaaccattgaccacttcatagttcatagtactagtttagtgtcatacaaggaattttttataagtaaatttcatccaacgcaataaatcatatttaatctttaactaggactataggagatgttacatcagatccagaataaacgtttttttttcatccattggtgcaagcatgtctttttgttcccaataacatggtgaaacaaaaggtatcttccctaaggagtgtataagccactggcctctaatgtttgcgctaaattcttgggtgaagttgatgttttactctttcgatgtaatgaccagcaagcccagagcgccgatgagcaggtactgcaacaacagataacaaatgtcagccatactctcagcaatagatcgattaagctacaaataatattctcaatttgagttatagtctatctagggaatagataactgacagacctacctagtatctatttacaatattggaaataataatcgaggactaaaacttttatcaacatcttacaaactattcccacatggataatggattagagtaaccgtagtttaatctccaggttagtaaacaaggaagagcatacctttataaatggtttctcagtcatgatgattgtaacccacccgacatatggaagaaagctgcagacagcagaaaaataaggttggccaagttaattttcaccaggaatgacaatagattaatgttctcaaattgagcatactgaccctacagcccgtcccataatgtgatgttggtgaagccaaagctgcccatgtgcataaagaagacggtcgtccccaaaattattatcacctgagaagcagtttactagttaagacaaaacattcattggcacccattgtacattaaacatttctagatgtccattgcaaccagcactacacaaattgaccagaaagagaaacatatggagcaaaaggaaatatggttaatacctttcgtgaggatatcaacttcagcactttcctcgcgttcatggacctatacacagataagagtaaactcaaatgaatacccaggaaaaataacgaaataaaaggtgacttaacatcaactaataaaaaattagattgattgacgaaaacttcagagttcattaccttaatcacacggtgaacaattggaatttcacggccctacatacggtacaaccaaatgttaaaattaatgatttcaggagcatatgtaagcatgatttatagggccaattgataaattcatgattcagcgagtaatgtacagataataagttacaatgactcagtaagacttacatcaatgttgaaaacaactatctctcctgtgcggataggatctttgctcatgtgtagaaaaaggatatcgccctgcaaagaagataatacatcattcaggtttactagtgtgaaagatgatcaaaggatgcaaaaatgaaacatggagaaaacactggggactaaatagacaatattcactaacacattatcagattgacgtaacattatcctttaaaagtgatgactgggaaataacaagttaaagatggaaggaagggaaaaggacaaggcagcaactagttacaaactaaccgaactatgaaacggaatctactcttatgcaaaagaactatacaatgtgtattcttatcctcggtgttttgttccaaactgcatttcagaagaggagggaaggtcgactccaaaggtcttttgctttagaaaaaactagagattggcttttatcacgtgtttggaagacttggaagatcgaactaatggaattaaatgggtgctagagaaatcaggtgaattcacagttagctccttgcgcagaactcaatttgggttgagtaaaatgtcagctacaagatctctggaaagctaaaattcctttgattattatgtttttatttagttaatacagacaaaatcaaaaagaaaaagagaacgtcaatcaatgccagaccagttctccatgtggtggattccttggcctaaacttaccacaagcactatcgagtaagctaccaaaaggtggtgcataagaaatgggtggctcggataaatatgctctgtgtggcttgatacaagatgggaattgtgtcttcttaggtatattatggcttcagtgcagcatcaatgaaaatgaagcccttggttaggagtgcagtcctatggcttggaaaagttatccacatctgggttcaaatgaagattgatcgagaggctgggccctggatcttaggcttggccacagttgtgtggcctgtttggttaccaacaaataaaatggagatagaaggaaaatggatcaggcagcctgttgtggttatttccaggtccaggatggttcttccatgcagcaaaggaatgtgtttttaaagctggtgatggatagactgcggcattcgcgagaaaattaagaaataactctgttagcctttcttctattttgctctcactatatctgccactttacagtccattactgtgcattttggatgatatattttgcaccctggtttctctcatttctgtgtgtttccatttccctgctctggtgaccctaaactatgttgcttcaatataaagtggagcaagtgcattttattcgaaaaaagcagatatgcaaaatcttaacaggacaagataggcgaataattatgtccacaggacaagacgaggataaatgtaattaaaataagcaaatttcatagttttgttaggtggaaactaacccttttaaatccaggctccatgctaccagaaaggaccacaaccactggggactcgctccccgttgcaaccatcaatcccttccatatgatcagtgccgaggtaacaatcatacctgcaaagtaaaaaacatctcaataacgagtccccaaccaaagagacaacaaatccaagagcactaaaacctcaaacaaacaaacaaaaaagcagattaactgataaaacccaatacccttcttttcccctccctaaatatcacaactttacaatctaatcttaagcagggaacagtattattatttacaactagctctaacccctaagtttaaaacaatcatctacaggcattcaccaaagtcacaacccacattacacgagagcagaaaaatcacaatccattcctctaaggctttcatatacaatgcagatattcctcgttttttctttcaagaaaaggaaaaccttaataacctcacaggaacagatcaagaacccctaaagcctccctccccaaatcctgcaggcgtaacctcccaaacgcttcaaagaaccgaagctttcgcataatcgcgcggtaaatccatcactacctttgaaatcaagaactacgcggcgccccgcaacccactgatctgaacgggaaggactccgaaaagaaaaactctaaaaccgacgaacataatcaggggatgagatgaagggcgtcaccgaggctgatgatttgcgcgaggacttggcggatctgtatcgagcggatcgactccaccgtatcgccgatgaatcccatctctctcgggcctcggctcccggcgcccggcggcgaactcaacgctgggagaagaaaggaaaacaaatctgcgtgtactgcgttctgttttttttcggacagcaccccgcgaatggtcggtagttacgttcatgcccctctcgttgggatcacgtcactgggcttatttctgatcgacggatgtggatcggacggctagggaaatggtgcggcaatgaaatggcagattgtgctcacagagtttggatatattctcgtgtaatgtgccattggcccgttcgtttctaatgaaagtggaggataaacttttgaattaaaatgatacgttttttaaatagctaaacggtacgtttcgcgtgaaaactttctgtatgaaagttattttaaaatattagattaatccattttttaagtttgtaataattaaatcacacgtttttaacatctcattttacgtgaaacaaaaatactccatccgtcctaaaatataagtatttttagctatgaatctggataagtgtgtgtctatatttataactaaaagttactgtattttgggacgcaagtagtatgaaattaacggtaggaaatgaaatgatatgcgggagaagatgaatgttaccgttgatcatagtctctcctatagatacgtcatttatatcagtacataaccaaaattatagtgtagctattaattttcttatagatgatgtgacacacgtcaccagtaactcgtggtactaataaacctgctctaagctgtactacactactatatattcttatgattatgattagagagctactataggaacaatattttacgtacgaagctcgtcaatgtaacgttttcgacggaagccagtcacgttgtccgcaacaagtaacgtttaccatccgtgagcaatcgtacgagagaatcaaacataacaatcgtacgtgcgattatgacattttttaaaaaatgcgagtttaatagtatgttctttctcatgagttcccaactcatctcactctttttttgcgtgcacaattttcaaactactaaatggtgcgcgtttaaaaaagtttatataaaaaattgttttaaaaaaatcatattaatttgtttttaaaattttttagctaatacttaattaatcctgagattgagagtttacacgagaaaattgatggtgagattaagatgggaatttaatttttaatcccagtatcttgtttggtagaggtgatggaaattaatagggagtttagttagagattagttcattaatgaaaacggatggctgagttttgtttaggcaaagtaaaggaggaattccccccaattaccatctcctacctaagtattgaaaaggagagagttcctctcacaattccccatccccattccgcaaaaatttccatgtatcccaaccaaacaaagcagttaataggctcatctttctaaactcccaatcccttctaaaaactccctccaaccaaacggaccgtttgttccgttttaagtgaggaggattggcaccggggtgtccttgttcttgcttagcgcaatcaacaagcgctaagccgctaaatgccgttagtgtaatcgcatataatcggactgcgatctcctcccctctccgggccccgtcggtggtggtggtggtcgtcgccgtcgtggtggggtggccgggtggggatcctaccagtcaatcttaccggcggcacgcgcatgctcattgacttatcctcctcgaagatattcctctcacttcgctgcaatggattcggatagtgccagtccattctgccgttctgggaagaatctagagtatcaagtaggagcagaggctgggccgcaccatggccggagtaggggaggtgctcacgtcgatagtcctcagggaggtggccaggaagctgggctccgccgccagggaccaggtcacggcgcagtggaacttcaccagggacctggacgggatgcggacgacgctggagtccgtcaacgcgctgctccggctgctccgagacgcggagcagcggtcggcgctggaggatgttaaagtatatagtagttagagttatattaggatagaattggtttgtttagattcctttcatatctgtaatcctttcttatctcctctctatgtactcttatatatttcgacccctgaggctcaatacaaatgtgtcccacgttatgcagtattcctctctccctatactatccaatatggtatcagagcgggcgatctagcgccgctctcacgcttccgccgccgctgcccccgagagtagcgatctcccgggggtggccacccattttttcttttttcttcctcgtcgctgtcgtcgtcgtcttggagagatcgatctccacgtctgttcttcgtctaatctagtcatcgtcaagcagctgcaacagattgcatctcctctgccgacctccgtgcgtggcgctcttgtatcgccgtcaggccgcccgtcgtcgacttcatcttcagcatctgttctgctccgccggcctcatcgacggggccctgccgtcgtcgtcgcctccactggccgacgatcgcgccccgatggacagacggatggcgcagctcggctccacctctggcaccggtctccccctgcaacccccgactcctccatctccagcaccaccgtcgaccggggggacaagctcccagcgctgcttctccgccgccggtcctcgcctaccacctcgcctgtcctgccggctgccgggaccatcctccgccggctcaccggacgtccgccgctcgggaggagcccgtgcggctttggctcaagcgcctcaagggcggcctacgatatctccgacatgctcgacgaattccagtccatcgagccggacgcaaggaaggtaagctcctgacaaaccaaattaacttgtcctgggtccgaccaagttagagtaggaacatttttcccaatttttgtagtattacgttgtgggattatggcacatcactttttttttggtaaatctggtgtatcggatagatgaaacatggggctaaaagtttgtgggatgccataaatttgatcttgaaccaaacactatgtacaaaagagctgatgttggagtaacatataggcattgtttagttcgcgaaaagaaaatttttgggtgtcacatcggatgtttgaccagatgtcggaaggggtttttggacacgaatatcacctaacgatttatggtgtaaacaatagagtcgccaaaatcgatagatcaaaatcggctagtgaaaccgatttcgagattaattcactttcgcggaatcacacgactaatttacaagcaaattagcaaagaggataaatatcgtacttacgtgacgacgaacgactagttttcgagcaaactagcaaaggataatcttctcgctttcgtggagaagcatgaccgtttttcagcgcaaaatggcaaagatcaaccaaattctagggttgctagaactcagccatgaaaatgaaatagaaaagaactaaagagaaatagagatctaccctatagttcaacaaatactttcactcattcactcatcactcattttttcattcctcatgcaatggtcaggattgtctcggtgaaatcccaacggtccagatcgctcccacctcccatctctcaaccgcgccctcctctccgccccctctctccactctcaagccccgccaccccctccccgcgcccaaacccccgtctacccctaatccctcctgtcctctccctctcacgcgccgccacaccgatccctccgccgcaatcgcatccgtgctcggccaaatcggcgccaccgccgtcgctgctgccctcgactgccgccactcggccgtcgtcgcgtccgttgtctcgccgccaccgatgactgatccccgccgccggctcgccctcaaccgatccccaacactgtcgtccaggattcgcctgagccctcgactgctgccactccgccgtcgtcgcgtccgtcgtctcgccgccaccgatccccgcgccaccgccgtcgccgtcgtcgcgtccgtcatatcgccgccaccgatccccgccgccggctcgccctcaaccgatccccatctccgtcgtcgcatccgtcgttgtccaggattcacgttgccgccgacgccttccgtcagctggtcgccgccgacaccttccgcgcagatctcctccacgcctccctcaggtcgttgccggtgtggatcaggactcaggaggccagcctcgacacactgcgctacacagccgccggcctttgctgctcctgttgcatggatctagcggtgggatttgcaatagggacggcgatgtgccctgctcgtgctggtggcggaggtatgagcattggggaagcggctgacacggccacgtactcccaaagaccggccgccgaccctgcatcggcgcctcaatggccagccccacagtcccctccccccatctaactggtaaaggttcctcttcctcagttttggcgagttattcacctctccgccttttcgttcatttgccaatccacgactgtttttcagcgtaaaatggtaaagatcaaccaaattctagggttgttagaactcagccataaaaataaaatagaaaagaactaaaaagaaaaaaagatgaatagtagattgataaaattgtccggggttctcatctctgatcatccgtgaccagcatatatatatatatatatatatatatatgccgtcgtacacatgaattaaccggtcccacacaaaaataggaaagttgaaccgaaaggaaacaaactaataaaacagaaataatatctttatctttgcagccacccgcgctaatcatgccttgtcatctgtgaactgccgcctcagccgcacaccaacgcaagccaatacggctcctgtgcatgaggagtaatgcagcacgccaaatttcttctccactgcatgtatgtgatcaaatcaatccagtatgtacagaatgcacagcagtaactcctcggtcgtagcagcacatgcatcaccatgccgatccaaacactgcagctccccagcaactcgtacacctccaggtgcaacacaaattcctgcgcatatatcaagctagctaattcttaaggaaaccacctaacgattgcaccaactattctaaataatctggcccgctcaaatgaaatcaaccatgagccaaattatggcgtaaacacatctcctctgccgacctccgtgcgcggcgctcttgtatcgccgtcaggccgcccgtcgttggcttcatcttcagcatccgttctgctccgccggcctcaccgacggggccatgccgtcgtcgtcgcctccactggccgacgatcgcgccccgatggacagacggatggcgcagctcggctccacctctggcaccggtctccccctgcaacccccgactcctccgtctacagcaccaccgtcgaccgggggggacgagctcccggcgctgcttctccgccgccggtcctcgcctaccacctcgcctgtcttgccggctgccgggaccatcctccgccggctcaccggacgttcgccgctcgggaggagcctgtgcggctttggctcaagcgcctcaagggcggcctacgatatctccgatatgctcgacgaattccagtccaccgagccggacgcagggaaggtaaactcctgacaaaccaaattaacttgtcctgggtctgaccaagttggagtaggaacattttgcccaatttttgtagtattacgttgtgggattatggcacatcactttttttttttggtaaatctggtgtatcggatagatgaaacatggggctaaaagtttgtgggatgccataaatttgatcttgaaccaaacactatgtacaaaagagctgatgttggagtaacatataggcattgtttagttcgcgaaaagaaaatttttggatgtcacatcggatgtttgaccagatgtcggaaggggtttttggacacgaataaaaaaactaacttcataactcgcctggaaactgcgagacgaatcttttgagcctaattaagccatcattagcacatgtgggcaccgtagcacctatggctaatcatgaactaattaggctcaaaagattcgtctcgcgatttctatgcaaactgtgcaattagtttttgtttttatctatatttgatgctctatacatgtgtctaaagattcgatgtgacatttttgggaaaaaaatttgggaactaaaccaggccatactctctccgtctcataaaaaaataaggccatgctctctccgtctcataagaaaccaacctattactagatgtaatacatcttaatacaataaatctggatgtgcctatgtccagatttattctactagaatgtgtcatatccaatcatagattcgttttttatgggacggagggagggagtatattggtacagaggaatttgtagtacggtttatctaacttggttgcaacattaagtcaacgacctgttgtgtatatctgagatccagtaaccaattttcaaaaccattttacataatcttcttgcactgaactacttcttcaatgtcgtcaaagtgaacaatcctgtgttcgttaacagttggccaggtttccatcaatataaattgtagcttgtgacttttcactaattctcacgtatattaataaatcaaatgaaatttattgcagaaaaagggagtgttccacaaacttgcaactgcacctagcaggtttcctatggctagtaagatgaagaggatgagaaagggggtgc

SEQ ID NO: 14063 - DNA, 1331 bp, Oryza sativa
cctatttatgggattggaggcattggtaaaacaacgttggcacacatggtttttgatgacagccatttcacaaagtacgatttccatgcataggtccatgtgtctcagacctttgatttggataaaatagtgaacacaataatttcacatgttgcatatccagaaaaggagagctttatttcagatattcagttgatgagaaaacgccttgccggtctactagaaggccgaaggattttgattgttttagataacatatgggagagcgaccaatttaagctggacaatttgaagattatgttaaatgttggcaagaagggcagtgaggtggatgtcatagttaccacacgcacagaagaaattgccaaaagaatttgcacagtgaaaccatacaagctagaaccattgaacgatgacatatgttgggctatcattaaaatatacagtgcctttgaaggtagaggtgataaacagcaggtggaggttatagggcaagagattgcaaccaagtgtggaggtatgcccttagcagctcgagcacttgggtacactttgtattccaaagcagttgacagatggctagcactgaacaacagtgaaatatggaacgaatgttcctctgaagaagcatctttaccacatcacttggtgcttccatccttgaagttaaactactacaacatgcaatcttatttgaggatgtgctttgcctattgtgccatctttccaaaaggtggcaatatcacaaaatacaatttgattcaccaatggattgctcttggtttcatcgagccatccatcacattctctgctgcatagcttgctgaggactacatagagcatctcttgggaatgtccttccttcaacattctaaatcatattcggtaagtaatcagatgtgcacttctctataaagaaacaaacctagttctttttttttttgaaacagtagacggtaggagatctaccggatatattagaagaagagagttgaccctgtttataaggaaaaccaggcccgaaaaccatacaactgcacagtttgctaaagggaaaccggcaaaaaccttacacagaagacacgaaaaagcctgcgacaaaactacgaaccgcagtagtgaccgaggggagagcaagaccctcaaggcgaagcctccaaggaggtgaacaacgacagaagccgctgccgacgcccgcccaaagaactaggctgggttttcacccaaagggagagaaagtccataaggcaacacctccaaggaggaaacggcgcccgcagacgtcgatgttgccgatcctggaagaccagacaaggctttcgcctaagact

SEQ ID NO: 14064 - DNA, 1340 bp, Oryza sativa
catccctagcgagctccccgccccaaaatcggcccccgcgcgccgttgctcgcgtgcgcgcgcccgcgtggtcgccgcccgtgccgcgcctgcgccgtctacgccgcccggccccgctgccctgccgcgcagccgctcggccccgcgagccagcgcgcgtgcccgagccgcgccgctcaaaccgccgcgccgcccgctgcttcccgcgcgcgcgtgccgtggtggccgaccgcctggtcgccgccgccgtcagcctctgccgcgtctgcccgcgcctgccgcccatgtcgtcgccccgctccaaaccgcgccgccgtcaccgccgtcgtcatcgcccggcccccgccactccgcgcgcaagctgccaagggacggaggcagagctcctcctccccctgctgcgtcgcccccgctccctcctccttttcccaaagaggcaagggacaagcccccttttctctccctcttttcccctttttcctcccgccggcgtcatcctcctccctcgtccctgtcgccgctttggccgcgaccgccgagcgctagccctctcctttgaccgccttaggtcggttcccaaaccgacattgtcgcccctataaacccaagcttccctctttcccttcctctcccattcgcctccacgccattgtcgccgcctcccgtgctctgttcgccgtcgccgttcgtcgttgcgcgtgtcggaggagccggcacgagcaaggacgcggaaggggactccgggcgcgccctccccctcctcttcctcggcccgagccggagagattactcccgcgccgtcggcctctcgtcactgcgcccgcccgcacggtagtgcatctccccgttctccctcctcgctccatctcctccccttagacctgggtagtagcatgagtagcctccccgtagctagccggcgccgccccgaccgttgccgccgctcgccgtgtgctcgccgccgtcgccgcccgagctcggaagcgccgctcgtcgccggcctcgctcggcgcagctctgcccaatccaacgctagcatcggattcccatagccgcgtagatgctctcgccgccgggaatcggcccctcgtgacctcgtcgctgtttcccccttctcccgctgccggttgccgccgccgcaattcgccgccgtcaagctccctccggcgaatccaagccgttggctcgtaattgttatatcatgtccccttgtaaccatctagttgcgcctcgatattcgtgcaccctgtgcgagtatcgacggtcgccttcaaacttaaaatctgaaaaacttcttgggtaaaacttgggttttacaaaaggcttggaaaacccaacac

SEQ ID NO: 14065 - DNA, 3690 bp, Oryza sativa
ttcctgcagcccgctgagttagattgtaaataggaagaagccgggacaatggcagatgtgtgtcgattataccgacctcaacaaatcctatcccaaagatcccttcggattacctcgcattgaccaggtggttgattcaatggccggctgcgagttactcagctttttggattgctactcgggatatcatcagatccgactaaaggagtccgactgcttgaagacttcattcatcacacccttcggggcctactgctacatcaccatgccttttggattaaagaacgcaggagcgacttatcaacgcatgatccagagatgcttttcaagtcagattggtcgcaacgttgaagcttatgttgatgatgtagttgtcaagaccaagcagaaggataatctgattgcggatctagaagagacctttgcgagcatccgcgctttcaggatgaagatgaatcctgaaaaatgcatcttcggagtaccgtcagggaagctgcttggctttatggtatcccatagggcatacaagccaacccggagaagatcaacgccatccttaacatgaaatcgccgagttcccagaaagatttccaaaagctgactgggtgcatggcggcgctcacccggtttgtctcacgactcggcgagcgggggatgccttttttcaagctgttgaagaaaaacgacagcttccagtggggacccgaagtgcaaaaaagcctttgaagacttcaagaaacttctcactactccacaagttttggcttcaccgcatccacaagagctgctgttgttatacgtgtcggtaacttctcaggttgtgagcacggtcctggttgttgagtgtgaagaagatggccatgttcaaaaagtctaacgaccaatttatttcgtcagtgaagttttagccgactccaagaccagataccctcaggtacaaaagctgttatatggtgttctaattaccgttaggaaattatcttactattttcaaggtcactcggttacggtggtcacatcgttcccactcggagacatacttcataatcgtgaggcaaatggacgaatcgcaaagtgggccttagaattgatgcctttggatttctccttcaagccacgaacttcaatcaagtcccaagccttagcagattttgtcgccgagtggaccgagtgccaggaagacacgcctgcggaaaagatggaatactggactatgcattttgatgggtcaaaaaggctttcaggcaccggagcaggagtcgtcctgatttccccgactggagaaaggctgagctacatgttgtggatacatttttctgcgtcccatgacgtggcggattatgaggcgcttcttcatggattaaggatcgcgatttccttgggaattcgacgtctgatagttcgcggagattctcaattggttgttaatcaagtcatgaaagagtggtcctgctttgatgataatatgactgcctatcgacaagaggtacgcaaattagaagataagtttgatggccttgagctaactcatgttctccgacacaataatgaggcagccgaccgactagccaacttcggttcaaaacgagaagcagctccttccgatgtgttcgttgaacatctttatgagccgaccgtaccaagaaaagaaacgaccgaggccacagacactcaagaggtgaatatgctcgaagccgactagagagagcccttcatcaaatttttaaccaagcaagaactccctcaagataaagacgaagccgagcggatctccaagcgaatcaaactttacatcatgcatgaggttgaactgtacaagaaaagtccgtcagggattttgcaacgctgcgtgtctttggaggaagggaggcaattgctaacggacatacattcgggcatttgcggcaatcatgctgctgcgcgaaccattgttggcaaggcttattggcagagttttttctggcctaccgccgtatccgatgctgacaggattgtgcggacgtgtgagggttgtcaatttttcgcccgacagactcatctaccagctcaggagttgcagaccatcccgttatcctggccgttcgcggtttgggggctcgatatggtcagaccgttcaaaaaggctaccggtggttatactcatctctttgtggccatagataaattctccaagtggatcaaagccaaaccagtcatcacgatcacagcagacaaggctagagattttttcatcaacattgtgcacaggtttggagtacccaatcggatcatcaccgataatagtactcagttcactggcggagtatttaaagatttctgtgaagactttggtatcaagatctgttacgcctccgtagcgcatcccatgagcaatggacaagtcaaacgcgccactggtatggtactccaaggaataaaagcacgaattttcgaccgactgcgtccctacgctgtcaaacgggtggatcaactgccatctgtactttggtccttgcgcactacgcccggtcgggctacgggccagtcatcattctttctggtttatggtgcggaagcaatgttgccaagcgaggtagaattcgagtctttacgatttcgtaacttcagagaggagcgctacgaagaaaaccgagtggatgatctcaaccgattggaggaagcccgtgaaacagctttgatccagtcggctcggtatttacaagggatgcgacgttatcacaaccgcaacgttcaatcacgagcttttttagtcggagacctggttttaaggaaaattcaaactacacgagatcggcacaagttatctcctttatgggaaggaccgttcataatttctgaagttactcggccaggttcataccgactcaagcgtgaagatggtactcatgttgacaactcttggaatatcgagcattttcgtcgtttttatgcttaggcattatttcttgtattttcctctttgactgctaacaccaagcttttccttgaagttatcagtcgggggctactacaatattaatggagtgtgatttttatcaattcaatttgcttacttgatttatcattgccttgtttgattttttggcttagtcaataaggactgaaagtttttaacaacttttgcaggttctaggctcaataaggttcgacaaaaacttttaagaaatcaggagctgagtctaaatcatcaagcacagcatactgtcggagatatgggcccgggggtatgcgaagcatgagcaatccgccttcacatcctgccacgtgtccctgtgacttgctcctgccccccgccgtccacgaaccgcgggggcggctagggggttcggggcctcggggtgccacggcacgcccctcgggcccttgcgccgctttgccccgaggccctcgcccagccaccatgtggcgggaaaagcgagcgaggagggagcccaggatgatattacattaatgcgcacaacgccccaactgccccctgctacatttaatgcagtgaggcagacgtgcggcgtgcgggtctgacgcaccataatcgaagaatgaccggtctgtgaccggtcatgatgccggtcacgtctgactagaccgacgaccgagctcccacgtcgcgtttgcttctagcggagtgggggtagatatgacccatcccatcggagggtcattcggacggcggccaccacaagtcttcat

SEQ ID NO: 14066 - DNA, 532 bp, Oryza sativa
ggaatgctgacaagtgcaattaaggtactcactagtttaggccgttgttatttatcactgattattaatcagctgtgactcaaaggattaactctttctttttcatcaaaaagactaattactcatattttggttgtactatattgcagacaagggttaaaatggagaaggcagcacggggagggaatatggcactgcgatataagaaaatggatggggattatgattcagctgaccgggaatgcttttcatgtttttatgatctccatttgtcagctgtcagctgccaatgctccccaaatcgttttgcttgcttaaaccatgcaaacattctatgttcatgtgaaatggacagaaaaaccgcgttgttgcggtataccatagaggagctccatactcttgttgcagctctagagggtgatccaactgcggtctaccagtggggacagaatgatttaggtttagtctgcccatctggttctactcagtacaaaaagatggacttgggtgaaaacacggaatttccggattc

SEQ ID NO: 14067 - DNA, 712 bp, Oryza sativa
gacgatagatcggggatttgagatctgagaaggcacggacactagacaacaagcaaagaaacatatttcgcaaataggatttttaagagataattttttccgctaggtgccacgacggaacgggcgctacaagctcttatcggcaaattaggccgcaaacctcctagtacggtcaagcagatgtttgagaaagctaatgagtatgccaaggccgaagacgcggtcatcgcatccaagcagtcgggcaacacctggaagccaaagaaagatgcgccgactacggggggagtggaagtaccaatcacaaggatcgcaagcgtaagcccgaggaacttgtagcaactaccacaccatcgtcccaacaacgttcacgcgtcaacactttcgacaagatcatgaactcccaatgtccccatcacccaaattccaatcacgcggccaaagattgcttcgtctacaaacagttcgcagagcaatatgccaagagcgcacgcaagccgactgacgaagaccaaggcacgtcgaaaaagaaggacgatggagatgatgccccaactggttttcaggactcctgcaaggaacttaaccacatctttggcggacctctagcttacgaatccaagtggaagcaaaaactcaccgaacgagagatcaatgccgttcagcctgatacgccccagtaccttcggtggtcagagacagctatcaagtt

SEQ ID NO: 14068 - DNA, 638 bp, Oryza sativa
tccctctctctcctctcccccgcggcccatcggctcctccccgcgcgcgcgccgctgacaggcgggcccgcccgccgccctcgctgacgggtggggcccacctgtcatcgccttcctcccgccgctcccgccgctcgcccgtgccctagcgccgccgccgccgcggattccgccgcatcccgccgtccccgcgcgccataatgaggggggaatcattccccgcgattccctctcccgtttcccccgtttttccctctctctctccctcggattcgtccgatttcattcccgaaaccctcgccggcgcaatcaatggcggccgagatctccgcggccgattcctctctctccggccgctctctccccctcccggtgctatttaatccacccccgtgcctctctcctccgtttccaccgctcgccgctcgctctctccgtcggattcgtgctcgcgccgttgtcctctctctccgccgtcgccgccgagctccggttcgccgccgtcgtcgctccggacctcctcccgactcggcgccacctccgtcagcttcgccgcgtcatcgtcgacctcgtctacgcctccgtttcgcccgccgaccgtcggagcgccgtcgtcctcgtagtcccgaaccgcgccg

SEQ ID NO: 14069 - DNA, 621 bp, Oryza sativa
tagttgtatttttgttgatttaattttgagtagataatttggaatgcgatacatgctatgatctatgatttggtattttgctactttttacggaatttgtagcctgctagatgttcttacaaagatatgagaatcatgtgaggacatgccctcatggatactcaactaattaacatgagtttagttgcggttattaatatgatcattttttaaccagtcataacaattgataaatgtaccatgagcttgttattgtgttgaagtggtatcactattttgttaggacttgaaactgtgaaataatatttctgttcttttttggcaggtgggtggactatgctagttgagataaggcaacctctgttgaggccagaagggccattttttgctacagaaaatttgcgcaattacagaagaaccaagaattgttggatcattcacagaaattgaatcagaagcttgaacaagttttgtccagatggcaaagccggcaacttttgtaacacctttgcagtttcctagatgatactgacggaaaatgtttcagtatgatcgcgtatactgaaatgttgcactatagcaagagtttgtatagtcagtcaacccccgtaccgcggtgtg

SEQ ID NO: 14070 - DNA, 694 bp, Oryza sativa
  unsure (1)..(694): unsure at all n locations
cagtgagcgcgcgtaatacgactcactatagcccgaattnnnnnnnnnnnnnnnnnnnnnnnnnnnnnnnnnnnnnnnnnnnnnnnnnnnnnnnnnnnnnnnnnaactaatacttaattaatcatgtgttaatgaactgttccgttttccgtgcggagggaaagagtttccatccatgatctccaaacaatactgccggtgcttacgtactcaccggacagcaaggagaggacgttggcgacgctctcgttggccaccggcgccggcgacgcgccgacggtggcgaccgggcacaccgccactaagctgatgccgttctcctccgccagcttgctcgcttccttctccgagagaaccttggcgatcgcgtaagcctgcagcgcaaacaccaccgctgtgctctcacgcaagcgactgtactatcaactctgactgaacatgtaaaattttgtaagtttgtgtgtacctgagcaggagatatcccgttggttgatctgaggtagtcgaggtcggaccaggacgactcgtccaggacatggctgctgccgttgccgtctccttgcagcggctggccggagacggcggccgccgacgatgtgaggatcacgcgcttaaccgtgccggctttcacgcacgacctcagaacgttcagagtgccttggacgccggcttccaacagttctttctgccatta

SEQ ID NO: 14071 - DNA, 601 bp, Oryza sativa
gccaaatagaccctacaatccgattcgtatccctcaaccgcaataccagatatcttaaccctaaactagtaaaaccacagcaaaattactccctcggtggtgtttgagggtggttttcgctgacgtggcatgttgacctagtccaccttgctaagtcatcatgtgggaccccgaatcagcgtccttctttcactatatcttttctctcttcccacttcctctccgacctatccatttgacgcagttgtgggcgccgcactcccttcctctgccccgggtcttcagccttagcttctgcggtggccatctcgcggtgccggagacgatgtgatgaaccctgagttcctgtcgacactcaagggctgttgttggaccgatcttttcgggagttgtaataactacgatttgggagaaacagtggacgatccgactacaaccgtacgagacgttgtgttgcgccttaacgatcgatacacctctccgtgggttgctgatcttgccggtgcagatcaaccctattcctgcaagcaaatcgaagaaacaagcaagaacaagataaaagcaatctgatattgcaaataggaatttaatacaaatgata

SEQ ID NO: 14072 - DNA, 1397 bp, Oryza sativa
ttttaatagattttttgagataatggaattttacatcccggcctttgctcaaaaagagctacagccaattattacattatagcaatctagaaaagagcgtagttcagctaaataggacaccccaaacaaaaacagaggaaaccaagtcaaaataaggagaacacatttattgaagtctatttgtgaacctccatccataattggcaaataattgcataaccattgactccaacttgcggcatgcaatctttaggaactccccatcatcctcacacctttgtagctgtgcccaaaaccggagctagtgcattgccctgaaaattacctgcatatatgaaatagatggtgatttattaaaaaccaaatcatttttactcaaccatagagcccaacaaatggcagaagctctaaccagtatcagtttactctttttcttatcaaccccccatagccacccatccaatatattagatatattaggtggaagattaaaacccaaaaaaactaaactgctctccatatgaattttgcataatgaccatttatgaaaaaatggtgaatagtttcattttttaatacaaaagcaccatcttaagctaccattccaattcgttttggcaaaataaccttgggttaacacactccctaagcaagtaccacataaagttcttatttttaaggggattcttaaattccaagtagatttgtttctctcaatataacagttgttaattaaagctagatacattgaccttactgagaacctatcattctgatgataattccatctaaaacagtcagaagaaagaatttaattgaatatgtccaatagaagccccacaattcatgccaatatacaagattttgaccaataaaagcttttttaaaagaaccattaaggggaccagatcccataccagtggcaatagtggatgatttacttcggattatagcatataaagatggaattttatccttgaaagccaagttaccaagccatttatcttcccaaaatctaatttgttccccatcattcacaatccaagagcctatatctaaaaaagtacttttgactttcataagccctgaccaaaaaagggaatcaccttgtttcttgtccacttgggttatagacttgttataaagatatttccttttcaataagttctgccaaacccctttctcatttattagcttgtacaaccacttactcaaaagacatttattttgtaattccaaattatgaatcccaccgttaaattttttttatcacgcgtttgatcattcgtcttattaaaaaaattacgtatttataatttattttgctgagggttgttttatcactcaaagtacttaaagcatgatttatatcatatatatttttgaataagacgaat

SEQ ID NO: 14073 - DNA, 591 bp, Oryza sativa
aattcgagctcggtacccggggatcaagttcaatatcatcgcctctctctatgactacaacccccaacctggcaacctacatgaagccagagatgtgggggaagtgcctgggctgcatcaatgagctgatggatatcctgtttgcaaatcccaacatttttgttggagagaatattctggaagagagtgagaacctgcacaacgctgaccagccactgcgtgtccgtggctgcatcctaactctggtggaacgaatggatgaagaatttaccaaaataatgcaaaatactgaccctcactcccaagagtacgtggagcacttgaaggatgaggcccaggtgtatgccatcatcgagcgtgtgcagcgctacctggaggagaagggcactaccgaggaggtctgccgcatctacctgctgcgcatcctgcacacctactacaagcttgactacaaggcccattagcgacagctgaccccgcctgagggctcctcaaagtctgagcaagaccaagcagaaaatgagggcgaggactcggctgcgttgatggagagactgtgcaagtacatctacgccaaggaccgcacagacc

SEQ ID NO: 14074 - DNA, 523 bp, Oryza sativa
gatgtactcaaaggcctgagatggaggcctccactgcatccgaaattattgtatgcagtagcacaatcaaccagctgctgctcagaaagagagacaggcttccagtggcctgagtatatgctgcctcaagagaaccagtggtgctgccagaataagttaaaggtcactcaaatgatctgattataggaccccccccccccacccgtgactttccttttttctactttgtctgctataattgaaatgaagcaccttctctacaacggtcacactatataaagttataatcgaaagtaacattccaggaacattttcaacataggtttgtcaattggtatgtgaagcatatttgccactatacttgtggagtaccaagaatatatgccaaatggacgaaaagtaacagaataaattcatgaaagacatatgataattgaattgtatgcttatttgagagtagtgacagatacctctccgtccaaaaaaaaaagtccaattctaacgataaatctggacacctatt

SEQ ID NO: 14075 - DNA, 631 bp, Oryza sativa
gtggcgaccaccaccttcgggcactccgggatgggcgggtccaccgggttctgcgacgtggagcacgggctggccatggccctgacggtgaacaagatgtcgctgggcggcgtgacgcggcgcgtggtccggctggtgtgccaggagctgggcgtgccggtgcccgacgagttctccgtcgccggcgacaagggccccgacatggtgctcaacctcgcgccgccggagtagcaccaacctgccaggccactactactgacatttcatcatacactttgatacatatacacatgtagctaggtaagagtaaactcatgatgatataacaaaatgaggggaaaaattaatgttctttccgggtatacgtattagtacaatatagtagtacaaatttatgccatttggatgtggcttcgtcatatatactccaaattatacatgtatacaagatttttgtttcatttttcctgtttacatttgcaactgtgaggtgcccagtgatgccatgttggaaaattcgaatatgctgttgtaaatgatttgagattccagattagaacccgtgagtctgccacagatgtctgaatctagatgaggatgaactcagcgcttgcaaaacctgaaagataat

SEQ ID NO: 14076 - DNA, 683 bp, Oryza sativa
tttggagaatgaagctttaataaggattttctgaaaatgagattaaggaggctattttccaaatggaacataacaaaactccaggtccagatggatttcctgctgagttttaccaagtgttctggaatgtaattaaatttgactttttacaactttttaaggattttcattctgggagtttgcctttatattcacttaaccttggtactattattcttttgcctaaagtgtgctgaggcccatgaagattcaacagtatagacctatatgcctacttaatgtcagctttaaaatttttacccaaagttgctacaaatagattaatggattttgctcaaaaggtaattagtcctactcaacagcgttcattctgggagggaatattaggaaaggagtggttattttacaataaaccttgccataaataccttgccaaaaaaaaagtgggggtaatttttaaaatcgattttgaaaaagcttaagaccaagttaaaaggttttttttaccaccaaccttgaaaaagaaaagcctttttcctaaaaggggggaagggaaagccttctttggtccaagttggccaggtgggaaaaaagtaagaaccaaatgggaaatggtttccaaccttccaaagttttaagaaaagggaccccttaatccccaattctttttaaaatagaagctg

SEQ ID NO: 14077 - DNA, 705 bp, Oryza sativa
acatcagtacgctcatgctcaccatcatcagtaaccacaacaatttcatcatcggagtagatgccttcatcatcaacaccaacatgttcattttgtttaaatggatttgctaagtacttatcaacaagttgtgtgctactgctaggctgagatatagtagcctgagatggcactgcaagagatggagtggatggcacctcatgtatgtcagccgcattatgtactgtcccactagctatcttttcaggtgttggccaatcagcaagtggaagagctacaactggctcattgttgctatgaacttgaatcaacatagatatttccttggtggtggcattcttgacaaacatttctagcatacattggtctgagcacacttgaggatagtttttgtttactgaatcatagtagttcactgttataaattcattcaccccccatgggtacttctccctaatgtcatcaataaagtccttgaagtttgtcctgtcactgtctaccacctcctctgttttataggtgaagttctctctactatgatgcccttggagcctgattttcaacaaatatgttgtaccaggatccatcctatacacgatgcatgcaacaagattactgtatgccacaaaactacacctaaccagtgctaccaccatatgcaaaaatctgaacaatcacaagaaggggaaaaattgatacataccc

SEQ ID NO: 14078 - DNA, 610 bp, Oryza sativa
cctgaaactaatctttaaaagtatactgcacatatgattgacagccactttggcagggttaccgataaagtataccctctaaccttggatgtatgctatgcggaaatactatttaacggagcatatacggacgttatcgtggacacgctaaggaaatgcatcacggagtataccaatggaaaggctcctacccgtgtaggactgggacgttactatgtcacacagggctgatgtctccaagaccctacctggagaccgtctgaccggcgatataaaaggaaccccccgtgggaactaaggggatcgaatctcataacgtacacaacgaccacagcctacgaagccggagactacaagagccaatatgacgggtgatctagcctaatcaacatcgatacgatctcttctgtaccaccgagtacgataattccctttgcatctgaggctctctcattttaatcacacgtcaactgaattagggatactacctgctaaagggccggacccagcaaacactgtgggactcgtagcttgatgtcgtactacgtagatgcacgtaccagtgtacccgaataccctctatatgccgactactggtaccctccgtcga

SEQ ID NO: 14079 - DNA, 655 bp, Oryza sativa
tgcctgcaggtcgactctagaggatccccacaattggaggttgacaaccatcatgaagatatctccaaaaaaaaaatccccatagcattttcacaaatcaatagaatcacttcacaaaattgggaagaaaaaaatagaaaagttttaatttgcttactgtaatgcttttgctgcccccacagcgacttggaggcgagcattccatgataatcccttgtttgagtcatcaacataatgaagttcatcatgtagagtcatcttgctacagtgctcatatacaagtaatctctgatcaaactcagcacaatatccaacaagcccgagtatgttaggatgcgtcagttcggagatgttcacaactagctctagaaaggcatccgctggtattcttgagttagcagcatcaatcttcaaaacttccagtagctgatgcaaagcaaatatcacagttcagaagtgacgatggtataatcaacaaattcttgctaaagtaactactagaaaatctgcccaacagttttgtacctctccatccggaagctctgccagatataccttaccaaacctgctatctcttatcaaattttcttcgttgaaactattggtatattgctgaagggacgcaatagagaatgacttgacggtagtagttaaa

SEQ ID NO: 14080 - DNA, 2265 bp, Oryza sativa
  unsure (1)..(2265): unsure at all n locations
ccatcttcgatgctgggtgttcccaacccttctccctcatattctgcgggcacacttttaaactgctaaacggtgtgttttttttgcaaaaagtttatatacgaaagttgcttaaaaaaatcatattgatccattttcgaaaaaaaatacttcctccgtttcacaatataagtcattctagcatttcccacattcatattggtgttaatgaatctgaatagatatatatgtctagattcattaacatcaatataaatatggaaaatgctagaatgacttacattatgaaacggagggagtacctaatacttaattaatcacacgctaatagaccgctctgtttttcgtgcgcaggagatttgttctcaactgcccacaacgaacacagcctttgacatgaagttggagtttaatttgatgcattctcctaattgtttcccctctttagatatgtgatagatttgtcatttgcacatggaaagctaggtagcagatagatttttggtgggccatgcattcttgccaatcccacattgataattgatggtggggaagcacaacttaaaagatagtctcatccattagacaagtcttttgggttgtatagtcttaagacctaaaattgtggcctcagtcgagcctgtggaggagcgagcccaatgtgattcgggtgacccacagtaagtgagccaggttgcgcactctaacaaatattttgcatcttattccgattatcacttgacttagggcctatttagatcctccaaaatggcaaaagttttatcattttggagcactttttaccattttagatctaaacactagtagcaaaagttggcaatttggcatttgtcatttgctagtctagggtagcaaattttgccaaaaatgctctgggaccatgcgcgtgctctctctctctctctctggtactaaaatggtaaaactttaggatgcatctaaacaccaactacatgccaaatctttttccaccaaaacttttaccatttaccatttgctattccaaatgaatcaaaacggacccttagcaaaaattatgtaccgcctaatcatacttgtcaggcggcagctgcaaatcgaacaataaatatcccgccttgctgaccaggcaaaaaagtagggggctggttggttgctgccctcgcctggagaccattggtcaagcaggtcgatccgaccgcaggcgaccgaaacggacgcctgagatcgacgcctgagccaggcgcgaatctgagggcagcaagcaaacgcgccctagaactcatctgtaggcataaaaaaaatctcaggtatgctgttcaggataccatggtcaggcggcagctgcaaatcgaacaaataaatatcccggctgcgcaaaaaataagggggtatctgggagagaggggctaaactctcaaaaacataagtccttcccataggaacttatatttttgtgagagagactaaattgtttagccgcactttagtccctccaaccaaacaccaaataaaagctatctgtcaggcatgaagaaaagtgtcaggcatgggtgtcactgttcaagtgttcagggtaccatgatcacacaaaaaatagaactcatcggagaactgtcaagcatgaaaataaataccaggcatggtattcaggataccaaccaaacagacccttgatgccagcatgatcgaagcatggaactggcctgttgggcttgcttttaagtgnttgagatcaatgcccattaaaacgccttgtggtcacgtggagcgctgctctccctccttggcgggcacgccaagcttagcacgcaccgtaaagtccaaatttgaccagtcaacaagtcaaagaaaggcacaactccaccttatcatctccactatataaaattcattttcgatcgatcgatcgctcactcacccacttgtctcacactctcactgagctcctctgcttctcgcatccatggccgccgccgccacgggccctgtccccttcaaggacgccgacgacgacggcacgctcgccgccgccgaggcgcgctcgcctctcccgaaggaggagttcggcgacctcgtcgcggcgctgccgcggaaggagcagtacctcgacgggcggctctacgaggggttctggctgccggagcactacgcgccggggatcatcgcgttccgccgccgattaacgccgcgcgccgacgacgtggtccttgccagctaccccaagtgcggcaccacgtgggttaaggcgctggcctttgccgc

SEQ ID NO: 14081 - DNA, 665 bp, Oryza sativa
acacggtcgttctgttactctttatgagaaagcgttcccgctttcagagcaatgttcaaagaaagctcatgaccaatttctagccgaccttgcgagcattctaccgagtaacaccacaccgctcattgtcagtgatgctggctttaaagtgccatggtataaatccgttgagaagctgggttggtactggttaagtcgagtaagaggaaaagtacaatatgcagacctaggagcggaaaactggaaacctatcagcaacttacatgatatgtcatctagtcactcaaagactttaggctataagaggctgactaaaagcaatccaatctcatgccaaattctattgtataaatctcgctctaaaggccgaaaaaatcagcgctcgacacggactcattgtcaccacccgtcacctaaaatctactcagcgtcggcaaaggagccatgggttctagcaactaacttacctgttaaaattcgaccccacccaaacaacttgttaatatctattcgaagcgaatgcagattgaagaaaccttccgagacttgaaaagtcctgcctacggactaggcctacgccatagccgaacgagcagctcagagcgttttgatatcatgctgctaatcgccctgatgcttcaactaacatgttggcttgcgggcgt

SEQ ID NO: 14082 - DNA, 618 bp, Oryza sativa
ctatagggcgaattcgagctcggtacccccagagactagacgaacggacagctcagggtccattcctgccaagaacttctcttgcttctcctcatcttcccgcacatcctcggggcataacgggccaaactgttgaactcatgcaaatactccatcacggagcgggtgccttgcttcaactctcggaattcccttttcttaagagccacgactccagcgggcacatgggttctccggaaagcggcggtgaagcgggcccaagtaataggctgtccctctggctgcgtagcctggaagtggtcccaccatagagatgcgggcccctgcaattggtgggcggcgaagatgactttctcctcatcgctacactgcaccgtgtctagctttttccccacggcatgcaaccaatccaacgcatccacggggttgttggagctagagaaggtgggtgggcggatgcggaggaactcggcgagtttaaagtgttggggaggtggtggtggagcattctggtgtggcggattttggacgtggtggaggaaagcagtcatcatgttggcttgctgagcgaggattagggtgagaatggcgttggcgtctggtggtggtggcggaggc

SEQ ID NO: 14083 - DNA, 1938 bp, Oryza sativa
ctaaaagcaactatataaaattaatgcagagctgctgatatgttaaaaactagggaatttcttttgatcactttaaaaggcatatggaaatatgctggacactatttttaatgatcatatatttgaccaatgcttggtccaaatttaacgttctaaataagctctgatgagtttgagctacctaccttactcatgctaccttctttccctgcagaattgagctcaaacttcacactttggaggcttggaacattaccacctggccttatagcatttagaggtcatgttcatcctattgatccatcatggcatttttaggcttggggtatcaggaaaagacagatatccccagtgttcagaaagcagcagtcatacattacaatgggcaaagtaaaccatggctggatattggttttaagcatctccagccattttggacaagacatgtgaactactcgaatgagttcataagaaactgtcatataatggagccccagttattgatgggctagataaccattctataaatatggccgtaaattatgaaattaaattcattattttggagacaaatacaagatagtccagaaggatacccacgaaatgctctctgaccagtaacccgaagctggtacacgagccgatggagaatatttaatgaacacaaaggaaatattttcttcctatacactaggatctctttccctttatttattccatttgtatcatagctcatgaaattacagtattgtttaggatggttcttttgtatttattggagcaatataaattgcctgatttggcgggattgatggtaggcccatcgttattgtaattgttgggttccagttcaccacatgaacaacatgggccagattttgattttgcaaagcaagccctgtacatttgcttcctgttttctttatctttttgtggtcatctggtatgatactctggtgtcactggtgtcatcagaattggattattatacttactgtaaatttgtaactcctgtcatatttggtctttgactatctataaccttttcaagtttagtacatacatcagtgtgtattgatcattttattgtacattgtttacaagaaataagaacttaaatgaatttctttagacgaacttcagtggatattggttatggttagcaggtactcctaaaacaatactggttggactagtttgagttctaattatttcttaagagggagttctttttcttcttttaatctgcatgtaattctttatttttcataattcactcataccagcataaaacatcaaggacgacattttctttcacatgtacattatctatatagtatgcggaacatgagcatgatatcactacatcaaatgtgcttcattgtgacccaaccaaacatagaagggaatggaactgcaggcttgctacatactgatcagtaaacactggaatcaagttattctatatatagcccaattggggaaaaaactagaaacacagaaaaatctttacagtggatgtaaccctgagaacacctatatcatcacatcagaaaagaaaaacctcatgatatttctatctaaactcgaaatcatcgttcgcaaccttcagcctcgaaatctgggaagacgacgaacgcgatcgacagcggggcgacatataatggtgaattgactgagaccatcactggtggcagtgaaggatgtcaccatctcaagtgagctgaagaggagctccattgagcagcactgtctggcaaagggttgccatcctgtgagtcagatggtactcctccctcttatcaagcccatccgaggctttgctccaacccaaagagactgtctcttcaggccatggacaaagggggtgtccctctttatccctgccatttctctgaaattaatgttgaggtcatttctgactgagaccatgaatcc

SEQ ID NO: 14084 - DNA, 527 bp, Oryza sativa
acttagtttagctgtcatgatttggagtggttagtttgagagccgattaaatgtgtgcgcacggatgtgctagggaggcttagcatttatcttggaatggaaatattatggattagctgagcttaaccatagtcaaggaaggtttttgcgttaattagtactatttgcgttagcatgcacatagagatcagagaggtgaagactagtgcagctggttgcaagtggaaatgtgctatagtcgacaagcttctggccagtctgatgatcacatatatacatcaggcgagcagaaatttaccgtgctctcgcttggctgttttgtgcgcctgcgtatttgcgtgaaggctgaagcagttcctaagccatgaattgtatttcatagtatgttcgtgtacaggatggttgtcagccatcttgtagttatgcacctgctccatgatatacagatcattactagcatcagtagcaccgaatttagtattcagtgcattccataactcataagcgccggtcatatgcatatacac

SEQ ID NO: 14085 - DNA, 758 bp, Oryza sativa
cctaattttgatccttttgtgaatttcccaggacttgactaatcctttgctagctaaagctatccaaggtgaatattatacctattttctgcgaacaattttctactgtaactaaaaaaaatggacaacagtagggaatttccatactaaattgcaaataggattaaagttacaaagtcaaagactcaaagaattcttgtcaaagatttatctgttccttgcaactacatatgccagcaactgtgatcaatttcattctaccgtgtggaggtttacttgttacactgactaatataagatattagagggtaaatcccgttttaagaaacatattgacatttgtggttcattctgtacctttatttattaagcttggaatttgtttagagctactttccacaaaatgtatttgccttcttatggttttctacactttcccatgattcatggactttttttcccatttatttgtttttgtagcctttagccctctacgtatcagacttggaggttccttacaagatcaggtggtgtatggcacgccgaatttaggatctccatgcaccccatttcaaagagttcaagtggcctgtttggattttctcaaggatgcataaccatggaaagatgggatgctattaataagatctttatggatacagggtaagggcttccttctccagtagtttctgatgtgcattcttttttctgtagtgaattctgatatattataagataaattgttgaccacatcacaa

SEQ ID NO: 14086 - DNA, 624 bp, Oryza sativa
ttttttttgacagttatagatcattatgttggcagtttatttctgtgttttttgagacagtttatttctgtgtgagattttattctgctgttgtagctcatgatgttttttccttggatttagatgcacatgttcaatagctgtttttgtagttgtaaaatgtgctgtaatgatttgcaacttgtcctttggtgcgttctggcgggagattggattcggcgtgacaattaataagacgtatagtactggttatgcccaatgatttattcaatgccatattttggcaggatgaggaacctgaccatcaatatggttctcgccgaatgccagcacgtagtcgttttggggatgaactggaggctgaagcactagctgagaggcgcatagttagtgcaaagaaggtgagcaactctcagcatgtaacccttgttatttttatccaatatattgctgtttatacataatctgtattgtttgcacattttcagtcaagtatgggcagaaacattcctcgcaaaccatcctttcctgctcgtccgcctagacgacaggaaaatgaatattctgagagtgaaagggaggagtcagagtatgaaactgaaggagaggatattgagcactcac

SEQ ID NO: 14087 - DNA, 581 bp, Oryza sativa
tccatttgctgtacaagtggagtcgtgtgatcatcactctctctgccaaatcttgcctctcctggtgcatacgaagtcaaattaattagagaatgaaccttggcacaatgctgaacatcatatatatttttcttcattgcttagtaacaagatgcaaaaagatacctttgcgagtgcgatgaggaaatgtttgccctcctttggatcgttaaccacgacgtagctgacaaatcgtaagtgttcgtattttagacgctaaggatgcagattggaactgacaccaacattaacctattctacttagatttcatttcaacatagcacaatatatcaatgtgagattttcttgcaatggggtgacttacttatacagccaagtataagcaggtggattcatttcatacaactggtggagcaccgtgcttgtggccttgtaagtgaagtaattcatgatttcctgcaaaatggagagaacaatcttcagagttccatgcaatctaaacccaattaaccttgcagttagagaaaattaaccattatattgctgtcgtttacagatagcgttccgattatcccctgcc

SEQ ID NO: 14088 - DNA, 12657 bp, Oryza sativa
agggggcatggaattttgcaggcggcccccttgccgccctgggggagggcgatttttgcctcccccctataaagcccagcccctcccctgtcaaatttcattatattcactaaaaatccaaaaaaacgaaagagagagagaggggagggcagcagaaggggagcggcgaagccctgctggttcgctcacttcatcacaggtatgctcccatacatcttttgcatttgtactaatatattacgtttgagtacatatgttgcgttttagttttagttccatatattttagcagatctgtagcacacagcacatatgtgtagatccagagcatagaatataatagtatgaattgagacatagacagtagtgttaattgtaagatgtagtttagtttgatctggagaatgtaacctacttttagaggaggtgatcaacgagctcttcccacacacggaggagaactaccgtgactaccttcgctggtaccttcctcgcactcgtgcgcgtgtgaccttcactccagacgccccagagccgcacgttgccgctgtcacggacgcgtatcccacgcaccgtgaccgagactacttcgtggcggtacgtccaatttgtattacttccaacaattatgtcatttatcttgcataatataggacaactactgaattttttatttccatcttgcataggctgatgcggcacgggatatcagtgccgatatcaccgcagtccaggtgaggttgagcagaggtttgcacttgactgacgttgagcagaggtcgaccttcgaccggatgcaggagaagatgcgtgcggtcatgcgcgtcttctcctgtcgcagcgccgtggacgtcgtacctccagctggtccggtacacccacggcctcgcggtcctaccgtcggagcaggacctcgtttgtcttcgagcgcccctagcttcggagcagtgcgacctacagcaccggtttcgcacggtacagttcagcccagatattagttcatttttgtttcagcttttgcacgaatgtgtcaccatgatttaactgcacgtttcctcatcgcaggacctcgtatgccttcgagcgcgttcgcaggcacgaccggcgcttccgcgagctccgcaggggcgttcgccacctcttcgggcgcgttcgccagctcttcctctcacggagcgtcgatccctcacccacacggtactttactttttattaatactgttaaatacctgtacgaaactgatggtccttgtccagcaggatttgcagccgggatcttcggtactggggcctcttcgtctcacgccggtaggactggtcctactagccagttctacgacgacgacttgcacggtgcagaccaccaggacgtactaggctcctctcagcttggaggagctccagaggcgcacactcaggagcagccagaggtcacacctgtacaggcaggacgggttggccgtgccgtacccccggaccgactcacgtactcccaggggcacattagggcgcagggtaggagggacaggggtaagaggcctcgtcagtagtgttctacctcttcagtccttatgtgaccgtttcttttggcttacaaacttgtaaagcagtactacttttgctattactactgcagtactacttgtgtttgtctcgtctacgtagttcttttcattcgtattgtgctcgaacaacttatgctcacaacaacacactttcggcgcttcacggtagtgccatatccagtagcgcgcacagtccacaacagcacacatgaaaatggaagcctattaattggtaatacgtaatctacaattgagattatgtacaacattcttcactacaattttacattttggcagcaaaccaaatatgatcaaatgcaattttaccttaccaaatatttggtagtgccaaaacttgcttatattttggcattaacaaaatatttgtacggtaacattccaaatatgccctaaaaaataataaaattgtattttaccagtcttggagattttaatcttgtatagttttcaatataaaaagatttgataactattgatatttatataaaaaaaatatagagcacagtgcaaaatcgccctagcggagggcggcaagggggccgcctgcaaaattccatgccccctcgccgcccatttgcaggcggccccccgcacagtggaaaatcgccctcgcggagggcggcaagggggccgcctgcaaatttcgttgacggccgtcgcccgagagcgaacggccgtctgccacgtcattttcgccgccctctgggagggcgatttttaaaaatcgccctcccagagggcggtaggcgactatttccgttaattttcaaaatggaaaattatttttgtaaaacttttaataaaaaaaattataaataaaaaaaattcggtgatgtttggtgcgcatatgctctgtttttattactaccagacgattccaaacttcctgtgtagaagtagtaggagtactttatttgagccctgcctttttatgattgtaaaccatgaatttcttcaaaatcttagtataaggttttcgcatagatcggttcaatttacaaatggttattgtgtgtgttggaaagaggaatccggtgttctaaagataatattatgggattcgagaatgtttaaatctcaacactattcagtcgaagctcgacgaatttcacatctccaaaaaaaataaaatcagttcaataaacgattttataggtcggataaaaccatcttcaattcctacgagccttaaaactggtgagcacgaagtactatatagagacttgtacgatttcattggatcgataattcctacttcttccgtccccgaaaaaaacgaatctagtactgaatggatatattctaggacaatgaatctggacataggtatatccagattcatagtactagtactagtatgtgtcacatctagtattatgttggttttttatgagacggaggggatagtttcctaccacgtgaaatatgacattgtttgagtctgatgaagataaatattaaattagcgcacgtaaaatgagagtcattggtatataattaattaacttatagttattacaaacttatcaaatgaacatactcaatttgatattttaaaacaacctctacgtagaaaagttttcgtaccaaacgtaacgtttaatagtttgtaaaaggtgataacgaaaactaagataaaagggtgtttgaaactttctatatatatatctatccctcaccaaattctagggtcgcaatgaacagttgttgtactgcatccgtcactcactctcactcacaccaacatccccaaatcgcaatcgatggctgcaagataaccaccctttttttttcgatcggtaccacgcaacgcatgcaacgcatcgaccggttgcttgcggccggcgactccccttccctcccaaaagattctccccatctcggggtacaataatgccgcgtgcacgccggccggcgccaccgcatcagcagcagcaagctagcgggcgtcaaaacaccaggacccgtttttcttctctttttaatttttcactcttcctctttatgaccacatgcccctctgcgtggtgccaatcggcatcacgaggcagatgatctgcagctagctgaaaaaaaaattgaccaatgttgggttgtcattttttactactgctaaagctgttttgttactcccttcattttatattataagtcgtttgatttgtttttcttagttaaatttttttaagtttgatcaagtttatcatatagtagtattttcaacacaaaataaacataatataaaatatatttaatgtcagatttaatgcaattcgatattttggatgttgctaaatttttctataaacttgatcaaacttaataaagtgtgtaaaaaaatcaaacgacttataatatgaaatggagggaatagtatccacatgctgtatgcaatgacgcgcagctgctgcaaaaatcacagttgaacaagaccattcgcatttcacgtaggaaggttggagcctctgaaatgagatgcaagcagaacagcccagcccgtaaacacacctgtagtaggatattggtggttcgcaggttggcctctacttgtctttgcaaactgcagtttcagttgtattgataagtatagtagcagctgtaggcttgtaagcatagtagcagcattgatcaggaatcttgtggtatacaaatctctgtcacacttttgagtaaagcagctatcactgatcagtgccaaaaagagagagaggaagatctcgccggacattgcgcttttgggtggctctccttgtatttgtggtgtgtgagtaattacaggtgtaatgtaagtatgtagcatatgctgtgaaagaagcgaagaattcagggcaggatcaaggatcatcatcatctaggggagaaaatggtggccaagccctgatccaccgtcagttggatgggagggccataggccatcaggtgctctatctcgtcgccagtgtgtgatccatcccctctcgcgatcacctcgccatcggagtcgatgatgccgcccttggtggtgctgcccacccgcattcccggctcaatcctgagagccttcacctgtcagagattttacattgggttgagaaagaaaaaaaaggagaaagtggcacggaatcaaacgattgaatggcattatctcggtggattttgctgtgtgaaactgcagaggccgaagatataaaccatttccattatctaaaaaaaatgtctcggtggatagcatggcattttcttttacactgaggaacagagatggagtggtcaggaaacagaggggtaagtaaacacagtaccttgaagtactccacatagggggatttgacatagctgccatccttcatctgaaacatcagcccagcaagagccgacctagggcagtccttgattatggctacatccaagtagccatctccaaactgcaatgtaatgaagaatagtcagggtatggactgtggacaatcaagagccttgtagaaatagcagaaaatgattgacaacaccactgaatgattggcgaccttttgacacttgtattaaaaaaaactaaagagacagctttagggcttaataggatgtagacacttttaaatacagtatttatttaagcgtctgaatattcattgctactaacccaatagccagctttctattgctaaaatcacttgaattcctaagtttccagcttatcttttaacaatattttggcctttccggactaaaagattatgaagaaccaaaacagagtgagattaacctttgcttctggtgctgtcatgacattttcactagcaaaaggaacaccactgacccaaaccgaaacaaatgggccatccagtgatctccactcatgatcagtttcatcaattgaagggcctgcgtaagcacatgtttcgtcattaaaatcatttgatctgtcctcttgtacaccagtgctagccccatttgatttgcaactgctaatttgctctacaagatcaccaagtccttcgtatcctggggctggaacaaaaagaacacgcccattgtaccgccgcaagctcaccacacggagaagggactgaaataaagtcagagcatagaatgaattgctaagtatccagaaggggctgaataagcgaatacaaggacactacaacaatctttgcattatactttagacagcctctaaatatgctcgatgaagtactaaagctcacgatgacatttttttagacatcaaggcatatttttgtgttcaaaagtacacaacatttttcaaagcaaaataatgcatgcataaacatgcattccatttaaagaacatgctccacgatgggaacgtcataaacaaatgtatctgttgattgttattatatcatcagcacactgatgcaagcctaaccattatgatcatctaattttggaagcacattacagcattgtgcacatgactgaccatgaggaccacataaataaaggagaggaaagagagaggagagaaagcatatggatataattgagtgtttgatagagttatggtagaatgcatacatagaagtcaagacgagcactgcccatccacctgtacttctctgactcaatatcgatatcagctaccagacctgcagttcataaatcgttttctcttagtgccccagaaatagatagtgggagaacaagctctgagagtgacagtcagtgttatgggggtatagacgtgtagtttaagagagaaaaaagcttagcatcaagctaatacacggcataccccaagtaagcatcaagacactaaaaaaccttgtctttccctgcacaacagaggtaacatcaaggggacgcttgtgacctgtgcaacagaagctgccatcagtactttattaacacagaaaatggaaatattttgagaggatttacaatatggaaacacagatgactatttacgttaaccgtggggatttggggggggggggtagagacttgcctctgataattgcaagcacagcgttataaacggagaaggattcaccagcaaaatgcacaagtgattgcaccattccatttccggtacctatggtatttgtaatgggtgaaaactctacccagagaacttatagtattgagctgtaaagaagctacacaaggctgaacaaaataaataagaaatcacaagctactctctagtgtaacacaactttatgatgttctgcagtgatcagaaagaacaaacctaaggcatattacagatctcctaggtgtaactttgcatcactacaataaagaatagcattgtgaattgtgatcacatattcaaacacctgccgggatgatgcctaatggtatttttattgctgtgttccagtcctctctttgcagcagaccattaaccacctaaaaacccaaaataaaataattaaatgcaagtaagaagaataaaggaaattcacccttctctaaaaatatctgaggataaagaagactactgcctataattcgcatcaggtttttgtacgaatcatctttttttgctaacctctacaagtacaccatctccactgacgcaaacaattccatcatatttcctaagatccagtgaatgagcaatttcttgagcgtgaagccgatgcttggtttctgaacacaattcataattcagaaactttgtatacagagaaactgggtgtcacacttagattaccaaaataggaagattttgaacagatatcacaaccttgcatggtgtaaaggatgccagcagcttcaatgagaggtaggacctcagtctggaaaatcttccgcccacctctctttccaccataagggttaactatgatgaacaatctctttggccgacctattcaacagcatatcacggtagaataagatagatgtcaagaataattagaagtccagcatgtcaagaataattagaagtccagctttagttgcagtgtcaataccctaaatagttgtctccatatgcatgaagaagaacaaattagagatgacacgttctttttcctttttttcctaaaaaaacactaatagaggggctctggaaatttatggaggatgtccaggataggttcagggaaaaaagaatttactaccagaaggaaatcaacaactggagcaaacatgacaaaccaaagaaactaacttttaggagagttaggaccttctgtctaagttcaacatcttctttgatgcaacagaacacctcctgaagacctggatggactacctagtgctgacaaaaagggctacatttcactccttcacaaattccaacaggtgtatataatcactccaaccatgcgggattcctattatctaaaaaaaggggggcaaattctattccttcttccttggtattatttgcattacaaattaccaacagactgttattctggattttgggacatatgaatgttgccaggaaataacagcctgccaaccgtggcaagcgaagaattcaatccaactttgccagcaaaaaacccaattccaaagagagggtcattgtctctgcttcaagtatgcataagacacggttggtgtgagtgcagaagaacaatgcttagagataggatagaattacattgtgtgcgtgagagcagtagaagcaaaatgcttgaagtcctataacaatcctataataaactaatgagtggaaaagtgaaaacataaaaaccaccttcatttttttattgaagtctaatgaaatacacaagggtgacatttaatagcaatagcgacactgagaaggacatttgaccaacacatgaaaatcaatgaagtatccaaatgatcattacaaaaaatatcttctcctacattaatcagcagcagatgaaaagagctcatcaggatatcagatggtatgattcttggacctggctgaaatttcaagttcaaacaccacaatctttgttatgccaccaggagctggtccatttgattcaaaatatatttaaaaaaaacaaaaactcatacacaatttaaactatctagtaaaagttgatctatggtcagtgaaacttgaagaaacaatggggtaaaaagaactccctattggaagtattgtacgctatccgtacatataaagtagtactgtacaattgacgatttggacaaatttgtgcaacagagctgacaggccacgttacaacagcacggacaccaagaaatatccagagagatgcagtactgtacatccctcccgtcgattgtaaaaactcattacattaagtttttgtttatgaaggtgatcaactaaacaaagtgaataatcgatatttgggggttctttccccactacgttactccgagtctccgactgagtcaacgcaaccaccgcccaattgatcaaagatcaatcccaataaaaaaggcgacacttcgtgaccaaatcacaccatgaatcaaacaataacctaaacaagcttaaagatcatcgaacagtagacatttctgttactaagaacaaatcaagagcagatgattaccgagttactactactactagtgattaatcagtgaatttaccaagcgaggcgaggcgatctctcatggcgtccccccacgccgcggcggcctcctcgctctccatctccaccaccacctccctctccctctccctctccctcctcctctccccgcccccgcacgtcgccggccgcgccgccgccgccgccgcgtcgtcgcccctcgcgaaggtcgcgaccctgagcgccctcccgtccacccggaccccgagcacctcggactccagctccagcctccccgcctcccctcctcccccgccgcctcccgtggggcgccacgccagctccccgccggagagcgtggcctccgccgcggaccccccgacccgcaccggctccgacagggccttcgcccccgcctgggccttggactgctcctccgccatggatggaggaggaaggaaggaagctaagctgcctccggtggtgaggtgagttgagcgagagtcggcgaaggtttttttgtgtttgtttgtgttggggaggaggaagacgaaggcgacgtggtgaagtgatgaggtgtgtgtgtgtgggctactactataaaaatggcgccttccagctagtggggtagtatatccgtgttggggggggggggggggtgtatttatacgtgtgtgacgtatgtaaacactggagtatatagtgtaccgtatacggtatacccctggtgtaccgtacagtaaacgataacgatgtcgacttttgaacacttgtctgactattccgtcttatttaaaagttttgtatcaatatataaaatataaatcatggtttaagtactttttaagtgataaaataacacacagcaaaataagttatgattatgtaaattttttaaataagataaatgatcaaatatgtgataaatcgttaacggtgttatctatttaaaaaaatgaggtagtagatttctgtattgttggaggccttttttgttttttttttggaggtccttgtattttgggggatttgtgtggggatggatggatatattgacgttgccgtgatgccgtccatcttatcataggcttctagaaggagtaagctttttttcttttcctcttggaattggaacttcgcttctagaagtatggagtggtactttaccttctagtactactactaggtgcagtggttctatgcacgtgggccgtggcaattcttcatgtggacaccttcaacagtgcttgtgtttgaaaattgatttctcagcttgaaaaaaatgtgaagggcaccagcgcaccaccaaattagagtagggccaagaaaaaaaaacagtttttaggtcatgtttgaaaaaagaaatgaaaacatgataacaaaaaacacattttttttaagaatggaatatatatttcttgtttttctcaacaagctacaaccaattgttatatcaaatcatcaaaagcattcacgatgtaatgagaccaaaaacacaccaagttaacataaaacaaacacaaactaataagcaacaacacaaaataaaagacccacaattattaaatccgagaatgaaaatacatgaatatgatatagtgtaaagttgaaaactaaggaattcaaaagacgggaagatgcaatttaggcagtttaaatcacgtccccttatgcaagcatgaagcaaaggatattttccttcggatcaaagtagatgttttatttcctatgaatggagaaattgctacttttccgaaggaatccaacaaacctattcctttcttccaaacaagctcataagaaacaattccaaaggattgcaaacctccgaaaatcatttaaaacctatgttcctcaacttagttttttaaggatatgaaggtagagaaagataaataacactaaaggttctaatatttgccctaattttctttaaaaaaaatctgattgctcaacttagcttttatgtcagctttggtttcatataatgaaaccctcacattaatgaaaggttaatgtctctaaaggagaatacggaggaaatagccatgctgaacaagaatgctccttcagagcacctccttcatgggacatcgacgctaagcctcttccttagtacaaaatctttttatatataatttgattggtccataaagtaggaattatattcatcgcgggttttattagaattggataggagaatgatcatcgtaaatgcactagtgaagctaacaataggttgtcgtgagcaattgcttaagcgcagcagcacacaacacatgaggtggaaatgccatgtcgttggtaacgaactaggtaggtgattttttttttaagtggtttcatctgatctttaaaaaaaattctagaattgttattgacagaggaatcatcagcacatcaagcataacagattcgtacaattctagtaatgtgtcatagtgaatttcatctggcttaaattttctagatccgtcactgaaatgggagtggggggtccatccgcaatcatacaggacagacgtactgcttgccaaccacacgaggtaagacgagaccaatgtgtgccgataattgagagaggagtgacacaagggaacaaaggcggataaatgagagaggagtggagggagagaggggctgtaacctctactcactataacaagcttaatttgcagtgttcgtctgcttgagactttgagcccatccacagtatgacatgttcttggacgagtggacacaattcacagtgacttaccagaagaagtcaccgtgatgcgaagatggatcaaccatggacgctacacacgtcggctaacctcgtgcaaatcgcgtagatcaaaccggccagacacattgattacgcacacgacgggcaattaaatagtcgcgcaaagttgttgtttcgtgcctggaaggtggttaaaaggtgaactagctaggcatctagcactagttgtttattgtcatggatataaaaaaaacacatgttcttatgcttcttttttttcaagttgtacctatataaacaagcccatcgtttcacctatatttatccatactgttattaataaaccaacaaataataatttatatatacatgtcactattgtaaaaaaaactacgatggaaaaagtatgccataaaatcaactttaaacttaagttttaaaatttaaattttgacttgtataagcataagctccaatgaattagactcaactatcacggtgtcaccgtcggatcaatcccttcccagaaaacgaatgaatgaaggcgaaacatgagtgctaaggaaaaggagtcgttttcgttcatagcctcacaggaacacataggtatatccagggttcaatcttttgttttcgtcgatacgagggtactgatataccaaaaattttgaacaaaatattgctaaattaatttttttttggctaaaatagtatccatatttgttttttttttggggggggggggggtgagggttgattttgaaccctgggtatatctatgatctatccatcgtagctctcacgatgcaaacggggtagcctcatcttcgctgtcgacgtcgccattggggcatccagaagaattcactcacacggtgacaattgac

SEQ ID NO: 14089 - DNA, 588 bp, Oryza sativa
aattccaccactctaccaatataggttttagcattgcacgcggccactccatgatgcgcttattctacggtgactaacgaccagaaccgattgattgcagcccgacgtgcctgttgtcagtggcatcaacagcggcagcacggtgaagctcaaagacctcgccccggcggccaccaacaacgtgaacacgacgttcatcgtgctcgacaaggcggccagggcgccgccgccgccgccgcacggccgcgccgacgcaagggaggagacgtgcctggcgctcgtggccgacgagacggcggcggcgcacttcctcctgtggggcgccgagcgcgacgcgttcgagccgggcgacatcgtgcggctgaccggcggcatcttctcctaccacaggagcaacagcctcgtgctgcgggccgggcggcgcggccgcgccgagaaggtgggcgagttcacgatgctgttcgtcgagacgcccaacatgagcgaggtgaagtgggtgcgcgacccggcgaccccaggaggatggtgcaggaggccgtcgtctcgccgcactctcaggtcttcaagccgatgcagtgactgactgac

SEQ ID NO: 14090 - DNA, 1169 bp, Oryza sativa
agcggcataatagcccagccgtgtaggcgaaggcaccactcggcgtcgacgtaggcaggccggcggtgaagtcgtagacgcccaacagcggcggcataatagtccacccgtgtaggcgaaggcaccactcggcggcgacggaggcaggccggcggtgtagatgacgatgcccatcaacggtggtgtgaccaaccgaccgtataggcggggacaccagtcggcggcgacggaggcaggccggcggtgtagatgacgatgcccatcaacggtggtgtgaccaaccgaccgtataggcggggacaccagtcggcggcgacggaggcaggccggtggtgaagtcgtagacgcccaacagcggcggcataataggccagccgtgtaggcggaggcaccactcggcggcgacggaggcaggccggcggtgaagtcgtagacgcccaacagcggcggcataataggccagccgtgtaggcggaggcaccaatcggcggcgacggaggcgggccggcggtgaagtcgtagacgcccaacagcggcggcataataggccagccgtgtaggcggaggcaccactcggcggcgacggaggcgggccggcggtgaagtcgtagacgcccaacagcagcggcataataggccagccgtgtaggcggaggcaccactcggcggcgacggaggcaggccggcggtgaagtcgtagacgcccaacagcggcggcataataggtcagccgtgtaggcggaggcaccactcggcggcgacggaggcaggccggcggtgtagatgacgatgcccatcaacggtggtgtgaccaaccgaccgtataggcggggacaccagtcggcggcgacggaggcaggccggcggtgtagatgacgatgcccatcaacggtggtgtgaccaaccgaccgtataggcggggacaccagtcggcggcgacggaggcaggccggtggtgaagtcgtagacgcccaacagcggcggcataataggccagccgtgtaggcggaggcaccaatcggcggcgacggaggcaggccggcggtgaagtcgtagacgcccaacagcggcggcataataggccagccgtgtaggcggaggcaccactcggcggcgacggaggcaggccggcggtgaagtcgtagacgcccaacagcggcgacataata

SEQ ID NO: 14091 - DNA, 934 bp, Oryza sativa
cggtgaagtcgtagacgcccaacagcggcggcataataggccacccgtgtaggcggaggcaccagtcggcggcgacggaggcaggccggcggtgaagacgtggacgcccaacagcggcggcataataggccaaccgtgtaggcggaggcaccactcggcggcgacggaggcaggccggcggtgaagacgtggacgcccaacagcggcggcataataggccaaccgtgtaggcggaggcaccactcggcggcgacggaggcaggccggcggtgaagtcgtagacgcccaacaacggcggcataataggccagccgtgtaggcggaggcaccagtcggcggcgacggaggcaggccggcggtgaagtcatagacgcccaacagcggcggcataataggccagccgtgtaggcggaggcaccaatcggcggcgacggaggcaggccggcggtgaagacgtggacgcccatgaacggtggtgtgaccaaccaaccgtataggcggaggcaccagtcggcggcgacggaggcaggccggcggtaaagtcatagacgcccaacagcggcggcataataggccagctgtgtaggcggaggcaccaatcggcggcgacggaggcaggccggcggtgaagacgtggacgcccatgaacggcggcgtaaccagccaaccgtgtaggcggaggcaccactcggcggcgacggaggtaggccggcggtgaagtcgtagacgcccaacagcggcggcataataggccagccgtgcaggcggaaacaccagtcggcggcggcgaaggctagccggtcgatgaagacgttgacgcccatgaacggtggtgtgaccgaccaaccatataggcgaggacaccagtcagcggcgacggaggcagccggttggtgaagacaatgtcgccaccagcaatggtggcagagtacac

SEQ ID NO: 14092 - DNA, 759 bp, Oryza sativa
attcctgcagccctatattatgtgatttatttgtcaaccaggatgctggagaaagtctgcaaggattcacaaatgcttgcagacatgtttgtaaattatgattgtgaccttgaggggccaaacctttttgaacgcatggtgagcacaatgaattttatttttacactagaaaactagtatctcttctaactatctccacatgatatatctgattgaacatgtatcactatcaggtcagtgcactctcaaggattgcacaaggatctcaaaatgcggatacaaacactgccgcatcttctcaaacagtttctgtgaaaggctcatctcttcaggttactgttatccaaattgctaagatatttttgtccttagtgtatataatgttaatcactcgtaaaacccaaattgcagtgtttggtgagtattttgaagtcattggttgattgggagcaagctcgaagagattccttgaaacaggggagtgttgccgaagcttgtgaaaatgattcttctgcaaggagcataacaagtgatgaaataaagagccaagaggatggtcgcaatcagtttgagatagctaaagctcataagtcaacaatggaggctgcaatctcagaggtagggaggttgctgttttaattgttttgttttgttttatttattttgcaatcaagaatctttatctcatgatgtttaccaaatacatgcatgttcttgtagcagttaacctagtttgctgttactgcattgctgattgta

SEQ ID NO: 14093 - DNA, 572 bp, Oryza sativa
tattgaagtggcagatagtaattaagaactacaatttggaatatatatagctcggcttcaagaaaagagtgtcgatccctcaagctgtttacatctaaagatgctactaccaaaggcaagtatcaataaacttaactgataatcaacacctaggaaaagcttgtcataatccagtaggattacctgggtgggcgtcctagaaaccactggagcaattttgctcactgcagctggtgaagtgcggtgttgctcaaatgaagatctttgattatggccacccctgttaacactagtttgtgactctgagctcttctcatctctagcaccagatgatggtcttgatgacccattcctcggtatccatctcttgtcctcgtatctacattttagacataagttaataacattagtccaacacattgttccaaaggttagatccataaacacccctacaaattactccctctggtcataaatgtttgacacttagcacaaagatttggtcaaccttttaaaattccagcaaccaattttatattaggataagtttataaaatccaataagtttatga

SEQ ID NO: 14094 - DNA, 680 bp, Oryza sativa
ttcttatttatagggatactagcttaattaaagaaaaacagattgagaaaaaaatttataaatgataaaaagaacgttgattggggaccaaatcagagtattccccaagtctatttgaagattactacgtcacttttagttcatagaagataataagatataaagtttttaattcggattcagctctcctaacaccatcaatttcaaacggatctagccgctcatatagaaggaatctcgggggtccatgtcacgccccgaactagtcccgaccggaactagcccgtgacgttccaaattaacctgttaatcgataccagtcccaggaaacagtgctggtatcacagggagacagaatatcatagcatcagaggtctctttattatagagtagaggtacagtcatgttgggctgcggacagatcccgagctcacaactgcattacaaaagggaaacggaagccaggacttggccaatcaacacaggcgcgacttgggaactaggccgaaaccctaaaactcatcgtagccggcttgctcctggaagaactcctcatcagcagcttccgcttcatcttcttcagcaacttggggggggtcatttatatagagcaagggtgagtacgggagtactcagcaagccatgggaaataagtgtttaatgcaggcttcaaggaaagg

SEQ ID NO: 14095 - DNA, 1272 bp, Oryza sativa
tcccccaccacttgcgggcgcgcgcgcgcggtttatgtggggggggggggagagcggcgacgtgggcgctaggtgcgggcgcggagagggacggagaaggcgggcggcgtggggaggtggggccgccggcggttggggctcggctccaaccggctagaggaggaagacgaccgacaggtgggccccacctgtcggcgcccgaaggagagagggagggagggagaacttcggggaggggaaaggggaacgggccggcccacaaggggaggccgagcgcgggcgacgggtggactgggccgacggcccaagaagaggaaaaaggaggaaaaaggaaaaacaaaaagaagaaaggattttcctgggattaaaaattgcactttggtgatttttaattggtaaaaattatttccaaggctctgaaaattccactaaaaatcctgttagcattatttgacatgtagaatccaagaaaaattccacatgccgattccgattattatttgcatttattaattagggaattagctctaggttaattaagataatttcttcggacgatttatttagccaatttttaaagcaagcaaaggggggaaaacttcagggcgtgacagcccgaagacccgcagtgcgaggatttcgaggatcaagctccagatctcgagcaaggcaagctacctttgaacatcttgagcctatatttgaaatttaattatgttgcttaaaaatattatgcattgataggatcgcacttaatctgtttgtcccgtctgcaaggcagattggcggacctatctaatttgttgtatttgatccttcttttgttaattgttataccatgtccccttgtaccatctagttgcgtctcgatattcgtgcaccctgtgcgagtatcgacggacgccttcaaacttaaaatctgaataacaacttgcgtaaaacttgggttttacaaaagatttggaaaacccgacacctgggtcggtgcttgcgaactaaatgaatttccaaacccgcggaccggggaacgtccgggtgtacggtttcccgctctcgcacttaaggaccgatttccttggaatttcatccaaacataagacaagtacgaccacatgggtggaatgggacacccttggctgagtaactagcttatcaggggagccttgatgccgagagacatgtggattcgccggggtggtgtcggggaggacccctgggcttcttggcacagtatggtctgggacctaacctgttgttggtttgggactcctc

SEQ ID NO: 14096 - DNA, 573 bp, Oryza sativa
agcttcttcccccaaagcaaatgccatgtgtattcacatggggcacatgagccacaagggtcccacctgcttgttaaattatttgatttatatgttttattaggctggcttatggatgcatggatgtactgtagaatcaaccttaactatatgaatggtcctcagttgtttacagcataagaatatatcatgttctctttcatgtcctttagttgcattctagtatgatcttcacaatagttttcttgattagcttacagttgactgagtacttccacatgccttgcactataaaagttgagcattggagtgtgatgccattattttagtcctctgttttgttacttttgggtaatgctaatacttctctgattccgccctatcatttgtttttggttcattgctgacctattcctcttgcaaaatctcaggttgctaaagacccatcaggaaaagatatcaatgcacttgagcagcacatcaagaaccttctgaacccttccactccatttttcttcaacactttgtatgacccgtaccgtgatggcgctgattttgtccgggggtacccct

SEQ ID NO: 14097 - DNA, 1441 bp, Oryza sativa
caaagtgacccttaccaccacttatgcgacgacagacggcgagggagatggcaggcgacaagctccaaaggcggtgaccttgggttgacgatggcgacggctttccggcgacgagaggcaacaaccgagggcggacggtcttcacctcgctcctgcgatcccgagggtggtgacggtgaatgaaggcggcgatggacggcgacgaacggcgcggctgaagatggaacggatcggcttcacggtgacgacgggcttcccggggtcttcgacgacggggaagtggaggccggtcttcttctcctcctcgcgaacccaacggcgggagcggcgaccgaaggcgacgaccacagcgacggcgcggggctgctggagcggcgccggcgaaccacgatacgacctcgccggagatagagcggccggctgcggatttggagggcatgcacacgtagaggacgacgaggcgaacccaacggtactcaccacaacgacaatcgacgtccgacgacggccggcgacgagaggaggcggcggcggcttggaccttaccgacgacggcgagctacggcggccggcggcgaagaaggacgggcggccgggcttctccaccccttggcgcacctcttggcgacggcggcaagcggcggcgacggcagaagcggcgcggcggcgcggctgcactcggccggcggcggcgacgaactaaacgcgcgcgccgacgaggctacgaggcactagagagctcgggagagggggcaaacgaaagaggaggactagggggtcctatttatagccttggaagctcgggtccgggcccaaaacgacgggaaaaactcgggaaagtttatcttcgccggaaaaaggaaaggatttgatccgcgaaattggaaaggatttccatataaaattttggggatttcttggggaaaaggaagaggagaataagaggaatatttcccctcaactaatttggaaagaggagcaacgaggaggccggatttggtggaagaaggcggcactgtgcacaggctcggctggctcgggctctgtccagagctggaagatgaacagtgccagggaggcaaactagacttttttcggttggctgagaacagaacagagcacttgacttgggccggcttgggctgcacagcacgcgcgcaagggagagagaagaggaaggaatgggccgaaaatggcccaagcggaggaggaggatttttattactttcccaattaaaataatcacttaaatgatctttgaattgttaaaaatacttccaatgctcaaataatttcaagaaaaatcatgaaaatacttggacactcaaagtatttaacaatattaaaaccagaccatttaatgattaatttaatatgtggattattactgaaatgttctttgtatgattaaaaattaggaattgagctccgaaaaatttga

SEQ ID NO: 14098 - DNA, 1087 bp, Oryza sativa
  unsure (1)..(1087): unsure at all n locations
aactcctacattcagatctttgtgaaatgaatggggtgttgacgaagggtggaaaacgatatttcatgacattgattgatgatgctactagattttgctatgtgtacttgttaaaaacgaaagacgaggctctagactattttaaaatttataaggcagaagttgaaaatcaacttgacagaaagataaaaaggcttaggtctgatcgtggtggagagtttttctcgaacgagtttgacttattctgtgaggaacatggcatcatacatgagaggacgcctccctattctcccgagtctaatgggattgctgaaaggaagaatcgcacactgactgacttggtgaatgccatgttggacgccgcgggactgcttaaggcatggtggggggaggcattngttgacctcaaatcatgtgttaaatagagttcctaacagaaataaggacaaaacaccatatgagatatggattggtagaaaaccatcactttcttatttgcgcacatgggggtgcttggcgacagtcaatgtaccaataacgaagaagcgcaaacttggacctaagactgtggactgtgtttttctgggatatgctcatcacaagcattgcctatagatttttaatagttaaatccgaggtaccgnacatgcatgttggtacaattatggagtctcgtgatgctaccttctttgagagctttttcccaatgaaggatacacatagtggttcgaaccaaccctctgaaataattcccagttcaatcacaccaccagaacaaactgaacatacacatgaacttgtctctgaggaggatgtcagtgaagctcctcgaaggagtaagagacaaaggacggctaagtcttttggtgatgatttcactgtgtacctcgtggatgacactcctaagtcaatttcagaagcatatgcatctcctgatgcagactactggaaggaggctgtccgtagtgaaatggattccattatcgctaacgggacttgggaggtaacagagcgaccctatgggtgtaaacctgtggggtgcaagtgggtgttcaagaagaagcttaggcctgacggtactattgaa

SEQ ID NO: 14099 - DNA, 544 bp, Oryza sativa
cggatcctcggccccagggcctcctgcatctccttcaaggactccgcctgccgctgcttcggctacatggtctccaagaagaagtacatctacaccatcgacgacgactgcttcgtgagcttctttcccccttccacccctcgattaacttcgcctcagtgagatctgtctctgttaaggtttgatctgctggttgatggccgctggatcttgggcgatctttctccactgccatggcgtgatctgtgtgcggggattttagatcttggtttggtggggatcggatctggatgtgtagttttagtgggggaaaggcgagatctctgggctgtttcttcgtcagcaatcggcattgccccgtagttagatttttgagtttagcttcagttttgcgagattagtagttctttttgttaggacagtttagtttagtagtgataaaaaaaccctttaatttttgcattacatcatactactactattactactgcatagtgctgtgatgtgggtaggttgaatgtgaatttcacatgggtaccgagct

SEQ ID NO: 14100 - DNA, 667 bp, Oryza sativa
ggtgagaatgggataacactcttgcagtcccattatgtggagaagatcttgaatcgctttggctacattgatagtaagccttctccaacaccttatgatcctagcttgttgcttcgcaagaacaagagaaattgctaggaatcaactggaatactcccaaatcattggctcgttgatgtacctggctagtgcaactaggcctgatatctcctttgctgtaagcaagttgagccgatttacctctaatccgggaaatgatcactggcgtgcgcttaagcgagtaatgcgctatctaaaaggtactgtggaattggggcttcactattctgggtatcctgcggtactggagggttatagtgattctaactggatctctgatgtggatgagatcaaagccactagtggatatgttttcacactgggtggtggtgctgtttcatggaggtcttgcaaacagaccattttgacgaggtcaaccatgaaagcagagctaacggcactggatactgctactgttgaggcagaatggctgcgtgatctattaatggatctgcctgttgttgaaaaaccggtgccggctatccttatgaactgtgacaatcaaacggtaattgtcaaagtgaatagttctaaggataatatgaaatcgtctagacatgtgaaaaga

SEQ ID NO: 14101 - DNA, 1311 bp, Oryza sativa
  unsure (1)..(1311): unsure at all n locations
atatcaagtaaacatggcacaagcgagcagataggtaaaccctattcccatgtaattagcaagacatgcatgtttatttgcaaacggtaaaacatttataaattgggatcaacatgctcaaggggaatgtgtgacttgccttgcttcttcacttggatcttctaaactcttttcctcgcgaccgcggacttccgaaacgacggaaactacacgctggcacgcaaaacgaggaaaaactctaataaaaaccaaggaaacagttcataaaaactaaacaaacatgtagagctcaattttagatgaattttgcaagttgaataggctcaattttcagttcgaatgaattagatatgaattttagaagttttgagccatttaaatgaatttctataattaaactcgatttattgcgcaattattaattatttttacaaaggaaaaaggatctcgctgacgtcagcaaggggcagccggcgccgacacgcgggccccacacgnagcgggtcaaggagctcggtgcaccgtggaccgggaccacaaggacggtccaccgccggtccacgggatggacggcccagatcgggccaagccgatcgggcagctgaggggagtggtggcagggcacgggcacagccagggctggcccgaccgaccacagagggcggcggcgcgcagacggccggacaaccggcggcggcggcggcgcaacgcggcgctggcacgggaggcggccggcaaagagaaaaaggaggagggaggcggctcaccgagaggcgcggcgacggagggagcggccgcggagggaggcggcggcgctccttgggtcgacgacgcggagggacgcacggcggtggatggcgagggcgaggaggcagacgaggtgcaacacacgacgacgaagccgacaaaggtgacggcaagcggcgaccgcggctatggcggtgatgattgccggccggaaacggtgaatggatgtggtggctcgggtgtgtggtggaaaggtggtttcggtggtggcgagggagagaaaaacggtggccgagcttgggcttgtggcgacgaagccggcggtgggacggagcagtgctgcggcggttctagcgacgggaggcggcagccggcgctcacaaaggcaatggcggctcgggttggcagtggaggtggcagcccggtggtggattgggggagtgtagcggtggacgacgtgcggcgtggagtggtgatgccgacggcatgggttgcgcggcgcggcggtggcgctagcagcgacgaggtgcggctggaggcgacgaatgggtcggcggcctcggg

SEQ ID NO: 14102 - DNA, 671 bp, Oryza sativa
atggtgcccgggcaccattgttgaaattgagtatatacccaattcaaatgagaatgaaactttttcaattacttaggtattaacattaactactttactaactagtttaaagcaagtttgaactgaatttgaacttgtttttgttagattttgattctaggtatatagcatccatacatataatttgttaggtatgtaatcatggattgtgaaataaagttaaatttgagttgttttgttgataagtataggtataaatcaaattattataactaggtatatactcacaatttgaaaattttgaaaaatttgagtgattttgtgcattagataccatggtgcccgggcaccatggtgccccatatgagtgtcctatatatatatatatatatatatatatgtggaagagtccatcttctattatatatattcatatgtgtactgcacattcatgggaagttctctacttctcttccttttaaacactggaagtaaataaataaaaaataatttcctagaactgccaacaacaaagtcgttgtagtatagtggtgagtattcccgcctgtcacgcgggtgacccgggttcgatccccgggaacggcgaattagtttttaatttttttggcacttgaaatgcaagatgcatttgtattttaaatgacgaaata

SEQ ID NO: 14103 - DNA, 739 bp, Oryza sativa
agccagacatgaagaagacaggggcctacctttttgagagtactgccactgcacatgctcaccgggatgtggcatacaagcattatgtcaatgagatggactgctgcaagcctcacatgtaagtacttccaatatcacttctagtagacaattacttctttaattgagatactaaccaacgacatctcttcaacttttgcagattgagtggttaccataccacacaaatgaggcttcaagcctgaccctgaactcgatgtgcaatcgagactctgactatttcatgtaccagtgcccattgatttgtttctgggcagttgagtaccaccttccgcaccgtgtcatgcgacagttcgggaagaaacaagattggccggttgaggacatctcaactggagttgaattacacaagtaaatatttcttatctttgtttgctttcattgtcaatgttcaattttgtaccatttaacccttgtcgatgctcactactatttcatcaccttctacttgtctaggtatgacagggtgagaacaaagaaggtgaaagactgggggctagagcataatagatacattgatgaatggagaacagccggaaggaacgataggtacatcgaaactatacaccaaaatcatcttttctcagagtaccttcgttggctgcataggacatatagactgttcctccgccctacttgaacgaaagccgacatagaggatgaccgcgactccgatgag

SEQ ID NO: 14104 - DNA, 2701 bp, Oryza sativa
gacccactaggctcatgctatacgtaaatgaagtgcatttctcaaaccaaagattgacaatttgccctacaccttcatatgagtttcgaacgtatgagttttacaaaacttccatagaaattagatcaattatcataaatatcctctcaaaccaaagattgacaattttcctacacttctacccttgtgactcctttggaactatgaattttacagaacttggaatttctcaggctgtcaaatactagtattttcagtactgaaccacggccaatcttgtgtgatatttgtcttgtggcattatctgatggacaggtacactacagagaaacgtgtactgttttaatacaagcagtactatcaagtcttcagaattaggcaggtcagcaatatggcatgcatccatgagggcaggcaatagactgatagagggtgccccccttgtttctcctccaattcaatgaactttgggacaggagtacaggaccatgatccagaagatgaattattcaatggcaaaattaaaaggctactctgcatttaatctgctaccaccctaaccttaccaccttacccttctgcctttgatgcttatctgaatctccttttgcagcctgaatataaaacactcctacctttgcaaagatgtaggttaacttgttaagtcactttatcaggattgtgcgtgttccttaactgtctgtcacttttgactcatattcagacactcattttaatgccaactttcagtgaccacaaaaactgtctattctaaataatgtagcccacttatagaattatggataaacaattgttgtggatcatttgatttgataaggtatcatcaccactttctagtagtagtttagaccacagtttttttgcatgtgtctttgttcatttctacagaataccatatgccatgccaaaagtatcatgaaatgacacataaagggagaaaagaaatatcaccttagaaccccaaataatcagatatatgatgaccaaatcttctccacaagttatccatggatggagatggacccctttgtcctgctccagcaagacgagctggcagtagcaagtgagaatattagtatcaggtagcatgtggtgaccatcctttgctctacacaacacacacaaattgttgccggcaaaagaggtttcttaaattttctataaaggtggccgttcctgtgacgatcaaatcattttttgtgtgtcatttctgctttttttttctttacctcaaaaaacactacagttagcaacaagaaagtaggagacagaaacaacatctcatgtttgtatgcagtgtgaggctgccaaatgccaaccgagtaggatcaagtggtatgatgggaggatcaatcgacaataatagtgcgggatcaattgaattagtagttggcaaatacagttgctggcatgtctgtaccttcgatacaacctccaattattctactgccactagtagagatggatcatggatgtccacttcataggtgtcatgtgccagcaggctcttcaggacagagttccagctcctgatttgggtcatgtgattcacagcttaggcacaatgctttttgcagtcctgctttatgcctaattaactaacagtaagaacatagcaatctctaaagatatgaaaattcaatcctgctttggcttgttggatcatggtgtacaggaatatatctctttggcagatgccatggtgagtaaactaggccgcatcagggaagcaaatgtgtagcagattgcacctgatcatcctaacaagagaccctcttttatcatccaaaaaatgtaatcttttctttccaagacaaaaggcaaccctctaaattctcaagctaggaagttacacacagctctggcatatccacagatgacccagatgcatttcagtttcttgcctacatagctatacttcatattattgcatacaaaaagaaccaaagcaatgtacactctatactctatggaatttacacggcaagaaagcatttcaggcatcaacagcatttagggttacagattttgttcttgggagatttgttggcagctgagctcctgtgtagtaactcctagctgtaaacatgagatctggactgctctgtgcatcaacctcacaatgccgggccctttgggctcctggatcggggtgccggctatggtacgctagattaaaaatgtcagggtcctcctcagcgtctctagcgcctgggcttcgctcgcaggtcggtatgcggaaattgtgattcttaccaatatgaaaagactgtaacttgttcagtgaagacttcatcctcctttctccattcaagttgtcaaagtccagagatggatgaatagctctccttagatgtgccattttccgtgctttgtatttggccatctttacttcatgcttcatgtcgaacccttttgcttggaggctagtgtcatactcatagtgccgaggtgagcaagactgttcctggaatgaactaaaacaaaactggtcacgaggacctcttctacccatttgtacaaacccattactgtgtacggcttcctgatctttgacatgttgtgtttggccacctccatcatcagagctgcctccggagtcctgcaaatcggtctgctctccattggcttggaatgttatctcctcaaaccgcccatgtagctctgcacactggcaacc

SEQ ID NO: 14105 - DNA, 1435 bp, Oryza sativa
agtgtcatactcatagtgccgaggtgagcaagactgttcctggaatgaactaaaacaaaactggtcacgaggacctcttctacccatttgtacaaacccattactgtgtacggcttcctgatctttgacatgttgtgtttggccacctccatcatcagagctgcctccggagtcctgcaaatcggtctgctctccattggcttggaatgttatctcctcaaaccgcccatgtagctctgcacactggcaacctcgagcagcagatgacatgtaggcataaagtgaaccacatgacgatacatttgatccgcagttatggcagtatgtagtgtcttgagattcctctatgcctgggccaggcctccaatctggcaccagtgcactaacctcgccatcaatcatctcagcaattcgagtaacctcatggtcagttatatctagctcggctaccatctcagttgcaacactcaatgcggtatcggcctctatgtcaaaaggaaaatagatgttccgtacatgccctgcaaagtgagaaattagatatcaagaataatacaatttggcatttttttggtgcactgaatttaacccaagaatttaaggaattgaacatttgtgcataccatcattatctgcaatccgtaatctgaggaatatgcttccatcctcactttttctccctttgattgtgatatccacattgccaagaggctcatcttcatgcccattgaacaagtcaataccatcagctttaatgtcatcatcttcacaatcccatctatcttccgttggtgtatcctcgtcaatgctttcagataatccattactcatcatggagacattactataagcgtgttctaaataaggctgccgcagatagttcatcaggctgtaatctccatcacccggacaaaagaccaaatcgtcaacctgcaggaatgggtccttgagcagctctctcgctgagagcctccgggatgcagtggccaggcatttctcgacgaactgcctcaccatcggatctttgaccttgtacaacgcttccggcttagtaccctatcagccaaaccactagctaaaatcagcaaaaaccgtttcgaactagccacacaccagaatcacaaagtgctgcaaacattacaaggatccaggaggcaattcttacagagatcactttcttgtagatctgcaccgggtgcgtgcactcgctatacgggtactcgaaggtgaccatctcaagcacgcacatcccgaacgagtatatgtccaccagctcgttgtactcctcctcgtacacctctggcgccatgaactccggcgtgcctaaccaaacaatcccacacctccaccccaatcaaattcccgtaaaactactgcaaattgggatcacgagcacaatccagtagcactatctagccaatcagagacgccttac

SEQ ID NO: 14106 - DNA, 5772 bp, Oryza sativa
acactgagcaagcgcaaaaaccaaactctttctattgcctaaccgtgtaacaacaccgaacaaatcaatgggggtaccggtacaacaaatatcatcgctcttttacactaggatgtacacgccaatttacagaatgtgtatcatgccaccagatcgtagtggggaaaaaaagggggatgtagctgtcaattcttcttctaggatgtcattttctcagtctagctccgctatgaagttgggtagctcaccctggcagaggtattcgtcgcagtgggacgcagaaccccagcctctccgtagacgcaggatgtcctctgtgaaggttgagcctgatgcacctatgaaaacgttcgacagcgcacagatcgtcttgtcgagcatggcctcaacctgcaaaaaagccgaaccggtttgccgtttagtacaacaacaaaaggtccaaaagaaatctggacagcaactctgaaatgtatcggttacctgattgtctccacccatgtgatttctgtataacaaggcatcccatttctcagagttgtggtgctctggccttttcacaagagggacttgcctgtcattgaacacaaccaaggattgcaggagacttgtctcactctcggcagcatcagtagacagatatatgactggggcgttagctttctcaacgattcgaagaatgcattctgctgcctgagggatagggaagaagcagctctctttcttcacattactgcaggaagatgagaacatatcagtaaatgcctcattattcaaaaaaaaacatagccaacttgttgcatacatcactcaaaataaccacaagcacatagtattgcaaggaaagacttgagcagttgcgctagcattagtaacatttaaactactcttagtgcatggcacaactgcacaagtcatatatcatgctcaatcaactcctatacatgtatcaatcagattcctttgtagtattgaagtaacacctagtagttttttttacagttacaagcttaaaaacaagttatcttctgtaaccctttttgttgatggaacacaaaatacttgttatttatttgttatactccctccgggctgataatattagtcattttggacaagggtaaagttaaactttaaaatctttgactacaaataatttctaaaatatttatcttaaaaatatgaaaaccatatgcgtagattagtcttaaaaagtacttcagtaaaaccatatatttgttgatattcctatatatattataatagaaaatagttatcaaagttactttttggagaccttgcctttgtccaaaacgacaagtattatcaacccggaggaagtacttgttatgacatagttctgacccaacttattatgcttaattaaaactagtcaccttcaacgaattttgttcctcagtaacctgtaaggcgctgagtgctaattagtgaataccaagtgctctagtagaaagtgtattaggctcaaatagtgagaaaacttaccatgacacttaaggacactgcctcacaatgtgagaaccaagtgcagcaaccagctccaaaatgggcaacaaagatgaatgaatttcccttctatacaagtatgcagctaattattttcaaaccatgacttgggagttaaagtgttctgctggtcacatgttaacagcaactgatgtataacttaactgaatgtccatgaattctcaaatactgttattaagtcattgaagataacattatttatagcttggtatgaattagttgaaaatcttgaaccaccaatcattttagtcttgtaagcaccaaaattctaagaaggtatttagatacaaacattccaggtaaaattctcaaaactattgccgtaagatataaaattaatacgggggactgatttacatcagctgaacaaagaaattaatacagtactatgtagtacttactcccttcgtcccaaaatataagaacctcgtactggattagacattatctaggaccacgaatctggacaggtccagtactaggttcttatacttgggatggaggaagtacaagatagcatttaatcgatttgaagtagcaagaacaacattatttcagtatgctagtcaatgttagcaaatagccaaacattgtagctcaatattatggacaatggctacattgcgtcctagaagatactagtaaatttgttgttaaccaggctcttcattggctgcatcagaacttttacgaaggcccaagtcaatctgatcaaggccagaacatacaagttgacttctataacattttatatgcttagatctaagtgaagcatctaggaccagctccaagcgctccctatgaaatcaagcgcctggtttctaactttcaatgcaaggagctcaacatgaaatcaagtgcacatctctatgtgagttatttaatggaataaaacctatgcttaattgaatgtccatgagaactgagcactaaaaagatgataggattttctctaagccaacacccagcaactattagaggctaattggcacgatcttcttgtaaaatgtactgcagccctctcaataattaaacatatctgtattgctaaaacatggaggtgactaaaaacgaaaaaggtatcttaccagaacttcaggaagccatgtcgccgaaaatgcaaagcaatgtagttgccccccaagaaggtctgaacaaagcgttgcgcagtgagcataataagcctacttggctggatcaaagtattgcacttgtgagccaatgggccaccaggctgcatcacccactcttcctcaacatcagcatagaacatgtcaccgatcgcgagcacctcagcatccgtggtaaactttggcatgatatcctccacaaatctcttctttggctccttcagcttcgcatcctctggccaagctgcctggatctttcccagtgaaatccccaatcccttcaacttcttaacatgatcctcatcaatgaaacaagggggtgatgccgcgtaacatatgaactgatcaatgctcactttcttcctcttctctgtgaattcctcataggtaattacaaccttccttccaatgcaatcattaatgtggttgatatcaagcacccggtcgtactgataatccagcttctggctaggcaccaccaagatccggccaagcagcgccgcgaagaacatgtgcttctccaagcaaatcaagtggttggacatttgcccggagacgcagatggcgaacaggaatcgatctttcttggggttccactctatggtccgccggttggacggcaattccctcctcctgcacccgtcagccggcagatcaagatccaacccatcctccgtcgcattgcccgcagcgccagtgcggtgcgcggagaggagcgccgcctggatctcgcggttgatcttgatctggccgaggagcgcgtcgtggagatcggcgtacgagacagcgttcgagcccgagctgctgccgttggtgggtgctgccgtacggttgaagagggcgaggaggcccgagcgctgcgagcggaggaggtagagcgcgcggagctcggcgtcgcgcatccgggacgccgcggggtcggcggcgggagcggcggcggaggggaggcggatggaggcgggcaggcgaagggaggacgcgccgccaagggatacgaagagcacgaggaagaggacggggagggcgacgaagaggaggaggtagcggcgggaccagaggacgcggccgagcgaggcggcggagggagggaccgcggcgcggaggccggcgacgtggaaggaggaggagggcggcttgacgtggttctgcgggacgagggtctcgaggtcgtcgtcctcgtcggagacggaggggtcgcgatccatggcggaggagagtgtcggtgcggcggggtggacggagtggggaggcgggaggggagggggagagtgcggagtgtggttagagggaagaagcgatggagattggagggtggacgatggcgactgtcgaacggtggtctgctgctgcagaaaatgtagaaaaatgttttcctgaatgctaatactactatatctgtcttatttattactagttcttttaattaattgtactagtattgtgcatcaataaagtagagagcatgaagtcatgaccatcatagtgatttttgcagtgaacacaaactatgccaaaaaaaaatgtggaagtgtttcaataaaatatttgaagaaagactttaacacatagcttgcaacaaatgttctaaataataaagtagaaatactgaactcaatacttctgaatggctgctaaaaggctaaaaaagcatggccaaattagttagagtgttagagcatctccaacagactccaaatcagactctccaaatacctatataagcatatctttaattggtttggcaagctaaactcgttgctaacttcaataatctctccatctatcatttctactctaagtctatactactggtatacatatgttatcatctactacctcttcttcttccttctctttattcccctttccctcttctcctactgggggcatccctaagctcctccttggccctctccatctctgtggtggtgacgtccgtgcaaaggcgaacagcgacggtgacagcggacaacgatggaagatccatgagtgcgtggagcgaggtaaccaacgcgggagaaagggaggttgttggcgggcacggtgaacagggcgaggtggctctagagactgcacattgtggcggtgcccatgctacaacggagctcgagctcgccatccactcccaaccccattgtcgctgtaggcatccccacaccgtctccagtaaagtagatggaggagacggcgacgaatcctgagtcgaatccatacgggggaggaggcggtggaggtcgtgcgaggtcagaggcgacggcgagcgggaggccacggtagcgaggaggcgcgttgaggcggagtcgagggagaggcgctcccgtcaacgccaaccgctcccaaatgaaggaagaaagagaatagaatgtagtgggacacgaatagcaagttgagtaggctagttaagtttggcaagtgagagaaggagtttgttagcggatgacttggagagtgggatggatggactgttggtgtgcgatttttatccataattactaaattttgatttaaacagtgggatgaaaaggttgctagagatgcttagcatgctgcaaagtactacataaaactctgaaaccacttctgatttctaaatagctgctacggttgctttgtgcttgccataagaatatttgggaaaggaataacataggaaatccatagaatttgtatcttatagaaaataattatacgaagtcctttaaaacaaagtatttcctccgtttcagaatgtaagtctttctagcattgttcacattcatataaatattaatgaatctaaatatatatgtgtgtctagattcattaatatctatataaatgtgagcaatgctagaaagtcttatattatgaaacggtgggagtatttgcttttaccaattcctttgaaattcttatgggatgagctattgtagtgcaattttgagggtaaataagcatgaggtcttacctcatattttcttcttctgatgtctttgcgttcctacgttttttatgtattcccgctagttttatgaaactttcatgtgttttgaaattttataggaatccattgagcattacgttttattcatgcttttttctacctctgtgtttttat

SEQ ID NO: 14107 - DNA, 584 bp, Oryza sativa
cctcgggaacaaggcgtcaagcttctcgtcgatgtccatgaaagcgagtgcggagcccactccgcctcacgcaccttggttggcaaggcctttcgccagggtttctattggccgacggctctcaacgatgcggtcgacctggtccggcggtgcaaggcgtgccagttccacgccaggcaaacccatcagccggcccaggccctgcagaccatacctctttcgtggccgtttgctgtctgggggctcgatatcctgggtccgttcaggcgggccccgggcgggttcgagtatctgtatgtcgctgtcgacaagttcactaagtggcccgaggcttatccggtcatcaagatcgataagcactccgcgcttaaattcatcaagggcatcactgcttggtttggggtgcctaaccgtatcattacggataacgggacccagttcactagtgagctattcggtgactactgcgaagacatgggcatcaagctctgctttggctcccccggccaccccagaagcaatggccaagtggagcgcgccaacgcggaaatcctcaagggcctcaaaaccaagaccttcaacat

SEQ ID NO: 14108 - DNA, 649 bp, Oryza sativa
ggtgaagacgtagacgcccaacaacggcggcataaaggccagccgtgcaggcggaaacaccagtcggcagcggcgaaggcaagccggtcggtgaagacgtagacgcccaacaacggcggcataaaggccagccgtgcaggcggaaacaccagtcggcggcggcgaaggcaagccggtcggtgaagacgtagacgcccaacaacggcggcataataggccagccgtgcaggcggaaacaccagtcggcggcggcgaaggcaagccgatcggtgaagacgtagacgcccaacaacggcggcataaaggccagccgtgcaggcggaaacaccagtcggcggcggcgaaggcaagccggtcggtgaagacgtagacgcccaacaacggcggcataataggccagccgtgcaggcggaagcaccagtcggcggcggacgaggcggccggtcggtgaagacgtagacgcccaacaacggcggcataaaggccagccgtacaggcggaaacaccagtcggcagcggcgaaggcaagccggtcggtgaagacgtagacgcccaacaacggtggcataataggccagccgtgcaggcgaaaacaccagtcggcggcggcgaaggcaagccggtcggtgaagacgtagacgcccaacaa

SEQ ID NO: 14109 - DNA, 3554 bp, Oryza sativa
taaatgatgcacttttctgtttagtgttaactagcaaatgaaatgtaattaaattaaagatcaattttgagattgaaaggaaacaagaaaacagttatcaaagaaatattatgttcctaagttatccccttgtgcacagcatgatggtccaaaagtagtaccagacatcgcagcatcatcttttttcagtttgatcctatccttataacaggggattgttttaatatagacctgtgaactgcaatgccgtggttttttcatggtgacaagaaatcattttgagcttttaacacgatcgatgcaaaaaactgatatcacatcattgaaatggaatcacctggaaaggcagagaaggtgaaggatcacactcccaaagaagatcatcagttttcagctccaagtacattctagcatccagtcgtgatttcccttctaagtaaataaatgataagacatactgtaggcaaaaatgatccctcagtttgtccagtgaatgttgcagactacgtttccactctttgtattctatggagtatatagatccagagccaaggccctcgcctgttccaccaattctcttcttctcggtttggatatcaaaaaatttggatacagctgctggcaataattcatctgctacagtgtatgctgttccaatgagttgaatctgctgggcatcactctctgctttaaattctataggctcttttgactccactagatgatcatcctcagaagctcctggtaagacttcaattagtgcttcaacatatttatcaaatagctggacaaatttattcaaaatcgttcctccaaagtgaactatagtcattggggtaatttgatccaaaacatcctgaaagaagcagatacagagatcagctgcttcataatatagacaacaggtggtgtacattaaattctaaagcaactcgatgaactgcacgctgttctaatttccattcattccataaaagtgtgtcatttccaaatttctgtaataggctatagtattttggtgcctgcactaactaatgctagtgggccacgtatatttatcatatgtatgtgggcgcagggatatgttacatgtatctttggttgctttctaccaagtaaataacataaagcaacggcgtacattaatccaggtgtaatttcaacaaggttttcaagtggtgctagaaacccataccaacaaaaagaaatgctgctatagtgctagaaaccaggaaatcatgtgtatcttaaaatgagaatgcattggatttaatacatatcgagtttagtgacaggatcattcaattacttaataatattgttcagttgaacacaacagaaaactgaattgtcagacacattaagaaaaaaggttgtaataaggaaaatccagtaaaaagaataaaacaggaactcacattgacaatggacatgaacttctttccactgcttgtaagcattatatttggtgcaactgaactagagagccgtgatccttcttgagggctgggaagcagaatatcatcattttttgctgaatctacaatctttcttctcagccttctaaaattcagctcaagcacttcttcaacataggggtgcaatagtaccattagtaaatttgagaatttcaggccatatgattctagataagagcagtgagtgagactagtttggatgcatatgcaggcagaacgaagggcagatacgctctcaggcaaaggagaattttccttaaccaaacgcgcaaaggtttctatttcatattcagcccactgaataatccggttcaaattcatggggctatccccaaatagcgaactagattctttggatacctttgagatagctgagaaaacaatctttgacaaagttgcagagtaagtttctgtgtagatcgaacatgttggaagaaatgcttcaacatttttctgaagacgtgacccataagcttttagaagtacttggtgggctagagaacctttgccaatcttaataaggccagacaaagatttccttagctcggtaatagataaagaaggctgttctgaatacctaacaagctgatcctcaagaattgatttccttttagatagtgctgtcttataggtagaaatctctgcatctaattctttgccaggatcatccgtagccatacatttcttctcttcggtttccaaagcaagcaatgcctcctctattttgtgctccgcgagcaaagtatctaatttatccagaaaactaaccttggaatcttgggtatcatatgacaaaatttcatcaagttctgtttgaaggtctttctcttccacatgttcatccttgcaatgtttttgccacatttcgagttcacggcacacaccgctcattagatcttgcacaagaatcccctgggcagacacatgcttctgcaactcaattaattcttgttctgcctcaacaacctcctcagatattctgcatgaagaaaacaaacaccagaaaacattgcggtagattaaaaacagcaaatgagtgcaaggaagtaggaagaaacgctaaacattatatattactttctaaatttatagcgactcaaagataaaagctgaatcgtgcgttaacaaaacattgatgaacttgggaaaaggttaacttgtacgtttcagcaacaagacttagtaaagaataaacgaccaacaagaatataaagggaaggatccatagagacaacattctctctaatatcagaagggaatgaatcgatcagtaattaacattaacctgaggaaagcgtggtatttcgactgcatattcccgcacaagttttcgatagcatccttcaactccagtagctcagagcaaattttcctgatgccctgttcaacacagcaggtagcatcagtgagtagagtaccatcaccacactagcaagaaggtctcagcaataaccagagtccccagttccccaccagaggccccagcagacacaaatgcaggtgaaccaacacctccatttaagttcaattgcaataaggtcaagctagcctaggttgtacttcagattgcattgcagtttgcttcaattataactcacaccagattgtattatcgcacacgctacacaatcaagattcacaaattataatttgttaaaaagaactcgatgcccaaactgctgcatagattaattagcggttgccccttgcaacaccaccacaccacagatccgaaaccgtaatataaactcgaccacaaagcgagcgaaatagctgcaaggagatggcgagcaagaactagccgagacagaatgtgggagcggggggagagggcggagtggaggaggaatgaaggaaggaagggggggcaaaccttctcggtctgcgactggtaggcggcgcggatggaggactgcggggtgatccactcgtggccagggaagtcctcctccagctcctcctcgctgctgctctccatcgccgccagcctccccagcttcgtcggaacctcctcgccgatcgagagagctgcggcttgcgggctttgcgcggcggtgtgcggcggggaggggaggg

SEQ ID NO: 14110 - DNA, 679 bp, Oryza sativa
gactgtggttcatgcactattgtaaatggatataacaaggtttttgtattcaatgcagcatgttcaggagctgctttggtatatcagatttggattatggtgggtcatactaggggtggcttcatccattgggttaggtaagctcgtacgtgcaagttgaatttagcttagtgaaatggtgtgaacaagcttcaattggttgagtaaaatattgaccaaacatctaaacatttagtattataacttatacaagaagtatggttctgaaggcattgtcatttgtttttcaggctctggtttgcacacatttgtattgtatttagggcctcatattgccctttttacaatcaaggcagttcattgcggtcggactgatttaaagagtgctccttatgatactattctccttaaaatgagaccttcatggttggagaaagactgtctagaatttggaccgccaatgtaccaggaaacaattccatttagcaaaatactgcatgaagttcaccttgaagctgttctctggggcattggaactgcacttggagaacttcctccatatttcctctcgagagcaggttgcgtcttactgctttgctgctatagcaccacttgatcatatgcttttcacatgctcacagcctcacaatatgtccctttttatcttcaatattaatca

SEQ ID NO: 14111 - DNA, 2287 bp, Oryza sativa
gcttgggccaacgccgcaccccccctgggcgtgcagggttggccgggggctaccacatgcatatacttaccttttttttcttccgtattacaataaaagcattttcgatttcttgaggactgtgtctgggccatcgttttcttttgaagaatcttggcttaaattagcacgctcgtgctcgaccctgccctcggtggcccgggccggctaaaatcgccaaacggggcccagaaccgagccgtgccccggggcgtggtgaactccgggggggaatcggcaaaggcccacaatcgggtcatccataaccctcggtcaccgcgctcccggcttggccagtctcgacacgaggatctccccaggcactagccccgacccgcgccgtttgaggctgggacctgggcacgagcccttgttcaagccaagacacagaaggaccgcggcacagaccatcctcgtctcatacacacaacaaacagaactgacgtagaaatttcctctttacttgattgcagattaaatcagtctatacaagaagggggcccgaaggcctcggaagaagaaggaaaagttattaagattggcgggggcctgggggctcactccgacgcgcccgggtcgtcggcctcgtcgtcgctgtcgtccgcatcgtctcctcgagctcctcggggagccgctcgagggccccggccatctctgagaggcgctgggcgaggcccccctggttggcggcgtacttcgcgtaccgcccgccccagaggcccgcctgccgcccggcgcggtctagacgggagacggcgtcccgaagcatgccgggccctacctcgctcgccaagcggagggcctcgacctccccggcggacgagtccagcgcgccctgcagctcggcgatggtgtgttcggcggctgcgaggcgggcggctaggtcgccgtggcccgcgaccgccccgccgctgtgcgctctcgcgtccagctccttcgcccgcgcctcgagctcagcggcccgctgatccagtgcggccctctcggcgcgggcgctttccatattgcggcgcgcctgctcctcccgcgctgcctcgcggaggaacaggctgtccgccagccgctgcgccgcgggctcggcctcctcgagagctcgcccccgctcggtgagcgcgtcctcgcggaggcggagtgcggactcctcttcggcgcaggcggcctcgtgcgccgccagtgttgcctcccgggtggcgacggcgacctcgcggtccgccaggtctctctccttcgcgtccagggcgcgggcgcgctcctccagcgccgtggcgcgagcctcaagggcctcttcgcgctgccgggacgccgcctcgttctccgccgcccgccgttcccgggcagcggcggcgtcgagcttctcctctagctccgccgcccggctcccgtattggaggcggaggtcgtcccgcgcctcgtcgagcacgtcggtggcgatgagggcagtctcccgctcctcctccacctccctggcgatctccgccaggtccctacgacgggcctcgagctgtgagacgtgccggcagtgtgccttgcggcccgcctccaccatggcctccaccgagcgccgcccctcctcgacgcgcgcccacgccgcgtcgagctccgcccgctccgcctgcagggcctccatctgggcacttaacccgtccagcaccgtgctgttcgcggcggccaaggcctgcaggaggggctccgcgctcagtggggcagcggaaggcagaggggagagccccctcggtgtgggtgccgcgcggctcggcccgccgatcgacgtgccggactcgggggcgtcccccgaagctggctcgtcccaagcgtcgcccgaggggtcgggcccgagcggcgcgcccgcggcctcgtcgtgggtggccttggaagtcatcgtcgcctcgggcggagtcgggtcgggggtttggcaggccgcctagcgtgcgcgcgccgcctctgcctcccggacggactccccggcccggcggagtctggcctcctcccgagcggcctcctcagcctggcgaacccggacggcctcctgggcagcctcctcggcttcccggaggcggtccgcggcttctcgccggtcagcttcccgcctccgggcctccgcggtcgccgtctcctcggcctcagaccggccggacttggaatggcgggggggggggcgcgacgggatctcgctgaggcagaagaaaaaccagaagacaaaaagaaacgggtgagtgaaaactcgccttgggagatgggagaatgaata

SEQ ID NO: 14112 - DNA, 1394 bp, Oryza sativa
gaaggtaatcgccgaacaccatggcccccgtgagcccctgggatcgcagacccgccaggcggtcaagaacggcgtcgtagccgtctcccagatctaccgccgcccgccagctaaagtcatgcgccgggggctggctcagaagtcggaggcgcgcttcgtcggcgaggggggtgtagaaccaatcgctcttcaagtcgtcccactttttgcggaggacgcagggaatgtaccggttcagcacgtgcccccgcgtctggaagtagcagccaccgactgccgtcggcggcgacactgtctgtacggtgaagaacccccggaacagccggagaaatgggcgcaccccgataaacatctcgcacaggtgcacgaagatgcccaacgtcattatcgcgttgggggtgaggtgcgccatctagagatcataaaactccagaatatccatgaaaaaaatagagaatggcgggaccagcccctccattgcgaaagagagaaagaagacggaccgccccgggtagtgtggcgccgggcgtccctcgcccagcgcgaccacctcccggccggtggcagattccggcatgaatcggcgcggcagcccggcctgcctctcgctcacgatgcgggaaggcggcagcacgctaccatcgagcggtgcggagccccgtgccatgacgccggcggaggaggagcttgagagcgagcgagtgcggcaagggtagggcacaggaaacgaagagttagagcacaagtggcgaaggcaaggggaagagtggcgagaggaaagaaacgaatcccttcctcggcgtctttacacccttgccaacgctatgcccggctcctcgcttcccgcgcccactacctcgccccctcgtttcgcgcgcccacgcctccactaaccccactcgcccgtttgcggcgcatgcggcagatgtgcggccgtggcggttgagatgggcagatcgtgcgcgcattaactacgcccgccaaccgtgaaatgcgccatcatcatgtctccaggcgaaacgaaccggctcgtcccgattcgcacgctgctcgagtaatgtagcggtcttaaagaggccgctcattattgtcggtcggttttcccttgccgatgcgcgcgatttgcgaccgctgggtttctgcccgcctgtagggaccggccccacctgtcaccgggcctaaggagtggcgtcacgtccgagcgcttccctcgaggggggcgatcgccctggcgtaacgccgggggctactgtcggtgacatggggccgggggtatcgtgactatagaggcttgggtagccgcggtcacccacgtggcctgcccccctcggggggggaaggggtcgggcccgagggtgacgtggccacccctccctctgtctccccgaggggtc

SEQ ID NO: 14113 - DNA, 2080 bp, Oryza sativa
actcatcattgtactgcagcatgtatgatagcctctaagttatgtcacatacacttttgtcagacggaagtacttaagacttacttttaggatgaaaaatggattattcacaggtaatggaaaaggtaaatctagtagcatgcaccagggtgggatagttggcagttggcactgacctcaggggtatacacgtatagaacagcaaagcctcccatgatgcaagtccgggcacagaatagaagagtagttactgaaccttgtcccaaatgtacagcaagtggtgcaaggaaagcacaggacaacaaaagcatgatccccagtgacactttccgaccaattctgtcaaccaatagagccgccaaaaccagacctggaaattctgtcaattcaaacatgtatttttagcagtcggaacattgaagtgattatgaaattaacctcagcgttgttataagctttttgactgtaagagcttggtgctatttccgatattagaaaaaatgggagagggttacctctctttctaaaaaaaactattataacctctttttttggagatttagtctaagcattttagttcagcaagttctttctctaatgtttatatatgctatgtttcacttctactactgatggttaagtgtatgaactaaatctttatacttttactaatctagtttcttaaaattcaaatcctaacactagatgagtaaggactaagcagcaattactaggataacaattttattgaacaacttgttaaaagaaaactttttttaattgcctgctaccatttagtttctccttcaggaaccttaaatactgatttagggtcagaaatttttcaacaaaaaataactttgatgatttctagttttttgcccaaatatggtgaatcaacagatgaaactctggaacggtagaagcccatcgaacctaaagagtgaaggaaaagatcgtgatggagcacaattgcacagtcgtacctgccaaactggtcactagcacatctctgtaaaggttggcatcctttggttgcataaaatttatcccaactgatgcacaccttctctgaccattgctcagttcagaggtcaacaatattaccccatagtaagcaaaataatttgcaagatagacaaaccaaagaagaaaggttgatcttattagatcatatgaccaagattctcgaagtgcagtaattccaccaggcttggaacttgtatgctcatcaattccagaaccaccatcttctgtaattagaagtgctgtctcagaatcatcgagcactttgtcgattctccttgtggaggcataagtcagtatgccaggagggagagagctattgttcattcttgctattttttccaagatgaccctagcgtccattgttcttcctactgagcatagataccttggtgattcaggtgttacggggaagaaaatgaacaggataaaacatggggccgaagacaatgcaagcagccacctccacccaagtactggcatgacagcctgcattaagcatatacataaaatgtgcagttagcgatttatgtaaattgattaatgtaaaggttgtgatttccctaaaaaaagtgtaaaaagcctttaagcatttgaatattacaacttggtctacatgttttcttaggttgtaatcatacagatatccgcccagtgagaattaaagagtgaagaaataagtagcaaaatacccaggcaagcagagcttccaagattgttcccacagtccaagagcaatggaaaacgaccatccaggtacctctctttgcagcaggaacaaactctatgaaccaagtggacagcacatggccagcacccaatcccaaaccaacaacaaagcggaggacgagcaaggatgcgtagttgggggagaaggcactgagcgaaccaaatataccagtgacaactgccgtggaaagaaaaccgatcctggaaatggagaacagcatatacatatcagatgtagtatagcttttgcataggcaagtacatttaagataaacttgattgcttgttgaatggagagaattcagtcaaaatggtatgttcattt

SEQ ID NO: 14114 - DNA, 5480 bp, Oryza sativa
catttgcctaatatggagctacgtgcaattaagcatctgccattctattagtatagacttgttgatacaaatgcactcataatgttttttctaaagagaagatgataccttttcatgtggaccgttagttaacaagagcggagtacaggcagaagcaaccaaaagaaccaagaacttcaaccgagcactatctttcagaacacataaacatgtgctttttatactctgtccaatggctaatgcaaataacgccaatgttctgagtggctgcgatgttagcgttaatctctccaggtcaaattgatgcttttcacgaaggtctgaaacatagagtaaaccagttacagaagaaatatacagtaatttgatatcaataatacgacaaacagacaaggcattcattggtatggagtatggagaatccaaagcatgagcccaatttgttgccttcttatgatgacactttgacctgtcggacttatccatgtttcggtggtgtacggaaaaaatgcagccacagcgcgcattggaaaccccaggtttagaaactacgcatcgtgggcactacggagtagaaattttgttgtgtacaatgccttgaaaattgaatttacatttgtaaatgctgaacagtaatacccaatcactccataggttggttattcccacaaaaacacacactaaagctcgattagaaaatagcatgaagctcgattagaaaatagcatgaaaaagtactagttttatttcaaattccataatctaaatgaacgaaatattgactaaaagcctcaattcgagcattactagtaaatctagtcaacaactccaacacctaattaaaaaaaatttagcaatgtctaacaaccatggagagagggatcctcttaagtccaacaaagtagatgaaatataccaaaatcaagcatgtaatataaccagcaaaggaggacagttcaatccttccttagtatcagcaggaaaggaaagcaggccacagatcattgaatcgtccctatgaatagagaaaaggaaacaaattccaaattttcgggaaaacctcaatgacacgcattcgcaggtccatgaaacatctaacgaaaatctttttattaattccacatattaaaccatggaatcttgaaaataacagcaacaaatccctgaacctctacgtggcttcaaaaaccaaaatttcagacagaccaaaaaaaaaaagccaagacaagccagcagcaggaggctcaccggacaaagcctggtcctcgccggcagcggcgtcgtcagcggcggcgggtcccatctcgcagccctcggggtcgacccccaccctgccgcctactagatcagatctccgatctctccgagtacgccgctatatacaccaattggaaaaatgatgagaacgagaagaaggcgcgagcagaaacgcgcgcccccacgcttctccggaggaggaggaaggaggaagatcacgaggatgacgagctcgacgaatcgcgaggcgcgcaaaggaatcgctcttttttttttctccgagcggaaagattggggtgctttttgggcgagcggaacggcagcgcaagggtgaagaaagaggaaaacaaaagaaaaaagaaaaggtttttatgaaagcctcttcttttcggttacgtacatactcaggattgattttcagttaattcacccgcgcctgatgcaaacgtgtcgccgtaactaagtacaacaggtatagcactctacaaggcgtgttcttaagctaattaaactactccatgctatttctttttcatactatattaataagatgcgtgttcatagcggggacaatcgatcattatcaggattttgccggtggtcggaatttagaaacagaattggattgcttctggttctattaatgtaaatttattttatgtacaattattaaaaaaagatatgtgcataaattaaactgatcaaactatggttcttgctggcacaattccagattaataaaaaaaaaactattttagttgggtacttctagttctacaaatccataagttcagatatgtattatgttgataatatttaaataaattattttattgttattttaaataaaatataaaatttgctttaaatccaacgtgaatttaagatctagagttgtgctaaacaaaatgtatcgccataacgcagacccatcgcaactaataaatggtacattttcttcttcttcttcttttttagaatggaagtggtgactcattttagtcttcttttcttttacattcatcacacaaaagatatatattgttctttgacagatgacgtcatttaaccttttaacatgtgtatcattcaaaaattcgtgcatatatatataaaagtaagtgatgtttatagtaactttatcgataaaccaagtcgcaacaaaataaataataattatgtgatttttcaaataagaacaatgatcaccagaatcaatgccgtcatctattaaaatcagaggtagtttatctgagataggtaaatagaagaataaattaatttctttgttagaaaactcaattagttttttttttttttgcgtttttctgccattgttggggcaccttcttctcaaattggccttccattatgtacccaactcgatcttattctgttcgacgacaccatcgagccgtagcgacaggtcgacgtagcatcaacaaaccttatcgatcaccttacgtggtcatcgggggtcgaaacttttgtttctctattgggagaaagccaccgagggacatttcgtgcacgacaccgcgcgacgatgatcacattggagaagctaaactcacctgtcatgtttcttcgccgccccgggttgccaaaacttgcaaagtaatctaagacctttgtctccaggaataaacacaacatgtgtcttttctgcttcagatatcacagcaaacctgtgatgaaatcaaagaaaccgtctttccagcaagaaaagaacaagaagtaatgtccatatatgtccatcagtgcagaacagcactaaggcagttcaggctgtgtttagtaatttagttccacgccaaaattggaagtttgaagaaatcggaacgatgtgacgaaaaagtttgaaagtttgtgtttgtaggaaagttcgatgtgacagaaaaattgaaagtttgaagaaaaaagttggaatctaaacagggcctcagtatcagtagcctcaatgtctgttcaagagcactcgggctggtctgatgttaaaggtggcgcctcagcatcactgcatctgtagttctgtaccaaacaatgatggatctaactattgtacagatctatggggcatttgcataacccaccagtttgtcacttttttctccctctgaatatgtttacttgggtcaatttccattcgttgaaatgccttgcaagacgaaaaattcaaggttactccgttcattccgtttcaagagagagttcaaggctagaagagtaaaattagtacgcagataagaaaggctgcgaagaatatacttgagcagacataagagtgctctcataagtcagaactaccagaaataaaacggcgagctcttcaaaacatgatatctgccatttaacccgcctccctttcagttcttaagaatagaagccatgttttcttggacgctttcttttgcatttttgtcaaatggatcgtctccaatgtaaagatctaaaatagacttgcacaaaagcttgctctgtatgctccccaattcttctccttcaactacacaaaaacacagaagatagcttattaatgaagaatgttaggtacttaggtgtgtctgtttaatttttactgggaactcatatgaaaaggaaataaacaggaataaaacatgacagggatttattatggcattgaaatgctacctcacagatgctacatgattgcactgtttctttcttctttcttatctttttggtgtgataggacgaaaacaggataaaaagttattcctttaattatgaaaggtcatggattttctatagtattatctgtgctgacttattcgcttcatgcactcaacactacgaccaaatgcatgaatagaatgagaaaatggccccaggtcactgtatcagatgcatgtccattcattgtaacaatatttctttttgactctcaaaatccttcgttccatcaaagtaaatactatctacaatgtctcaaatcaactagaaagctgtctaaaaaagaactactacaaagaaagggaagaaaaagtgaaaattgaacttactacttattttaagcacatggctcgactcccttgagagctcaatcacggacccctttggtaatttgtattcatccttgaaaagtgaaacgaaactgtggaaatcaaggtgtcaaagagagaagaaacttgtatagtaatcatttagcatgatgaactaagattggaacatacccgtcaacacaataaatagagcaacattatttaattaaactgacactgacagacttgaaactataatatgagtaactcaacagctcaacagcctcctgtccagattcgtagtactaagtaatgtcacatcccgtactaggtagctacattttaggacgaaggaagtagtacaaaataattgctatcaactaactattgttgcatgtgagaattaaagctctctagatccaggaatcctttctttcttgtttatctgatgaaaagcacaacagcattacatcaagaatcattcaatgtgcattctgacttctttctagctccaagatgaaactacatacattttgcacaatgaacttggagttctcttaacaactagccgaattgtaatttggtaccaccctttcaaaaggactgcagaaaggctcatgcattcggccgccaaacctcacttaaactgacactaaattgaacctaaggtaactggtaagaaatatagcaagtcaaatgtggaacaaaggaagcattgttgtgagcttgtctgcaacaatgaatcagtggcaaggaagctttcattgtttgtctgatggaaagataaacagcagaaaccactgccagaatcacaattacctctgaagcaactcatgagtgtctgatcccccaaacttcagcagcctgcttcccacgctcttctcgaacgcgcttcgcacggatcgaatgctcaacctcccatacacaatctggagcctgaccgtcatccgtatgtcacgctccaacgcatcgttgatcagctcggcgttctccttcagttgagagacagggagcttctggtacttctccctcagctgtctcagatcgtggtcatccgcatacacacctgcaacacaacacatcagcattttccagatttcgtccggtttcgagttcttctttcgaatggagggatcgaagatgaggtgttctttagtggatggttaccaaacgcgtagacgtcgatggacttgaggggatcctctagagtcgacctgcagg

SEQ ID NO: 14115 - DNA, 692 bp, Oryza sativa
gctctggcccgcagatggacgcttacgtgcgccaggtgcggcgtatggagcgccatttcgacgggataaagcttcggcacgtgcccagacgggataacgcggtcgccgatgaactctcaaggctcgcttcctcgcgagcccagaccccaccggacgcctttgaagaaaggctagcccagccgtcggcgcgacccgaccccctaggggagacggacgcgcctgaacggcccccgaggcccgtcggagtccaggcctcgggacccgaggggagcgctcccagctcccctagattgattgcttggatcactgagatccaggcgtacctcgcagataagactctacccgaggaccgcgaagggagtgaacgcgtccggcgcatctccaagcgctacgtgctggtggaagggaccctctatcggcgcgcggctaacagagtcctcctgaagtgcattcctcgggaacaaggcgtcaagcttctcgtcgatgtccatgaaggcgagtgcggagcccactccgcctcacgcaccttggttggcaaggcctttcgccagggtttctattggccgacggctctcaacgatgcggtcgacctggtccggcggtgcagggcgtgccagttccacgccaggcaaacccatcagccggcccaggccctgcagaccatacctctttcgtggccgtttgctgtctgg

SEQ ID NO: 14116 - DNA, 699 bp, Oryza sativa
atgaagtagacggtccgctgcacctttagggggggccgatcctcttcgccaggggccgcatctccagggcgctcttcgtccgagaggccacgcggggcgcactcggcttctgtgccgacgacctcggggtcagagggcgacaggcgcggtcttcccgcagtggccccggagccatcctgggggtcgggggcgcctggcaccgtcggacaagcaggcggagggccagctccggccgtcgggggccttgggccgccgttcggctcgggggcctctcctccctgctctctcccgggtcgagtcgacacagggtgaggacgcgcggagtgagggttgtcctcgtcgcgctccacgaccaacgccgcgctgaccacctgcggggttgccgccaggtagagtagcaacggctcatctggctccggggcgaccaggactgggggagaactgaggtacgccttcaactgagtgaaggcccgctcagcctcctccgtccaggtaaacggcccggagcgtttgaggagcttaaataggggtagtgccttctctcccagcctcgatatgaaccgacttagggcggccatgcagccggtgacgcactgcacatccctaagcttgctgggggggcgcatctgctctatagctcgtatcttctcggggttggcctcgatgcctcgggcagagaccaagaacccgagaagcttg

SEQ ID NO: 14117 - DNA, 608 bp, Oryza sativa
atgggatgccttgttatacagaaatcacatgggtggagacaatcaggtaaccgatacatttcagagttgctgtccagatttcttttggaccttttgttgttgtactaaacggcaaaccggttcggcttttttgcaggttgaggccatgctcgacaagacgatctgtgcgctgtcgaacgttttcataggtgcatcaggctcaaccttcacagaggacatcctgcgtctacggagaggctggggttctgcgtcccactgcgacgaatacctctgccagggtgagctacccaacttcatagcggagctagactgagaaaatgacatcctagaagaagaattgacagctacatccccctttttttccccactacgatctggtggcatgatacacattctgtaaaatggcgtgtacatcctagtgtaaaagagcgatgatatttgttgtaccggtacccccattgatttgttcggtgttgtacacggttaggcaatagaaagagtttggtttttgcgcttgctcagggttcatactctgttatactgtgagacagcttcatagattcatagctcgcaactttgttgcctagcaacgtgcctgacagacacta

SEQ ID NO: 14118 - DNA, 557 bp, Oryza sativa
gggcgaattcgagctcggtaccccactcgtgcgaactcctctttgtagaagctgaagaaaatcaaggggagcgagttagccatatggagaagaacgaagaacaccggagatgccaaaatttccggtggtttccaagcgcatacctgaccgagccttcctcggaaccggcacgccgatcatttcgtcggcggccttccatacgatggggctcttcggattggagccccctttccgctgcatctgcggctggcctccatggtggtgatggttgtggtagcctccgccgccgccgccgctgctgctactgctatggtgatggccgccgccgccgctgggctggggcggcgagggcggtggcgcggtgctcggcgaccgccgctgcaccggcgggtaccgcggcgcggacgcggcgagctcctcgtcggcgtcctcgtcgtcgtcgccgaggctctcgtcggaggtgtcgtcgtcgtcgtcccggccgccgccgccgtcgccgtcgttgagcatcaacctctcaccccgccgcctcttggagcgaggcgagtccctcggcc

SEQ ID NO: 14119 - DNA, 3541 bp, Oryza sativa
agtgtaaaaagcctttaagcatttgaatattacaacttggtctacatgttttcttaggttgtaatcatacagatatccgcccagtgagaattaaagagtgaagaaataagtagcaaaatacccaggcaagcagagcttccaagattgttcccacagtccaagagcaatggaaaacgaccatccaggtacctctctttgcagcaggaacaaactctatgaaccaagtggacagcacatggccagcacccaatcccaaaccaacaacaaagcggaggacgagcaaggatgcgtagttgggggagaaggcactgagcaaaccaaatataccagtgacaactgccgtggaaagaaaaccgatcctggaaatggagaacagcatatacatatcagatgtagtatagcttttgcataggcaagtacatttaagataaacttgattgctgtttgaatggagagaattcagtcaaaatggtatgttcatttttgcaccgtgtttagttccaatttttttttttcaaacttccaacttttccatcatatcaaaactttcctacacacataaacttccaacttttccgtcacatcgttccaatttcaaccaaacttccaattttggcgtgaactaaacacaccccaagggcattacttccatataattctcaaactacctaaacaattttgcataacctcaccaagtgttcaatcatttttctttttttgaacgaaatcggcaagacgccaattttcattgaaatgaggaggaataaaccaagtgttcaatcatgaatacttggatccagcacactcagaaagaaaagaagagattgaattgcgcatgctgttggtcagcacaatttgcacgaaatagaaatctcttgacaaattttcctgatcactcacccgaaattgaaatatatgtacttggactgaagcgtggcaatcaggaaactgcagggaaagaagaaaataaaaggataccttctgccgtatctgtccgagatgaggcctccgaggcaggcgccgatgagcatcccggcgaagacgacgctgctgacgagcccctccgccgcgccggacaccccccattcagccttcacggacgggcccacgaacgacagcagcatcaccttcatggcctccgcgacccaccccacgcaggcgtaggcgagcaccagggcctggaacctgccgaagccggcgcgcgtgagcgcgtcgtccgtcgtgtaggtctcctcctcctcctcctcctcctcctcggcgtctccgcccgccatggccgcgcacgctacactcagggggaaggtggatggctggatggtgttgaactgttgactgccaagatcagaggagctcatgtgattttttttttctgcttccctgcactgcacgtgtttgtgattaatactctctcactccaaacggagccatcatttcgctgaataagcaaaacagtttatttgtaaatgaaaagtaatctgtaaataaaatttttatatacgtgttcttagctatctaaaagcaaaggctgaaaaataaacttcgatgaaaaaaacctcaaaatcatctccaaatttaaggttaaaagttcaaaatttggctgataagtataagcataaacgaaaagataagatctaaaatatagcagtgctgctactacctccaatttagtataggatacgatattttctaaaactacgaatatcatgtcctatactagatagtactttcttcataccaaaataagtgtagctctctagttcaaattacaattagatgttcgtacttttttggatgaaggaattaacattttgggacagatatattttaggatgaaagagaatagagacaaaccaaaaatgttatggccgataaagcatgaaaaaataaactaagcaactaaaaatggatgaaagtttttatatctgtcttcctagtgatctaaaagccaacccaaaagccagtactaagatgtaaattacgatcctcaaaatcaactataaataaaatgaagttacaaaattcaaattttgggtgagtttcaaattgcataaatctgaaaagtttagcccaaactatgaactgaacatgttaaaactggagaaattagtagagagtaatactaacaaagccaatatttttcaggcattcttccatgtgtgctgtgtgcatctgaagttctgaacttcagaagtgggtaagtggtaactagtaactagcccctttgtcgaagaatctacagtccagtccctgcccgaaatgtaggaatctttgcagttacaaggttctgaaactacccagccgaggaatccctggtcggcaatctgaattgctgagctatcatcttctgatcgatgatatatatgcagatgcaggagtaactgtatttccaaatctgcagactgcaagaagccctcgttttcacatgctctgcttcttcttgggttcttgttctggttctggttcgccttcatggtgttggcctgataagatttttccattactctctcagctgcactgagaaacaagggccctgtcccaagatgctgccatggctgcctgttcgagtcacttgcatcagaattcagaaactgggtcgagttccattgattgcgagatagctctgtctgccatgcacatgctccaactccaattgcaagataatgttcggatctttatccagtaatgatagttaagccggttcttgcaagtggccacttcctataaactgtgagcctggcagctctggatgttacgttgctcgtcgtcgtcgtcgttgtcggagtcgccatgtcgtcggcggcgcgccaccattgctccggtctccgggagcggctaggctgcgtgcagtgcagcttctgcgccaccgtgttgctggtaaggaagagcgaaaccgatcagtttacctatctggctggctccccatggccatgcataagctggatgctgtccatgcgtgcaggtgagcgtgccgtgcagcagcgtgctcagggtggtggccgtgcagtgcggccactgctccggcatcctctccgccgtcaacctgccgccgtcgccggtgtcggcgtccatcgagctgactccacaggtatgattcttttcagcttcagttgatgaaaatgattggatgatgtgcagaatctgtactaacctgacgagatgaaacaggagctggacgctggtccgccgccgggggagtactcggatgagagcagcggagacgatagggagggaagagatgcagaggacgatgcacctgcacctgctgctgctgctgttgcaaacaagcgtacttgtcctgctgttttctcttgatcagtttgtctgaagatgataatgacgatcatgatgggctaattaagcatgttcttgaaacatttctgcagcgccagggaggaagcagcggacgccgtctgcctacaactgtttcgtcaagtaatagcccagaaaaacaaaatgagtatatactgtgatcatagctagactgagggccaattgcagagcatcacctagagcatacatggctctgaatattcttatataa

SEQ ID NO: 14120 - DNA, 509 bp, Oryza sativa
acgaactgcctcaccatcggatctttgaccttgtacaacgcttccggcttagtaccctatcagccaaaccactagctaaaatcagcaaaaaccgtttcgaactagccacacaccagaatcacaaagtgctgcaaacattacaaggatccaggaggcaattcttacagagatcactttcttgtagatctgcaccgggtgcgtgcactcgctatacgggtactcgaaggtgaccatctcaagcacgcacatcccgaacgagtatatgtccaccagctcgttgtactcctcctcgtacacctctggcgccatgaactccggcgtgcctaaccaaacaatcccacacctccaccccaatcaaattcccgtaaaactactgcaaattgggatcacgagcacaatccagtagcactatctagccaatcagagacgccttacctacgcagtggacggcgtgggacttgcggaggatggcggcaaggccaaggtcaccgatcttgacctccccctgg

SEQ ID NO: 14121 - DNA, 928 bp, Oryza sativa
aattaagtgtttcacgcaaaacgagatggtaataacgtgtgattaattgagttttaattattacaaacttgaaaaatggattaatctgatattttagaacaactttcatatagaaaattttcatacgaaacgtaccatttaacagtttgaaaagcatgccactttaatccaaaatttaatccaaccctttcatgagtttcaaaatttaatacagttgttgctgctacctttttcagtcttcacccttgtatggaattgagagctagctggtgcatttcagttgttgcaacactgcaattgcacatgaaaggtgaacacatctttgttgaatccaaaatgtcagtgaattttggcaggtgtaaatatgtgctggataagaaagaatgccctagtctccaattgaccaaaatgtaatgtgattctgtacatcaaactgaagaaagcatcactgcctcactggatttgccggcccttggtctctagagggatgagggcgcatgccactgctgctagaaagagcatcaggtccatgaaaaacactgcttctttctgacggcagttttctgacaaactaacagtcaccacaggtgaaactaaactgccaatccggccaaaggaagatgtgattcctacccccgtgttgcgagatgatgcaggatagatctgcacagaaatggcatgaatgggattagagagactgtttatgagcattatataatgcagcttttggtaccacaataatttgtgcaacaaagtttgatacatcaggcatggtttttcagtaatgtgcgatagaccatcacgctgcatgattgcctgattggaaatcgatttccattagaagtgaattatcaatacattaaaagcaacagaatctttatgtacacatgctgcagcaagttagcaatcttgtgggatttgatttggg

SEQ ID NO: 14122 - DNA, 3657 bp, Oryza sativa
gccatggtgcattgccaatggccagcttgatgtattggtccattgctgctaaataatcacgcttcatgcagcattcaacaataacgagcaatgcttgacggatgtcatcaggaagaacctaaacataaatcaaaacaataattggtatcagagttgccaaacaatatgtagtcaaggaagtcataggtagccttaaaatgcataaaaatatcccccatatgagcaatatgatttagctcaacaaggtatagtaagaaactggatccactgcaaggaaatccaaaattacattgaggctgaatccatgacagaaggcataattttgtagaaatttaatttcaatgccagtactaaatctggacagctaagtatctatataacagtgaattcaggatcagaatataatgctagtagagaacaaaggcaaatcccaataaacaacaaaagttttaaacatgcaagaaataattgttggagttagggcttcaaatctggatgttgccaaaaacatgagcccctgctcccaaaacatccaaagaatttcacttcatcatgtatttgagagcactaatgatgcatcggtattgtgtgcatgtgagttggtactcctcatgcataggttatcaaacttacaaataattccgtgagcgcaaaaagtagtcagcatacatgttatatgatgacattgttatcttgctctacctgcctaccactacatattcatcataagttcataaccatcactgtatctcatactatcctctaaataaccacaaaaccttactgaaacagagcaatcgaaatgataattgaaaaattatgcaaacacagatagaattttatttatatagttgatattgactcattccgttcaagtaaccaagtgtaaggccagtttctatattggaacggatagatcattttgcaaaatttataattccaatggtcattgtgtttctcgacactaaagcttcttgatatgctagtaagctgttctttaagaacccaaataccttgcatagaggtcaacacaattaccacaaaatataaaaactccgaacagtgaagcacaaacagttagacagtttctacaaaaaacatagatgccgagctttgccatctcttctttctgatatggtcataaaattgcattcatcatggtaaccagttacccaggtcccaggatcataacttcgacgtaagccattcagctacaagcttcatttcaaatcctaatccacaccattgttttattagttaaagttttttctaacaattactgaagttatagacacaaccaaattaacatttaacaatgcattgtttatgtaacttattgatgcagtacaaaaggattctcacctgcttcctgcaaaactcaaacagggggctgagataccgcgcacattgcttgaaggttgcgaccatcgacttgccctttgctgtcctcttctccagctccggcatctcatcaagctcctggttccactcaatgagtagcttcttgaagaacaccaagatcttgtcctcatcacacagctcctcaaacttggtcttcatccgtttcgagtccttgtccgcatcagcatcatccccactcctccggccgtccccatccccatcatcagcattatccccgccagcgccaccctcgccgccatcaccgccgcccgctcgtttgcccttgcccttgacataggtgtcccggccagccctctgccgcttgcggagctcgaccatgtcacggaggaagtcgttcgtctgcccctctgtcatgtcaaggtcgtcgatgtcgtcaatcacgccggacttgagcacgaacttgaggcgggcgagccggtcggcgtcgtcctccccgaacagcgtgacgggctcgcgcaggatgcggaggcgccgcaccacctcatgccgcgggaggtcgagctcgtcgatccggcgctcctcggagaggagcgcctcatcctgcgcggtcttcttccccgcgaggcccggcgggacggacgcggcggcggcggacgaggaggagttagggttagggtttgcggcggaggactgggccgggtcggcgttggggttgctggggtcggagcccgcggcggaagcggaggaggtcgccggcggggccttggagaggagctggcggtgctcctcgtggcgccgcttctggagctgcttctgctccagctccgaccgccgcacgaagctcttcccgccgaagtcggccgtcgccgccttccgcttcttctccagctccctcttcagaagatccatcgctccggcgacgcgacgggccaaccccgaactctctctctcctccgcgttctcgccgccgcttcccggagagaggcggcgccggcgaggctaagcggctcacttttttttttacacgaaccgattcgctatttgggacgccgccgatagggaaaggggaaacgtgaagtcgcgaatccgcaaccgtaaaatttgaccaaatattttggattggtacagtaactgtgatttacccctcctatccggactgagatgctctctgcagtcaaatgcacgatatttttatcacttacatgtgaatctagggattatcaaacccacatatcagtgataaagttaagtgacttcggctacagaggatcctggtccctcttgtccacgtttgtgttagagctatagccacgttttagtgttagagatatagccaattattagttatctataaacatataaccactattaatagatggtctcacctgtcataatatacatcgtgtcttggagtccgtgttacacctagctataaatagcttgttgttcatctctcttttcttttatcttctcgacatatgtttatagctggtttatactttgctatgctacctgctcttaaccaaatacgagtaaattctcgagaagtgaacaattttcttccttgtagtgaaacctattcacttgcatttaaattctaaacttcacacagatatttctatttatgtttaattattttgacaatgtttctgtcgaggcatccgaggtcaccataagttatacttcctccgtctcataatataagggattctgagtttttacttatactatttgaccattcgtcttattaaaaaaatagaattatttttttttgacttactttattatccaaagtactttaagcataattttttattttttatatttgcaaaaaaaattaaataagacgagtggttaaatattacaagtaaaaactcaaaatcccttatattatgagttggagggagcagggtttttttagatgtttacagggaaagagtgtacgctgaggtctactctctcctagattcgtcgtattacaagggctggagaggtcacatcctctcttagtagtatgtattttattttattttattgacagtgggagtagttttggatgcactgtttttactgtgtttaaaaaagtaaatcctgcgtcaaagaaaataaatcctcaaatttcaattttaatggaaggtacttttgatcaaatctcgggtccgtgtcgaagagaggagaacacgcgtctcacacttttccccaccttttcaccgtcggcgagggcgcgccgccgctgatgtcgcagcagcagcaggcgccggcgccgccgtaccggccgtaccggcaggtgagggc

SEQ ID NO: 14123 - DNA, 2399 bp, Oryza sativa
atcctgcgtcaaagaaaataaatcctcaaatttcaattttaatggaaggtacttttgatcaaatctcgggtccgtgtcgaagagaggagaacacgcgtctcacacttttccccaccttttcaccgtcggcgagggcgcgccgccgctgatgtcgcagcagcagcaggcgccggcgccgccgtaccggccgtaccggcaggtgagggcggcgaccccgcacagccgcgccgtctcgtgcgtgaggttctccccatgcgggcgcctcctcgcgacggcgtccctcgacggcacggtcgcgctgctctccccgtcgtcgctcgccgccatcgccaccctgcgggggcacgccgacggcgtgtccgacatctcctggtccacggactcgttctacctctgctccgcctccgacgaccgcaccctccgcatctgggacgtccgccccgtcctcgccggcctcaaccccggcagcggcggcggcggcggcggcgcccagcccgccgaccccaacgccgaccgctgcatccgcgtgctcaagggccacaccaacttcgtctttagcgccaacttcaacccgcagacgaacagcacggtcgcgtccggggggttcgactgcaccgtgcgcatctgggacgtcaagagcggccgctgcgtccgcgccatcgacgcgcactccgagcccgtcacctccgtccacttcatccgcgacggctccatcatcgtgtcggggagccatgatgggacctgcaagatttgggatgcggggactgggtcttgcctcaagacggtcatcgacgagaagaagcccgcggtgtcattctccatgttctcgcccaatggcaagtttatcctcgtcgccgcgctcgacgacacactggtatgatcaatttttactgctattccatgcatttagtgatcaatcagttaaagcagtgaaatttttttgttcagctatcatcgtcttattttaactgaactgcgattgaagctcataaataggccctttggtgctctgagaaaatgttgttatagttgttgaggattggaaacccctgtctgttcatgtataatgtggaaaccacaatttggaggcaacatttttcttccaaattgtagccaaatattatctgtgtacatggagtacaacattgcagattctatctggcttcgggcctaattctctgcttttgttgaagtacacctgacaatgagtaaaaaatccttcttggttctcattaaaatgaaatagcagtggtacactccacattgaatagaagcctatcgtagctttatttctggtattcgccgtggtctttttcataggcagattgttcttccaactgctaattatttaatctagtattactggcggccatatagcacatcttgtttcagtttcacacagaaaagaaattatagttaccaatacaatcaaagatccttcactctgaggatcatttcgttaaagccgttgcccaagatttaaggtaaccaatatgttacatgttgaactaagtatgtctatacttacccagtttcacaccaaacctcatgttcttgatctgtgtggtcttagtactgtgaaaagtttatcttcagatagttatgttgttaaatggttttaaaaaactgcttctgaagtttatttgggcacatcagttcacacgataacagatcactgtttcatgcataattcaagtaattggaggcatatgaaagaaatatgaaacttgcagtgcaaatgttgttatcagtgctttatattagtattagactattaggttgatccatggtattcattgtgcatacatacaccttcactccttcagcccttgtactgtttacatctgtaaaactttatgggcatttaggtcaataatgcttcacatcaagcaacattgtaagaaattttggcattgtgttattctatcatgggcttcctcatgtagtgattttacttcatttttcacggaatgtttttataaattagttatttatttcatttggaaaatatatggttattgcaacctttgcttcataagtatgtccttaccaaatttcagaaactatgcaactttgcaagtggcaagttcttgaagatgtacagtggacatgttaacagaaagtattgcctccagtccgcgttttccgttacaaatgggaagtatattgttagtggatcagaagacaactgtgtgtacatatgggatctccaagggaagaacattcttcagaaacttgaaggccatactgacactgtcatctcggtgtcctgccatccaacggagaacaaaattgcgtcgggcggcctcgacaatgataggactgtgagactatggcttcaagatggctgatgaatttgcagaaggaatgtgcctgatacaactcttgtgtgaacctgg

SEQ ID NO: 14124 - DNA, 4553 bp, Oryza sativa
tttgattgatgactcatgagagaaagagagggtttacctttccaatggactgacggatcccaacttctagctgtacagtgattttcgtcattctttaatcaattttggttgaatttaatatttaaaatttgaatttcttgaaaaccacttgaaatttcatcgagaactgctttcgtcccacgtcaagacattggcttgacaattttgtgttgttttcaaccggtttcggtgggaaaacgtgaccaaaacattggtaagcgattttatttggcttgacaaaattttggtaaaatatggttgtttggtttgtttaaagggagtacatatacatctttcgaaagatttttatgattatattacatatatttttaatctttgaattaaaattcaatggacacagtaaaaagcaaaaaagcaattaagaaacaccataatagacactaaatgaccatatcttcaagaaaaagaccaaatccaatataaattttaaaacttacatgcgaagatttaaaaattacactgtaacttacaagaaaatacattgtaaatttgagtgagaaaatcgaatgagagataaaaaaaaatctttcgagtgaaatatagcaaaatcgttgtttaaactacaaaatctctatttacattcctgccacctgtttgagcctctcatgcaaattaaagctgactagagtacttagtttggtacttggatttaggatagtattaagtagagtgagaggttttctgagagtcagattgcgatgtgaattgtgaagaatacttattcctgcttttcggtggaagcagtttcttcagtctttgctcctaatttgtaagattttttctttttcttttcctgctactcatcaagttaccaatgattgaattggaaaaactttagattctaaaaagcagtttatgtgaatcagaatctgaaattttagtttctgattgttttttagtatttcactttattttgtagctacaactttatcatagtttgagaaaaagctagacagtttcgtagctctccaaacaggccctaagcccctctctctaatgatcaactcatctactgctagttttgttaaacccatacgagaattgaacctttttcacgcagaggactgaagaacaggtccatatttcaccaattcattcatcagctgacaatctgacgcgcacatgcatcatgcacggatgctgcatatggctgtgctgcggcaactgcaggtgggccaactgggagttccacgtgggcttcgacatgcgggccggcacggtcatctcgctggcctccgtccacgacgccgacgccgacgccggcggcgcgcggcggcggcggcaggtgctctaccgcggcttcgtgtcggagatcttcgtcccgtacatggacccggtcgaggagtggtactaccgcacgttcctcgacgccggcgagtacggcctcggcctctgggccttcccgctccagcccggcggcgactgccccgccaacgccgcctacctcgacggccactactccggccaggacggccgccccgtcgaggccaggaacatgatctgcgtcttcgagcgctactccggcgacgtcgcgtggcgccacaccgaggccggcttccccaaccagctggtgatatttgatcatgaacagaaagcccttcgtcttcgtggccgtcgtcgtgtctcaaactctcaatctttggctgattcggtgtgtgattcttgatgcagatcacggaggtgcgccccgacgtgagcttggtggcgaggatggtggtgtccgccggcaactacgactacatcttggactgggagttcaagacgagcggctccatcaagctcgtggtaatcgacgcagaatcgaatcaacgagagcttaattagcttgtgtagattcattgcgtcatgtcgtggcaggtgtctctcaccggtctcctcgaagtgaaggcgacggcgtacgcgcacgccgacgaggtggcgcaggacgcgcacggcacgctggtggcggagaacaccatcgccgtgtaccacgaccactacgtgacctaccacctcgacctcgacgtcgacggcaccaacaactccttcgtcaagaacatcgtcaccgccgtcgtgcgcgacgccgacgccgacgcggcggcagacacgccgaggcggagctactggacggtgcggcgggaggtggcggagagggaggcggacgggcaggtggacctcggcggcggcgccccggccgacctggtgttcgtcaacccggggaagaagacgaggatggggaacgaggtcgggtaccgcgtcgtccccggcggcgcgatggcggcgtcggtgctggccgacgacgacttcccgcagaggcgcgccgcctactgcaagaagcaggtgcgggtgacgccgtacagcaggtcggagaagtgggcgtcggggctgtacgccgaccagagcaccggcggcgacggcctcgctgcgtggagcgagcgggacagggcgatccgcggcgaggacatcgtgctgtggtacacggtggggctgcaccacgtgccgtaccaggaggacttcccggtgatgccgacgctgagcggcgggctcgagctccggccgtccaacttcttcgagaggaacccgctgttgacgacgatgccgatcggccatggccggcctctcgtcaactgctcgtgcgccggcggcgactccatttccagatgactatagctgcttgcacgtgcaacggacaacgggtgcaagtcggattgacacgcgctgtggcaagtgagtaagtggccaattatttattgggaacatctttttgcagttccattggacttggtagaccttgatttcctttgaacttgagaaatttcaattgaattcgactcgcagttgggtacttgggtcggcaatgagatttctcgccgcccatgctttactcaaatactctggtaacttactctctccgtcccaaaatataagcattttcagactctaacatggtctacaagatgctaatttgaccaataattaatatatatataaataatattttaaataaaaagagttacatattatgatagtttgtttcgtgataaatctagtaactttaattttacatgattgattttttttttctattaatagtcaaagttaaaaatgtttgacttgttactgtgctaaaaatgcttatattttgagacggggggagtagtcatttggatatgcctcaatcgtggcacatccaccgtaagatctgtgtggatggttccctaacattgtcgcgcatgcatgccgagccaaactagatgtaatgaaacaaaaaatagagtcgtaaagtacggcaaactttaaaaaagcttagtactgagccaaacatcacagtccacgtgtgtagaccttcgtctggaagaccacttccatttatgcaacacgcgacgtttcacaatctcaaatgattcttcagatcttgtataatttacgggctggatttcaaccaatgcaaataagaccttgacataatgatctaagataggagaagaagaggagaccaacagaggatgatgaattaggtctatagcagaatcaagttagagaggtcaagtgatgatatggtgttgagggaaatagggacgataatgcttttcctcaggcatccaaagcccaaaactcattcactctctccatccttgcatgtcaataagcaacccaattagcaatctcctccaaacccatccccacatcattgacgttgttaagatcgatgccctcccttgcctctatgttcccgttcaagttcttcctcaccgttgccatctccttgttggacctggccatatagtgctcggggggaaccggtcgtgagcaaaggtggctaagcaaagggttgtcgcagggaagtagccgggaggcagcaacctcagatgaaacttgaccttcaaggtggagtgacatactgacatgtgcaaatgtgtggtgttgggcgtcgggtttgcttcgtcatgccacaaagtagagttgacgcacgactgcataaggatgatgaagctaacgacagctacaatggagatgtcaagacgctgtaactggcgaatgagatctctacaacctggtgtggaagcgggaggaagaaagccatattggtatgctttgcaaatcttgatgtttcaacaaatggactacaatttttcacgggcaatagtgaaatgttatatcttgaaattgactgtgtttcatgtttttagatttgttatttttgatgcttcgatagttggcacttaatgttccagaaaatgtttcaccttgaatttaacagggtttcgcctttttctacttattattgatgttgcactctacttatcaacatattttttacatgtttttctaatgttggttcattgcacactagtttttgtctgtgtatttttcaaatgtttcaatgacataatgtatctttttcaagatatttgtcaagcttattcataatgtattacagttagagaagatacaatagcaggctataagctagctgcaaacatattttaagaagataaatgatgagagagaga

SEQ ID NO: 14125 - DNA, 5840 bp, Oryza sativa
cacatgcccctcccctttccaaattggactgttcttctcttcataaatgaacggagatcggtacggttgctgtccgagtgcccttctgacgggacggcccatacctactcccacttccgccggaaacaggtgcgacgtgggattatggctgtctgtggatgacgcgaccagtgtcagaccggtcacagatcagtcatccttgtccaccacgcgtcagtttagcaacgtgcatgttcgcccttcttcatgtaacatttttcctgtaatggttgggatgaagcctggtatatatctgaccggaggtaacgtgccatctctgagaggcaacacgctagctccggctagagacgagtgcctagaggctctcgtcttgacgggatggggcgaggcgtgcgtcagaccgccagtcgccacctaacccgtgatctgaccggtctgtgactggtcacagaccggataaaggaacgcgctgcaatgcgctgcatgcagcgtgacacgcttgaccagaccgcaataaatgcggttagatgagccctgccgtgttcacctaacccatatatgtgacgcaaaaaccctcaaggggtcggggcgcctcggccctcggggccgggacaggagtcacccgacccccctcggggaaatcaagaggagggcggacacctcacccttgggcccgacgtccccgagggtgccaggccacgtgggcgattgtgtctgcctcaagcctctggtctcgatacccccggtcccatatcaccgacagctgctcttctctctcgtcctttatctcattaaaatatgtttatagctggctaatagtttgctattgtacccgctcttagattgactatagataaactagagctagtagttttttttttgacaggaaacgtgctctttattaataccttggttcagtgtaatcacgaaccacaaaacactgtacaaaatccgggagggggtctgcccatatggacatatgacacgggtcccaactagcccctttccgggccagttcatgagcacaactattacatgaatgattagcaaaagacaccttgatcatacctaagtccatacggagcagagttctaatttgtttaaaagtcacgcccgccgtagactggtcgtagcaagcggagtccagtgcgctcaccaggatggagctatctgtttcaacagagaaatacgaaaaaccatgatttagaacagcacgcaaggcatgcagacaagcgacggcttccgcgctaagcgcatcatgcaccagttcgattcgtcctgctctagccagtaccccattcccctcatggtcccggaggataaagccccaaccaccacttagattagccgcctggaaagcaccatcaatgttcagctttagaacacactggggaggcggacaccatgtactttgactgctaggatttccccgagctttgtcccgaaagagcaaggagttttctgacaccatccttatgactctgctatatacctcttcatgcgttctcctatcctccccagcattcactttgtttcttgcatcccaccaattccagagcagtatgacagtcgttaacataatgtcttctctcaaattcagaatgtgcttacatacatccaacgtagaagtctgaagagaaagctcctgcctaatgtgctcaaagttcagcatgcgccaacaaggtttgacaaatttgcacttgaagaaacagtggccaccattctcatctaaccggaggcagactgggcaccttgtatcgatctccatacctcttttactgatattctgacggagtggcaaactgttgtgcgctaagcgccacaggaaatgcttcaccttaggaaggtgattcagtctccatagcttctcccactgaagggctgcactgctcgttttccccgatgaagattcacctgtttgtcgtattgcctgacgatcacgctgatattccagagtgtggtatgccgacttcaccgaaaaaatgccccttgggtcaaaatgccatgctgcaacatcgctatagccattatgaactgggatggctagaatgtttttcacatcctcctcccagaatatatcctggatcaactctctatcccattctccggtaattggattaattaagtcagcaactttgttcagaacgatccctctccttggggtaattggcctcttggttgtacccaaggggatccatgggtcgttccacatatctatgtcggtaccatcaccaacacgccagattaggccaaccttcaacacctgcaccccccgaacaatacttctccaagaatatgagatgcccggactttctctaacctccataagcttcccatctgggaaatatttggcctttaacactcttgcgcacaatgagtctagattggaaaggagccgccacgcttgatgggctaacatcgctagattgaaaaggtggaggtctctgtatcccaggccccctttttccgttcgactgcatagtttgtcccaggcaatccaatgcattttgttttcccgatcatgctgtgcccaaaagaaacgggagatcaaactgcttatttcatcgtaaagggtttttgtcaggtcaaaacatgacattgcaaaagctggaatagcttgtgccacagctttgatcaaaatatccttcccggcacgcgacaacaacttctccttccagccttgtatcttcttccagaccctctccttcaaataattgaaggtctttttctttgatctccccatatacactggcaaccccagatatttttcattccatgcttcaaccccgatatctaaggcatatctaaaagactccctcttagattccctcgtgtttctgctaaatataacttaacttttctccttgttgatagtctggccagagcatttttcatacagagacaacacattctgcagataccccgcgctccgttcatcagcctttaggagcagcaatgagtcatccgcaaacaagagatgattaatacttggcgcattttgacatactctcacccccgtcaggtcgcctccaggtcgcctcgttcttcagcagcattcaacagggacgaaaatccttctgcacatatcaaaaacaggtacggcgaaatcggatccccttgacgcaatcctctggttggcatgatctgctcagtaaaatcaccgttaaccttgctcagtaaaattagagctagtagttggctatactattaaacttgctcttacggcatagagttcctatccaaagttccaaaccgacatgatatgctaagaaaagaacgaggactacctatgtcgatcgaagttcctggcatacactgtatacaacgtgacactgtattgtgatcggcacctctcatctccctctctacacaacacattttccatacgagaagaccaaagtttcccgtataatacggggttttaggccgtgcctgcgaagtgcgaacaggtggagctcacatgtccgcgaggaaggcgacctctcgctgcgactggacagtgcagccgcgccctccacctcccgacacccaagagcctgccctgtctgcctcggccgcttgctgcctgcctgtctgcctccgcgtcttttctgctgcccacattccccaacgccacgctgctgctggtggcggtcgccctcgcagtcgcacccctccccttgtcttcttcctcccgccctcttctgcttttggttgagcctcctacgctacaaacagaagtactcctactcctgtactgctgtgaagtgcgaagcttaacggaccaagcgagagcgagagcgagagagatgatggtgctgttgttgctgatggcgctggtttactgctcctgaggggtagggagggaggggaaggagcacgttcgcttgtggagcggttgggtgggtggtgattcttcttggcgcagccggccaggtgaaaacggccgcccaccggctttgctctgtagtgtccgctgctgattgctgaggctcccgctgctccgttcttcgccggtggtgttcttgatttcgtcggggggaaaggtatggctgctccttctctggttgatctctgggagttcctaaatgatgttccgttcttcgggttcttgatttgtttgcggtgctgctgttgtttcagattccaggttaacaggcgtggatttgattggggggaaatcttgggatatcgagcgcaaagatgcggatttgatgcatcgttttttcctcacttcttttcagccgtcagtcggagcaagcagatgttttgaatccagattccaaccgaggggaacagcctgctcggagtgtgcgtgtgacggtgtgagtgataagtagggcggttgcgcacgaggtgttcgtcagaaagccgcaaaggagaaggtgggcgtgcaacttgcaaccgtcgccatcgtcacgatgagagactttgcatcttgcttaagtcaaagcggcgtccaggtcgcccattcctcttctccaggtggccagaacatggtgcagtgcacctacctagcccgcctccgtggcaaatcttgcagcgtgaccgtcacctggagcaagatgaccatggggcaggctctgtccgtcgcagtcgacgactcctcgaatcgttgcctttgcaaggcagagataaagccatggctgttctccaagaggaaaggttccaaggccatggaggtcgatggtggagcactggatatcgtctgggacctgtcctctgcgaagtttgcggccgggccagaacccgtcgaaggcttctatgttgccctggtctgtgatcttgaagctgttcttgtgctcggcgacatgcgcaaggatggggatcacagggtttcgtcagatgtattggcctccaatgctgtcatgatagccaggaaggaacatgtttatgggaagaaggtgtattcagcgaaggcccggtttttggacattggtcagctccaccatatcaccatagagtgtgacacatcggggttgaaggatccaagcctagaaatcaggattggcaagaagagagtcatgcaggtgaagagacttgcatggaagttcagaggaaaccagacagtctatgttgatggacttccagtagaggtcctatgggatgttcatgactggctatttggttcatcgaataaatgtgccgtgttcttgtttcagtcaggccaatccatggaaaaattgctgtcaaggtcatgctctcagaatgaaaaggagcttcaagcgcatcgttttggcttcactttgatacttaatgcatggaagaccgaataggcagaaacatgatgacaagtttcttcggccattctaccgtaaattaatgaatcctaacagtaagaatatgcaagcctgacaaaaccttgtgcaaggatttcatgcttcttaactattgtgttctagtgatgattagcaagttgagaatttgagtacccatataattttttctagataggtagttagacagaatgtcagattctagtgccccatttgtattatcatgtctttgacatatacattctgatcacaaatccaagaagcaaagcaaaaaaatgatgcttttctgaaaacttttccattcttgtgctctacatgttcagtgtgaggcttagtagaaatatattactgaatcaagaaaatctggtgctgtgttctgtgccaactcccaagttaattgtcttagcaaaggtaattgtaataatcaactaattgtaaaatcaaggagttgatttagattttgtgatgaaaatattggtggtttgataatgttattttcgacgtctacttcattttgagggtaatctttaattccgcaaaagatttttggatttttggttttccctatcattcacctcccctatg

SEQ ID NO: 14126 - DNA, 527 bp, Oryza sativa
ccatgcccatcaacggtggtgtgaccaaccgaccgtataggcggggacaccagtcggcggcgacggaggcaggccggtggtgaagtcgtagacgcccaacagcggcggcataataggccagccgtgtaggcggaggcaccaatcggcggcgacggaggcaggccggcggtgaagtcgtagacgcccaacagcggcggcataataggccagccgtgtaggcggaggcaccaatcggcggcgacggaggcgggccggcggtgaagtcgtagacgcccaacagcggcgacataataggccagccgtgtaggcggaggcaccactcggcggcgacggaggcgggccggcggtgaagtcgtagacgcccaacagcagcggcataataggccagccgtgtaggcggaggcaccactcggcggcgacggaggcaggccggcggtgaagtcgtagacgcccaacagcggcggcataataggccagccgtgtaggcggaggcaccactcggcggcgacggaggcaggccggcggtg

SEQ ID NO: 14127 - DNA, 17340 bp, Oryza sativa
ccggaaggacactccatttactgaggaacacaaggcatggcaacaactgaggagaggtcgctatgtggagttcaaccttgtaagtgatcttagatgaacacagctagagtctcactgcagtatctgtttctgattccagtgttgcttcttgtgaaggtatatgatcgcggtaccacatttggcctcaagactggggggaggattgagagtattctggtttctcttccactgactgcacgatggcagtatgatcatgtaagctaaaatgctcctttgccttgccaattcaataaacatcaaagtatttcatgctttcagctttaaaacaatacaaaatttaatatcaaatagtgagcatatactgttgaatatgatatattctcggcaaagatcatgttacatgacacattttcatcctcggggagtcagtcaggcaggcaggtttcctaatgtgccatttacttgcagacacctgaagagggaactgaagaacggaaacttcttgacgcgtgcataaacccaaaggaatggctcgatctctgaacagcttgatttcgttcgttcgtccaatcgtttgttagctttcctcgcactctgtagccttacgatctccaaacatgtgtagttcttttacttgtagaatcctgaataagtgtatgatgcaatgcgggtgttttgtttcatctgtcgatgctgttgagctttgtaactgtggtatcagtttctctctttttttcgagtgaatgaaatatagccggtgagccttttcccaaagagtggcaaaaatttgctgtctatttatctcatggttcccaatatttgtgtctaatgtcattgattcaaatccaaaaaatataaacatagcttgaaacctttcaaatatgacccatccattccaagctataattggtgagaattgacctggtgtttcaggccaggtgcagctgattggctttaactagtttttgcacagcgttgactgaaattcgtcggtttttactagttttcggtcagttttttttggcaaaccggtgaggagcggtttttaatttcaaaatgaaaaggtaaattctggtggccgctcaccggttacctgcttgggccatgacaacggagtgatggatgggccaacccgatttgcttgggccatgtctagcatgactgcatgaatacattattattactagtagaaatgacttgcaatcatgaggtgaaaggttaactgaggaataagagaattttatcagcttcatctacacagccagtttgctgctgaccactcctaaaactggaaagggtcgccaagaaaggaaaaaaagaactagtggaaagggtcgctaaaattcctctccagttgacatttgaatgacctataaaaggagaggagaggtgctagtggacaccaccatttttgtacatgattatcatgcagcatttgcaataagtacgatcagttttgtgctgggaagaaaaaggcacaaagcactacgcagctgaatggttattattatcattgtactcatatgctttacaacttgattgttttatttctgatcaggcacttatcctctcatcacaatgtctcactggttggagacaaatatccaatttcagtgattgcaaatggccccatccctccttaagatatttgggcctcaaggtttgagctcactaatgcctaagtggactagaggcatagatcatattagaccaataacatattgctagatctctccaaatctttgctcattagtaggactaattctttaatagcatagggctgcttaacctaattgctcttcccttttgtgattcgccaagagcacaaggttttggtgagaccatttcggtttagagcagaaagtgaaggggcaaaccggatcctgttgtttagtaactgttcaagcttactaaacaactcctctgcacatgaaggaatagtaaggttgattgttcagagccaaagctgatgcaaaaaagcaaacgatctgattggggccctgcatggcttgcatgcatgaaatggcatcattggaaagattactcattttgccttttgcatatcaagtgctagctgaacaagtgaacatgggtgcatcaaaatattcagaactaataccacatcatcaagatgcaccagctagtatagtggcagggatgaaaacaatggcggaaattctgatcagctgagtattgttttttttaaaaaaaaagtggtaccatttttgtttctagccatacaaaatttgattttttttctaatttctatcagcgtcatattgaagtcacaactaaacagctaaattaataaatatgaaaaattcccaactaacctagaaccatttccgtagaaatgatatcgttttccaaccccgtggttctgtgtttgattctcaacacgcttacactcctctatatgtctgaaatgttttgatttatgtacaaattaagagaattatgagtttgagtgtaccgatcaggaatgagttttggcaaggccagacatgccctgaaaaaggaacctttttcccgttcctacttctgtctgactgcccttgttggctgttgccatattgagaaggctctcatcctgcctttccttttgcagagctggatcccagtttatgtgtttagtttgtgcgagcctactgaaaaggacccctccattgttgcgagttgcgtgccacaggcaggttgccatcatgggggaagcatggcatgatcaacaattctgcaactacactgcatgacattctttggtccaattcacactgggaaaccaaaaccaaagagaagagcaggttttgtttctcatcacactgaaaagaaaaaaaggtaaaaaaaaaacacattcaggcctacccgctgctgccatcttgttcttcttttctgacgagcaagaaggagctcagctgacggagcgtggccgacatcgggtgtagaacgatcatgcagctgttttcttcgcacaagtctctgaactttcgagattctcacggctcgatgtgcttttgctatctgaaacttcatccattgcaggttgaaaatgggggcaactcaactgaagtatgggaggatgaggcttcgaagaatgggtcctccttgaccgaattaaggccctattttgatatatctaatctaactatctaaggatcacagatccacgttggattgaagttaaattataatagttcaaaatattatattatctaaaataaataaaataaaataatttgttcaattattatcaatataattacatatccaagtctattgatttctggagttatgaatagtcagctccaagaaatctcgaatatgcagttgtgaagtttaaggctagtttttaagtgtactttttgcatggatggtaatacatgaatgcttgacaaacaaaacctttgtaaattgatttgcctcagttctgaactggagctgatgttgctgcttgacgtcagttatgacaggctagccaataatatgagctgggtacgaacaaatcaacttggttttagttttagataatctgaataaaaatggcctaaagcttatatattgttattattatttgaagggcatgtcaggagtgttgtgttaactgcaattcatcaagacctagatgctactatccgaacaggaggagtagaagtaaaaattggcaagtacaattcttaaaacaaatccagaggagcttttggtggtgcagaatagaacacaggaatattatgttttaaaaattgtataccgtactactgagcaagaaagtgggtgaaccaaactttacaaatcagtattagttggattaacaatcaataaatggttgctcccaactttacaagaagtttgatgccacttcccaatattaaaattgctctagcctatggataattagttagctgaatggaggatacaaagcatatgtctctgaccttattatatcaagaattcatacacacatttttggggagattccctggaatctattgaatttatatcagttaaaagttgacttatgtttctagagacgtccattgccgttcacctgaaagaaaatttgaaaaattcgatatataactcatggagtcgtggtcacggatggtagctcctggaagcaagcataaaatttgttagaagtgtatatgtcatcaaaccagaatactaaacagaaaggagatatatatcctcataaacttagtgcaacttgtagcattgcaaaatgatgggtcattactcacgacacacaaacatcttatctttatatataatgattactgagatatgattttacaacaaaagtgaaaagtttgaagtccccatatgcagcctttgcttgtcttcccaactagaactaggatgaaccccatcaagcatctatcctggttgctggcttccaagcaaagcaaaccgtgcatgcttgcctatgtaataacctactgatcatgctaaaacaccaagctaaaatgttctcaagaaagtggtcaaacagtttcattcatttgttgatgagatagatgtgattgtgttcttttgagctgaatggaatggaataccaaatagatgaatgattctagggtacaaaaatggattttgaaataatatttcccttttctctctctttttgtgtaagactctgtcttgtttctctttcggctttctcccaaagccagaaatttacctgccataaaaaaaattaagaaatttatatgaggatttttttttcaaaaatagcgacttttaggagctcaggaagcgtgcgcgttcatatattccattccattcagcatttaggttaaaatgaggtcagtaatataatatctattcaatcgttccaaatttcataactattcgaatcatatgcaacacacatagaggtatgcatgtgctctcgagggtttaagtaaaacacactccctttcttgacttgctatttttgtgtccactccccaaccccaaccacctttcacatgtctgaagttccattcttgatggcctccattagctgcagcattaacaataattacaggagttaggagggggataattgcggccaatggcagctatcgctgtgatggtattaaaaattaatgcgtgctttgtggtgtcaccagaaacaaaccttgatggcttgtgattggtgatcagatcatgtacaaataggctgtgagatcattgcccatttctttttgagaaaatggttgttaacatcacttaggtcatggcaagtttgttgcttccagaaattatatatgcacgtccttttcaagcaagtcccaggtgacaatctcattcttgaccccataaaattaattattagcttattagcacttgatgaatgccatattttctgaacacaccatccctgtgaattccatctctttaatagataacagaaaataaaaaaaaagattcaggatcaaactatcacgggaaaaccgaaactgaaaaaaacctttattgcaaaaaggtatctgaagttcaaaacacaaccatttaagcatctttacaagagttttccctttcttcttctaaaaagaaaaggctcacgagcctctcctagctgagcatgcatttttcatattattaaacaaaacaactactctctccgttttaaaatgtaataacttttagcaatgtttatggacatgttcatattcaaatacataactcaaaaatattatatttagacaggtggtattttttttcttttggcaaaactgttttaggccccctttgattcaaaggaaatttataggaattttagaggatttcatttctataggaatttttcctatataaccctttgaatcaaaggaatgaatcctatgaaatcctatgaaattcctatggaatgcctaaacacatgcaagttttggaggaaattcatggaaactttcctatgagttttcatctctcctctaattcctgtgtttttctgcggtccaatcaaacggccattcctgtgtttttcctgagttttgtaatcctctattttacacttgcactcgtattaaaatcctacattttttctatttctacgttttttcaatcctgtgattcaaagggcccttaatagcggaggaaaaaaagggattcctccacgttgagcgacagtagagctggcacgtttctcgaggcacatgcatcaaaatctagtgagaactgatggtcctgggttaattactatacttgctagccttttaatttgcacagtggcgatcttaacaattactgtacttggtcacaagctagacgtgcttatgcctaaagaaaggaagatagtatggtacggcgtcagttggttatgataaaattctctaaagtgtggtttagctttgcttaaatcagaagctgttagggcaaagataacatattttacttagagctttgaagagtaaggctgtacttgaatctagcgtttgatcaatatcattttggaatcataagccttaagccctcttttggaacaccaaaatcttttattacgacatgcaaagaaaagattttttttttccggaagacctagaaacagtagacagtgagttacactgtctaatttaaacctcagaaaactcttataaatatttgttaagtttttaattgtttattaaattcatattaagtccagtacgtagtttagaaaacgtgatttgtaaattccttatattttaagacgagaattattccaagtaattaacctgattgactgatcggtcgactttgcgttcgaactcaagtgtccagaactcttccctccaagaacacagaacagaacggtggatcagtgtatgattagttaattaatagcttaaatttttttaaaaataattaatacgacgttttaaaataactttgttattgatagaatatttatagcgaatgcaatcgtttagtatttttagaaaacgtgtggtataaaagaagagagtgtaagttgggaactcatcggaaattttacatgcaaaacagctgggagtgctccctgacttcttcggttgaaattatcaactcaacacatcatgtgcacactttttaaactacttaatagtgtatttttaacaaaaatatataaaatattgctttaaacatttatatttttttaaataataaaataattaatacttaattaattttatggtaatgagtcatcccattttattagagtctgtttggctcagctcagccaaacaactttagctccatctaaaatgagagcgagagttcttgtttgattcagcttaggattattataatctgaattattaggagtaagccgaaacaaacaagtagattattacgttagattattataatctataagccagattactataatccaataatcttctttataggagcttttttcagattattgagtggctaaagacctactacccttagatgcctctaataatctagagaaacaaacaactcgtagcttattttatgttagcttattataatccagcttagagtaatctgatttaataatctagattataataattttaagctaaaataaacaggaccctagataaaactctaataaattaaagagatgaaattgggtttatacttcttcccaactttactcctaacactaaattttagaattagagctcgagaaaaaaaatgtccaacaccgagcagtcgccgacctgcccacccagccgaggcctcggtttccgtttgcggtggatgtagcatcagctcgatttggtattttcccttctcgtccgcagtccatccgctgctccgatatatatccagcgccgcacccaccaccggccgtggacgaatcacgggacgagaaacccatcgcgcggcgggagggagtccgcgggcgacgggtgtcccctctccgcgacacgcgccgccttgccacgctgctttccggcgcgccggggtggcgtggcgtggcgtggcgtggcgtgggaggccggcccggcctttttcggtcgcgtgccctcgtggagttgccgattcggactcaggggcccgtcgtcctttgcgatgtctggccatacaattgtgtttcgtgtcaattcggtaaaaaaaaaagcagaaacaaaaatactatacatgttaagggcccatttgattggtaggaaaaatataggaattttgaaggattttaatcctatgaaaaaaaatcctatgaagacatttgaaaaaaaggattgaatcatatctaatcctttaaaattcctatggaataggtaatcctatgcacattttggaggaaagttagcgagaggtctaatctcttggaacatttcctttgagtctatctctctcatctgattcttgcgtttttcctgtaatccaatcaaacggtcattcctatgtttttcctgtgttttgcaatcctctgtttcacaattgtattcctgtcagaatcctgtgtttttcctattcctatgttttttttattcctacgattcaaagggaccctaaggctgatccgctaatttcttctagcttttcaactcggctctcctgatgaaagaggagggaaataaagtacacgaaaaacaaatagcatatttgcattgcatagtataggaagttaatttggattttctcgaataggcaatactccatctgttctagaatataagcatttttagagttgacataattattaaaaatgttggtagaattaaatagggagtgttgtgattggagaagtgaaggtaggtggaaaaatagaatggtggaggattatgattggttgagaagagaatgttggtagagaaattgttatattttggaacaaattctaaaggctagaagttgttatattttgggacggtgggagtatgttaaataaatagttattaaataattaataatatagactaatataaaatatatcactccataaatatgtaagacataattaattcgacttctataaactaaaaagaaattaattaattaaaaataattaacatacattcgcatttatatttattgtttttttacagtctatagaagtaaaatttaacttgtatgtttgtcgagtgatatatttcatattaatctatcttatcaattttcttaaattatttatcactatttagataacatgtaataaatgagtaaatatccccttgataaatgaaaaatactttcacctaacagatgatcaacagctcaccacatatgtatgttccaaactttaacattggacctgtttggtcactcacagcctcatcatcatctatctccacaagaacataacacaaacacatatcctgtctaatctacactacgcataaacaacaaaatcccaacaaaaaaacaaaacaacaacgatagtactatggttccatgcagacatacacacacacacaataatataaaaatcaccagaatataaaaaatgcagggggtaaaccatgaccaaagacatgcacaagatcaaataaaattggagatagcaaccaaaaaataatttaaaataaactaggagtacaccccaagggccaccctgcaagttgaattaaaccactcttcatctcatctctctccctctcatcgccatggccgcctcctcctccatttccatttgcatcaccacctcctcctcctcttctccgaaccctaattccgacgagcggtggtggtgctagcgagcgagcttgatctccatgcgtcggcgctagctccaccggcggccatgcctcaccgacgacgcctgcttaacccggcgccgtcactgccgccgccgccggctgctgctccggccggcttccaccaccacctcctcgccgtcgacgacacgcggctgccgctgctcgccgactacgcgctgctgcagggcgacgccgcggcggcgccggcgtccgcggagtggagcgccgggagcgggttcaccggcatctccaccgacccggccaccgccaccaccgccacgacggcgtccaccgccacggcgccgggatcggcgtcgaacctgacggcggcgaccgccggaggaggagggagggagacgtgggtccgccgcgccagggagggctactacctccagctctccctcgccatccgcctaacctccgaggccttcctcgccggcgtcccgcccgagctcctcatcggctgcggcggcggcggcgaagccgagaaccacgccgacgtcgcggccgatgccgccgctgtctcctaccggctctgggtgggtagtgtacacagctcgcctttggtcttaccgacctgacacgacatgccatgccatagcttagctcgagaaagagagacacaaatccattttgaactttctcttttttatgcaaatttcaaatttcaaacttctttctctccctgccaaagaaaacagtttttttcagcttcaagttttgctggagatttcgtctaaattctttttagtcttcaattcattttgcagttagtttgtagcctctagattgatgttttttttactagtgggttgcttaattaatcaaagatttcgcactaattgcgaactgtgtagtatgttgactctaatctattcccattgaagtctccattctgatgcatgctcagtggctgcacattgtacatatattatacaattcaataagggcttgtatattgcaagttgcagggagtcgtgtaaccttctagcacctccctaatcatgccccctaaccacactagtagtatttctgtttaattaatcaatctcttacttagctttaaccaatccatcctgcagcaattaactaccactctctgtagctaactgcactgcactgatagctataaacagcttgctaattaaactgttgctgaattgataggtgatccaatgatcttgttgatcttgtgttgttgtgtgtgtatgttcaggtgaacgggtgcttgtcgtggggggacaagatcgcgcacgggttctacaacatcctgggggtggacccgcacgtgtgggcgatgtgcaacgctgcggcggaggacggccggcggctgccgacgctggtggcgctccgggcggtggacagcggcgagtcgtcggtgctggaggtggtgctcgtcgacaagtgcggcgacccagcgctcgccgacctcgagcgccgggccctcgacctctaccgcgccgccggcgtctccctcgacctcgtccgccacctcgccgtcctcgtctccgaccacatggggtaatcacacactaaccaatgcaatgtaccccttactgttgtcttggtttattttctccgtcctaaaagaaacctggattattttctccgtcctaaaagaaacccaccgacctataagcgagtttgttttgggatggagggagcattttacaagaaatgttgaccggattatcgacgagagttcgttagtttgcgttttagcttatcagccgtagctaaaatttaattttagagttgattttgattttttttgttgtgttatttttcattattggtttttaaattaaaaacatactgtatataaaaattttcctcacaaattatcttttaagttgtgttgttcacctgtacaacaaacgatgagtctgttcgttgataaaaattagcggcgtactagccgccgtgctgtggatgcaactgcgaatgtgattcacaggactgggcaagtcaacaagctcgatcgtccccgtgaacatgagcaccgacgaacacgtgaacacagcttcatttttcagaaaaataagtgagctagataatctaggtactgtacggctgtataaacggagtagtacgcccaggcttaattcgctgcacgtacctctgtacttgtctgtacctgtgcaagttgcatctactatctgtttctttgcttaattggtctttgaaatgtacagtgtcaccatgcatctgtactctatggaccacaagaactattaaggactatacttaacagtcaagtctagttgctcttagattttgtagacatatgctttctccgtttcatattgtagcaagtagttttaggtttgttccaagtcaaaccttgtcttgagttttactgagtttattgaaaaaatactccaacaactgaaacatcaaattagttttattaaacccaccgtgaaatgtcttggtagtgtatttatttgttaccgggtgtatttttctataaactcagtcaaaattagagaagtttaacttaagataaaactaaaatgtcttacaatatgaaagagaaaaactaagttgtgctttgctcgtcagaacttgcagacatgtagactcagatttcagttgcaggttcactttcaggcatagttgcaccgaacattcagcattggtctctgacgactttcaatggagtttgtgtttgtgcaggggcgcgttgcggtcggaggacggggacctgttcatgcggtggaaggcggtgagcaagcagctgaggaagcggcacaggtgcgtcgtcgtccccatcggcagcctctccatcggcttctgccgccaccgcgccatcctcttcaagagcctcgccgacttcatcggccttccctgccggatcgcgcagggctgcaagtactgctccgcgccgcaccgctcgtcctgcctcgtcaagatcgacaacgagagaaggtttgtaaggtcagtctgtcgatctccctctgaaatgtagcagatgtgctgttgcatatgacttgactgaactttgctggttggttggttcagggagtacgtcgtcgacctcgtcgttgagccgggaagactcagcagtccagactcgtctatcaatggccagttgctctcctccgtgccttcacctttcaagacctcatgtacaatgagttctgcaaactatgcaacaccggctgcttcgtggaatcgcgcgatatctggagatcgtcgcaactcgatactgtcaaatcctcagtattcaggtacagatataccattctttctccacagcaaatatgttattggagtattctgattagccatttacaatctttcttgtgctgcgtacagttgctaagtactgtgttgccgaggagaagagctctgttcaggtagccaccaaagaagccatgctgccaaaatgcggtcagatcacgcagaacggcaactgcaacaagaacagtatggcagtgttcgaagtgtcgaagcagatgaaggcgatggagatcagttctgagagtggcgataaggacaacatctccagtgctacgcctctgaaacggctgagcatcgagccgtctttctgcgccgattggctcgagatttcatgggacgagatcgagctaaaggaacgcgtaggcgccggtacttctttaccttcatgtttgttactgatttacctgtatgatgtgaaatctgatcgctgctgaaatgcaatgcaggttcgtttggaactgtgtatcgtgctgactggcacggctctgtaagtatattgaacttttggctcattgtgtaagcttgattccctttggagatcataaacttgaggttgtagatttgaaatgtaggatgttgcagtgaaggtgcttactgaccaggatgtcggcgaagctcaactgaaagaattccttagagaggtctctgccccattatgctttgattctttataacttgaactaactgttcctttggatcacaaaccagttccatctttctaacttggaaattgtttttaaccactacagattgcaatcatgaagcgtgttcgccatccgaatgtggtgttattcatgggtgcagtgacaaaatgcccacatttgtcgatagtaacagagtatctgcccaggtgaacctctccctcagtttcagttgacaaaacctatcaatgatagtttgtccttcaccaaataatctttctgatgatgcaaatagagggagcctcttccgtctcatcaacaaggcatctgctggagaaatgctcgatttaaggcgtcgtttgcgcatggcgttagatgttgtatgtatcacagcttttttcttctcttctgcatactgtatgcatctgaaccgttactggtttctctgaacaatgtatcacccatgctttgtttgtaatgcaggcgaaaggcatcaactatctccattgcctgaatcctccaattgtacattgggatttgaaaacgccaaacatgctggtggacaagaactggtccgtgaaggttggttcaaaattcaactcccaaatagtaacagcgagatcgaaaacttgttctacctttttatttctttactgtcgttgatacgaacttcaggtaggtgactttggcttgtccagatttaaggcgaataccttcatatcctccaaatcagttgctggaacagtaagtttcatattaccgtccaagctcaagtagcaatctgcccagctcaagtagcaatctgccattgaaattattggctctgatcatccattgttcctgaaaactgcagccagaatggatggcaccagaatttcttcgtggcgagccatcaaacgaaaagtgcgacgtgtacagctttggagtgatcttatgggagctcatgacaatgcagcaaccatggaatggcctaagccctgcacaagtatttatctcaatcttctctttattctgatcctgcatttgtgtacacgggactgtggtttgtgattcagcagagcaacctgtgcaggtagtaggagcagttgcattccagaacagaaggctcccaattccacaagagacagtccctgagctagctgctcttgttgaatcctgctgggatgagtaagcactgtttgttttgaagaaatttttccatgatttagacaaatttttgcttgatttcatgctatgttcagaacaccaacttgtcagcgagtgattttgctctccttttttcagtgatccaaggcagcgaccgtcgttttcgagcatcgtggacacgctgaagaagttgctcaaatcgatgcttggtggctcatgacgaatactgaagactgttggtcgccttcttatttttgttctccctgttaatgttaatctacagcaaacaataagttggtaagtcagttgccttaaaggcatctgagttctctacagaaaggagaggatagttgaagcagcacaagtccaatgctgcatcgagttcgttaggtcaccttttttttttcctccgttttccgcatgagaaactaatatctaaaaaatattgttttttgctcctctttttctctggattgaattttgtacagtgcatacaaatttgaaattaatgtgcagaattcagatggtcatgattcgctcggtttactacaaaacacgataacacgtccttttgcaattagcccacatgaggaaaggaaatcattttgaaatcaagcaagataagccattaaattctacaggagtccggatagacgccctgaacatcatatacttgagctgaaactctctcaggtttatggttttgatatcggcataccaaatgccctgaaaatctgccgttgttttcagtatattatcaagctccatctcgaattaaaaagcaaaaaaaaaattaataaaacttagtgacatctaacttaagctgatggttgcatttgggcttacctagtacgtacaactacatgcagaagtccagcttgtgttaggaatctaaactatatgttccagcagtcacaggaaacagggtcggtggcagcgtttcttgacccgggaacacgggatcatttttgtccccaccttgtaaaaacctctagcaagtagcgtaccacgtctcttaaccccgttcctcgatcccatcgacccggggactttgtggctagtccagctccttcacgtagctaatacttctcttgttttgctgaagcgagggtatggcaggaggtttggattttgccatgtcaaaaaggactaaacaattttggacatcccattcatgttgaacttgttatcaacgtgaatattcagatacaaagaattaatggtagtacgatcagtgcagaagtggatagaattttggccttcactcatgcatcatataacacaatccattgattatcctaaagtccattctgtatggttcaattagtacagtagctgtataataattttgtttagtctatgcccatgcccgcatctagtatacgtttcttatcttcagatcgttcaattattcaccattgcatcgaacaattaggatgggataaaaggagcgtaagaaaataatacttgcctctgatatgaacttaagaagctgttggtcacaagaaaacaatagcattttctttgcataagatattgacaagtagtcatatgcctgagcactgcaatcagctatttcatctctacaaaagaacacaaagaacatggtaaggaacttcaaaacagaaaccaaacatgaaaaacctggaacgtgaatgtgcaatgtgctcacctgatagtttcagcaagaagatctataaagaagtcataagcctcatgtggaacagtttgacgagcattgaataattggctgtaagcaccttccatgaaggaaaactcaaggttcagggcataacttgatgcaaggatagtcaagcttttagggacagaagttccagctccacgtggaattcagcaattttgttctgagccaaaagtctcagaagattaaggccctgtttgtttcagcttaagattattgtaatctagattattaaatcagattactgtaagttggattataataagctgacataaaataagctacgagtcatttgtttctctggattattagaggcatctaagggtagtgggtctttagccactcaataatctgaaaaaagctcctctagaggagattattggattatagtaatctgacttataggttataataatctagcataataatctacttgtttgtttcagcttactcctaataatctaaattataataatcctaagctgaatcaaacagggcctaagccccaaaatagggtactcatcaggggagggtggtattatgccactggatgaacaattacaaataaacacagaataatatagcatttaataaaaataagttctggaatgcagagctccgaaaaaacagaaaattaatgtacgtaatgcacacttttcagaaaattatgggatctatgacacacttatgcagaaaatcttgcgacacacttttcatgctggtctgctggctcgtttggaacgaacatgatgcacgggttttcaatcagagatcacacattaggccagttgtttggagacatcaaggatgagatttccatttggaaagagactggactgttaaaagattgtaatgagttagggcttgtttctcttggtgtttgggcttgttcaggacccgacacctccatcttcgacagcatactgttgatgctacttgtaacttgtatctttcccaaatcttaatg

SEQ ID NO: 14128 - DNA, 664 bp, Oryza sativa
agcccgtgccatggcgctggaagatcatgccggcgccgtggagaccagcttggcggaccgcgaggccgccgccgctatccgtgaggcgacgctggcggcgcacgaggccgcctgcgccgaagaggagtccgcgctccggctccgcgaggacgcgcttgctgagcgggagcgagctcttgaggagtccgaggccgcgacacaacggctggcggacagcctgtccctccgcgaggcagcgcaggaggagcaggcgcgccgcaatctggaatgcgtccgcgccgagagagccgcgctggagcagcgggctgctaacctcgaggcgcgagaaaaggagctggacgcgagggagcgcagcggcggggcggctacgggcgaaagcgacttagtcgcccgcctcgcagctgccgaacacaccgtcgcggacatgcagcgcgccctggactcatccaccggggaagccgaggccctccgcttgtcgggtgagatagggcccggcatgctttgggatgcagtctcccggctggatcgcgccggtcgggaagcgggcctctggaaaggccagacaatttcgcgctccaccaatctggaaggcctcgccccgcaccttaggaggatggcctgggctgtccaacaactccccgaggagctcgagaagaccatcggg

SEQ ID NO: 14129 - DNA, 666 bp, Oryza sativa
ttcaccgcgggcctgcctccgtcgccgccgactggtgtttccgcctacacggctggcctattatgccgccgctgttgggcgtctacgacttcaccgccggcctgcctccgtcgccgccgattggtgcctccgcctacacggctggcctattatgccgccgctgttgggcgtctacgacttcaccgccggcctgcctccgtcgccgccgagtggtgcctccgcctacacggctggcctattatgccgccgctgttgggcgtctacgacttcaccgccggcctgcctccgtcgccgccgagtggtgcctccgcctacacggctggcctattatgccgccgctgttgggcgtctacgacttcaccgccggcctgcctccgtcgccgccgattggtgcctccgcctacacggctggcctattatgccgccgctgttgggcgtctacgacttcaccaccggcctgcctccgtcgccgccgactggtgtccccgcctatacggtcggttggtcacaccaccgttgatgggcatcgtcatctacaccgccggcctgcctccgtcgccgccgactggtgtccccgcctatacggtcggttggtcacaccaccgttgatgggcatcgtcatctacaccgccggcctgcctccgtcgccgccgagtggtgcctccg

SEQ ID NO: 14130 - DNA, 667 bp, Oryza sativa
atactcccggtcccatatcaccgacagtagcccccggcgttatgtcagggcgatcatccttctcaagggaagcggtcgggcatgacgccactcataaagcctggtgacaggtgggaccggtctccgtgattgggcagaaacccaacggtctcaaaccacgcatatcggtaacggtgtcttggccgtcagtcatgggcggtctcttcaagactgccacatcacttgagcagcgctcgaatctgggcgtgcagatcgtttcgtctggagacatggtaacgtcgcttcggtcggcgagcgtaattaacgcgcacacgatacgatctatctcgactgccacaaccgcatatccacctcatgcgccgcaagcgggcgaatggaattagtggaagcgtgggcgcgagaaacgagggagcgagatagcgagtaacgagggggcgagatagtgggcacgagaaacgaggagccggactcagcgatggcaagggtataaagccatcgaggaaaggacttgctcccttcctttcgccactattcccctttccttcgccgtttgcgccctaaactctctctttgctgcgcctcaccttcgccacacacgctcgttctcaaccctctctttctccgacgacatggcacggggctccgctctgctcgacggtagcgtact

SEQ ID NO: 14131 - DNA, 2849 bp, Oryza sativa
tttgatgataaatcaaatcacaataaaataaattataattacatatattttttaataagacgaaaggtcaaacgtttgtcaaaaaaaatcaacggcgtcgtacattaggagggagtactgtataagtgtatatccgctgtggccggcacattgacgctgccgccacaaaaccgctcgatcgatcgatcggtcgcagttcggttcgtgcgtgagctgatgatgcgctggctgtcttcactcgtcgaagcataactgcgttggcgcgcatcgatagggggccgattatctagatgcttattctttctacagctagcgtccatcattttacgtgatactccatatagtgcttcctccgtaaaaaaaaataaccctatccaaaatcgttatatcagattatgtctcacctaaattttaggttggttttttttaaaagagagagggagtatatcaagaggtgagcgtgatctgaagagagagacgactgttattagagtagcctacccaacagcgtgatccgagcacgtgtggttcacctcaccggcgcgcggtgccggtgggcgcggagaaagccgcactcgccgcaccgcgcagcacgacgacctaacggcaatttcggcgcgcgccgagccgacgaacgcccaagatttcctggatgtgacgcggtattgggatttcctggatctcgacccggataaccgaaaatgatcagatcagcacgtacagtgtcagtatgaattttgataaatataaaaacgagtagctgcccgacattaagtccgtgtttaaatccaggggtgaaaagttttggtactccctccgtttcgaaatgtttgacaccgttgattttttaggacatgtttgaacattcgtcttattcaagaacttttgtgaaatatgtaaaattatatgcctacataaaaatatatttaataataaatcaaatgatagaaaagaattaataattacttaaattttttgaataagacaaacggtcaaacatgtttaaaaaaatcaacggcgtcagaacatttcgaaacggagggagtatatcacatcggagtattaaacgtagactaataacaaaataaattacataattcacgagacgaatttattaagcctaattaatctatcattagcaaatgtttattgtagcaccacattgttagtcatagagcaattaggcttaaaagattcatctcgcaatttacacgcaatctgtgtaatttttttcctaaatttaaacatggcaaaaagttttactaggagatccaaacaggccataaagtaacttcaaatcatctgaatatattgatgcttcccggttgatatatacaataacatatacagcaaactgagagatgtaggcttctttaaaatcagagtatttttacgcgcattatttacttcgttataaatactaaattaatttttttatggaaaaacttagcaagtatagtttgagttttataacaagtgtgcaatatagcaggaaaacaatttttttaagaaatcgtatttttaagagtcttggagtagagattccataacaataattcaataaagtacctataaaagagtaaattttacccaaaaaatatacaattatttaaacaaaattaccactttgctacaactttagctttgtagtatttcacacaactacaacaataacaaatgatttatcaaaaatctgcaacttatccactatatggatataacatatgagctcaacttaaaacaatagtactacaaatgtacaggacaagtgggacggcacaattttacaatatagacaaaagatacagttttacaatatcatatattattgttgtacaagttaaacttgtataacaaattgaaaatttttcacgaacacgtcaaatgattgtgcgtcagtatattagacgaaagagtttttattacacaacgcaactggccagactttagcgggtcattgccggttataggaagaggattctgagatgaagaaagagataaactaagaaattaaaaaaaaatgcaactcctatctagcaggagggggtggcagccgcctaatctcccaatagatccccccaagtacgcggcaccagcgagggacagagatgaccctcaaactagtttatcaaaccgatatttttgataaactagttatagcttttttaaatttactcaacataaattgagaatcaatatgcaatactaaaggttcaagccacaacagtgaataggagtaccacgccacacacatgcgaccgacgacagaataataacatcaacatttctccccaaaaaagaaaaagaaaacatcagcaaacaatgcacacagacattgacatatccatggtccagggagctcacccgtccagcgtttcgccccttcacctcccaaccaactcgtatttaaacccccccaacctgtactcttcttgctcgcgttcgcgtatatatccctctcctcacacacacaggtgttcgtccaaaattccgaacacaaccaagcgccattcttgcaagcgcgattcccttgccatggtgctcgaggggcaggagacaccggcggcggcggcggtgcacgggcaccggctgtctacggtggtgccgagctcggtgacgggggaggccaactacgacctcgccgacgccgacctggcctacaagctgcactacctccgcggcgcgtactactaccccgcgggcgacgccgtgcgcgggatcaccatcaagtcgctcaaggaccccatgttcccctggctcgacgcctacttccccgtcgccggccgcatccgccgcgccgagggcgacgacgccgacgccgccgcggcgcgccgcccctacatcaagtg

SEQ ID NO: 14132 - DNA, 5597 bp, Oryza sativa
tcctgcagcccagaagctcatgtaactccaaaccaaaaggaccaataaccaattactaactaactaactagtatcataatcactaactaattaccaagtaagtaagtagtaattactaacttgccaggtcagcatctttagttcttttcacagcttcagaaaggcacaaacaaaccaaaggcttatatcagccagaagcagcagcagtagccagcagccagcagccagcagccagcaaagaaagaagccaagaagcgccaaaggaggaagaagactcctctctcttctcctcccttggctgcaattgcaatactgcaatacagcaaatccatatccagagaagcggttgaattccaggagccgtgtttgcgcagagaacgcatgctgcttctggaatcgtttcctgcctacttttcttctcctcccgtttggctgggcgccgctgctctctccgcctcagctcctcctcctcctcctcgtcgctctcttccctgtcgcggctgttgcgttttgccagttagagcccgactgcgtcggagccgtggcggggattgttgttgccggtgccaaaaatctgatcttggcgaaggttttggggtggaaagattgggttttctttggctgggattttcatggttataggaacctgtggcagacaggatttggagttctgagtttgaagtacttttgatgtgattcttggcgcttcggagatccatttttgtgggtttgttgcgaggctctgaagtttttcgctatcaaaggtgtggaagcagtttatttttccagtacagaaggactgttagtactgtggagatttcgttgggagctcaagtgtttgtctgattagctaaagctccaatcgttttgttgattgaagaattgaaggtggaggtgttcttgtggacactgagtccgaattttgtgtgtgagatcacctgaatttgttggaggccgaatgcttattgctaggataaatctacattttggtttctgcaaagactgaagtggacttgcttgctggggagtgtgcttggtacgaggatttgaggaggagctgtagctgaggtgaaaagagatcgatggcgtcgctgtcagagagcgaggggacaaatagggggagcatgtgggagctggatcagaaccttgatcagcccatggatgaggaggcaagcaggctgaagaatatgtacagagaaaaggtctgagatttctttctcttcagttattagcgtatgaaagtcgatttgttttgcacaaatgagggctttcagaatagctgaagtagatgtaaagatcggtctctgcatgtgactaattcatttcattggcagattcactactaacttttttagataatgaatttgctgcttagatggatggtactgcacgaatatttagtttgccatttgtagggcatgaaaaaactggatgtttatactgttctaattgaagtaactgagctggtaaatcagtaatttgtattgactgtttttccttaatacagaagttttcgtcgcttttgctactgcggcttgcatttcagagcctgggggtggtctttggtgacttgggtacatcaccattgtatgtgttctataatgcctttcctcatggagtagacgatgaagaggatgttattggtgctctttccttgatcatttacacccttaccctcattcctcttctgaagtatgtttttgttgtcttgcgggcaaatgacaatggtcaaggttagataattgatcttcctacaatctaagtagcatataacattgtagcctgaaaccatttgactgttctcgatattgcaaacaaatgttgcttgcgcaattctgcttattattcacttgataacttgttacatattttcagagaagaccacttacagattgttatcctcacaggtggcacatttgctctttattccctgctatgccgtcatgcaaagattagcactatacccaaccaacacaagactgatgaggacctgacgacatatagtcggcaaacatacgaggagaattcagtaggagcaaaaattaaaagatggctagaagcgcatgcatataaaagaaattgtcttcttattgttgttctcattggtacttgtacagctattggagatggaatccttacccctgctatatcaggtacacatcttaatttctttttaatcaatactcagcatcatattcttctgagaaaatccaatgcatcttgaatctgatttatgatcttttttgtgttccagttctttctgcatcaggtggaataaaagttcaaaatccgaatatgagtactggtaatgctgtgtgccctttatagtctatcaaattcttggatattgtaaattctgtatatactgagtaaaatcatgttcttccttgatggaagtaagtcagtgacatttatatctgtttctatgcattattattgtcccaaatgcatgatccttcacgatcttaacaaggattccaaaatcccaatctaataatcattattttcttttgcattgattgatgttgcaaacttgtttgatctttggtctaccctgtattggcagatgttgttgtaattgtttccgtgatcatcttaattggattatttagcatgcaacactatggtacagacaaagttggatggctctttgcacctatagtgctcctctggttcattctaattggaagtgtcggagcactgaacatacacaaatataaaggctctgtgctaaaagcatacaatccagtctatatataccggtatttccagcgacgaaattctgatagctgggcctctcttggaggaatcatgctaagcatcacaggtgaggccctttcttcagtaatagagtttacctgcatcagcttatgtaaaacccattgtaacatgcaatacaatgttgtcctcttaaggaactgaagcactatttgctgatctatgccattttcctgtatttgccattcaggtaacatattttaagcaaggcattaccggatctttatgcaattgcgggttaactaaagtaaacatgtctattttttcagattgcattcaccttgattgtattcccatgccttctactggcatacacagggcaggctgcttatatcattgcccacaaggaccatgttgctgatgctttttatcgctccattccaggttctctcatctcaacagcttttcatctacctttttgtggaatagttcatccatgctttccacttgtctaagttgtcttgtgacagaatgtgaatgtgccaccacatcatgtctgctaggtgcacattggcatagtgcacaacccaatattgatagcttgtattgcttatggccctatttgtaatatggtgctcactgtgagatgtgtttaatgattgcagattccatatactggccagcatttgtcatagcaactgcagcagcaatagttgcaagccaggccaccatatctgcgacttactcgataataaagcaagctcttgcactaggctgctttccccgtgtaaagatagtgcacacctcgaagaaattccttgggcagatctacatccctgacatcaattgggtccttctaattctttgcattgctgtgactgctggattcaagaaccaaagtcagataggaaatgcatatggtaacatttcaccttttatataatatttttgaataatttggcatgccatggagctgccattttagcatcccaatgcaacatttatatgcaaaaacattttaatacactttgtgctaatcagtagtactttcataaaaccatttatatttcattttgactctggccatgattggtggttacctgacattcacatacaaatccctgatgatgtagtacaaaaactataaattccaaatttccatcattgtagatatcgtgccaaatttggataaataaatagaccatttaaaccaatacgactgcttctagtgacaccaatttttttttcctgaaaatgagaggctgatactgatttttcatgatataatatgcattgcatcattagtcaactcttgatttccattttatgatgtatgaacaggaactgcggtggttatagttatgctagtcacaacatttctgatggtaccaataatgttgctggtgtggaagagtcactggattctagttgtcacctttattgtgctttcgttgatggtggaaatcccctacttctcggcctgcttattgaagattgatcaaggtggttgggtcccacttgtcattgccacagccttcttcatcatcatgtatgtgtggcatttttgcacagtgaagcggtatgaatttgagatgcacagcaaggtctcaatggcctggatccttggcctcggtccgagcctcggtctggtcagggttccaggtataggctttgtgtacactgaactggcaagcggtgtcccgcacatcttctcccacttcatcaccaacctccctgcaatccactcggttgtcgtcttcgtctgtgtgaagtaccttccagtgtacaccgtcccgatggatgagcggttcctcgtgaggaggatcgggccaaagaacttccacattttccgctgtgttgcgaggtacgggtacaaagacctccacaagaaagatgaggactttgagaagatgctcttcaactgcctcttgtccttcctgcgactcgagagcatgatggagggctattccgattctgatgacttcagtgtgccggagcagaggacggagggatccatcagcaatgcatttctggctgagaaaaccaacaacaacacaatgtgctccaatggtgacctgagctactcatcacaggactccattgtgccagtgcagtcacctctgagggggaacagcctactgaggtattcaagccaggccagccacactgtcagtgatgaactggagttcctgaaccggtgtaaggatgccggtgtcgtccacatcctcgggaacaccatcgtcctcgcgaggagggattcggggatcatcaagaagatcgcggtaaattacatgtatgccttcatgaggaagatctgcagggagaacagtgtgatcttcaatgttccccatgagagcttgcttaatgttggccaaatatattatatatgaaacgcattttccggcttaatttgtgtaggagtagggctccatggaagagggagggaggcagctgtacatgttttttagggagaagcaactgtaaattattaataaacagtcatttttcatggggggtgtaattagtgagttgtaaatgcatatgacaaatgaatggatcagatcgaagcatgagagagatctgaaggctactattttctagatgatatgactcaatacatgttaagtttttggtgccaactatatagaatattaaaaaaaaaggtaaaataccgaagtcattccaaacattatttaagaagaaaatataagtatgttgggaatttaacatgggaccttaagtttgaaaccacacaaccttatcactgcactattaagtgcatctcttccatcatctattcatctatacaggaaaaaaaaccaaacaaacaggtgatttctttgcggaataagttcaccgaaggtctctcaacttaacag

SEQ ID NO: 14133 - DNA, 8797 bp, Oryza sativa
  unsure (1)..(8797): unsure at all n locations
cggcgcgaagcgggcgcgctggtccatccaccaggcggcgcggagagggggacagaggcggccggcgctaccgctcgctccggcgagagatagggcggcgcggtcggcgctaccgctcgctccggaggcgacgctctcgggttctctagctcccgcctgccgcgctcgcctaccgccgcccgccgctgctcgcctaccacgcgaacccgccgccacgctcgcccgctgcccgcccatcgctgctccacccgcgcggccgcgctcgcctgccgtcgcccgccgccgctcggctgcctcgcccgccggccacgctcggctgccgcgcggacccaccgccgtgctcgcctgccgccgctcgccgctgctcgctcgcccgccggtctcactcgaagaagaagagagagagaagagagaaaagagaagaggaggagtaaagaaaagataagaaaatgtgacactgacatgtgggccctacatactttttttttttttactagagtgccacgtcagcgaaaccacccatatatactgtctagggaccttgagtgaacagttttgtataatttaggggtggagatttctggttttgtggttaagagaccttaaaaaatctcgctgttaagttgagggaccttcagtgaacttattcctttctttgcatgcatatgaattcaaaaaccaaaaaatttctccgtagcaagaacgagtgaactagcaccgttcgaatgtggaaggcgtaagaagcgtagccgcgtcccgcgtactcctcagaccggcgacggcggcgcgacggccggaatcgcctcgctgggcgacgagcgggccgggcccatataaaaatttggcctaaacggcggttcggcttatgcgcggcccatttctgtatgggcctgaacaaaggccgcggctcctgcgtgctcgacgctgacatcatcgacggcgccgacgcggcttcccttcttctctcgccgctacgtgctgctgctgctgcggcggcggcggcggcgcgcgctcgctcatgacgttcgccgcgccgagctgtactacaaggtataccgggctcgccacgacggcgaccagcaaggccggagacggcgagagccccccatggcgcggtaaactgtcagaagtggagaattcagagaagaaagcagaagaagttcagagaaaaatgttcagaggattcagagaagaagagtagagttcggaatagagggataccgcttcgctgtcctctgaacttcttctgttttcttctctgaattctccacttctgacacaaacatgatggcatgatggcattccactcaatggcggatcggcgttaggcatgcacttcaagttcaagcccttgagcaaggtttgtttttttaccactctatcagttcgaaaacgtagtagtatattttggagcagtacagatgtgcatcacatgtcagtttctagcaacaagctatagctagcacacctgtaaaaatagttttaataaagttattagtacacctcaaacttgaaaacaaaatactacctttgtcccataataattgtatttcttaaatttaaatttatcctaaaataattgtcacaatagagtaataatgatttcattaatcacttctcattcaaaattcttcctattttgccctcaactacccttcacttttacctataaaccatttaataaggggtattatcatagtagctagaaactggagataggatttttgtgttctaaacgaggtggtgagctattagcctattaacgtataattaattaattattaattattttgtacttggaaaatagattaatataattttttaaagcaacttttctataatatttttaaaaaataaacatcctaaaatgtggtggcaaattttagcctttacatggttgtaagtagagagataaaaagacttgtctcctcgggtaggtgaggtgcacgcccagatgagttgaggtcaccaaggattagtaagggcggtacacatagacatagttttctgctaaaaaacattttttacaccaatacttagattattatattttgaaataaaaactctagaagttagtctctgttttaaaatataagagattttagttgaatataacatagctacgaatctagacaggaaggtggacatataagattcgtaattctaggatttatctcgttcaaccaaaattctttatattttgagatagagggagtattatatttagggatgacgaaagcaagaagcatcgtgagtatcatcctgattgcgaggttttctataacagcaagaaattcacgaaatcacgagagggaacggaggcaattctgttcataaacaaaatatttgattgtacggttttcttatctcttgcaaaagttgcaatgactggaacagtttgggctttggggtttggcaccacctaccaacaacgtgcgatccatcgttttccacgtcgaacacgtggcacaggaagaacagggggtccagcactccagtgtccacatctgcaaatttctcctctctgatgatcatcatcaagtgatcagccatatcactatgcagcacagatacagagagaactggattcccctgtgcaatcttactcatgctatcatgcatacactaatctattcatcccagtgattgctctacttttgattgcttaatcagagcatctcattcgtctggattagtgctttgatctgcttgcttgcttgtttattctggctgtctacctctgccccatgacctgactgaacttgccttgcctctgcttttgcttgcttgctcatgaaagaaagcaggtgtgattttgtgagagaattcttcttgccaataattgatggcaagaagaatggagtgtgagtgtggtctgattttttcttgcagaatcatcaagggctatctgctatctcatcttgtatgacaaagattgattgcagctgacctggaattggcaggatatcagttgagagtgaaagtgaatgctactgctagcagtagcagtgatgcagcaaagctgccacaagccgaaggcacgttgacttaaaagaagcccttaaaaatcaccaccaaaaagaaggcaaaaagaaaaagaaaaaggagtagtagcacgattcgacaccggaaaaagaccccaaattttgcataaatctcgggtcattttgcctaattaacccaggcaataataaacatctcaccaattctgtactggcgtagtaccacactgtactgtactgtgtacaagcaaggagagagaaaaaggaatcagacattaggagagagagagaggaaaaaaaaggcagaagaaaacagatgcctttctctcctctttatccaacgctgctgctgctgctgctgcgactgtcgcggccatggcgtccaccattcatcatcaacccgggggggttgccaatcaaatttattactcctacaaggacaccgtcacagtccacacatgagtgagtagtagtggcagcaatcgcaatagcaatagcatcacgttcacaggaaggagattgctagtagtagtagtagcggaggagacgcaacgagacaagcaaagaaagagatagagatagaagactctgtgtagtgtagtgtgagagagagtgagagagagagagaaagaaaaagctctccctagtccctagtgcgtggaggagtagaggtagagcaaaccactgaaccacatcgccttctttctactggtttctaccgtgttcttgctgctgctgctgttcttcgtgagcctcctcgacgacctcgatctgcttgtttcttcccggctccatggcggcagcggccgggccgtagtggtgagttcttgctcggcttcttgcctattactaacgacgactactttttcttgtgcggttggttcaattgatcctgagctctaatcagtttgagttggttattggtggataatagtttgttctagctgaaattttttacgattaacggggagttctgtgggtttcttggaggtttagttgcatgttcgtggtgaatcaacagtaactgctgctagcatggagcttgatatgcttcttgcttttggatctattctgcaaaagtagcttttttttgtgactgtaatatgtgatcgagttcagtgaattgggtaagttattacctcaagactattttttttctacttgaattttttggttttctacgcttcatgatagcgtgatttcattttaaaaggttggagggatgaggaaaaaacctttttttgtgggaaaatgaaagagttcaatactagtaatttcataaatagttgctaggtctttacactgttaaaaggtttgtgggttaaattcgttcttttgagtgattctaaccctataagcttgttcttgctctatgaaactcggtagctgacctcaagcaagttttttttaattgaaatggaataattagtcatatctaagttttgctttgacaaaaaatataaataaaagctcgtcctaggattatgtgtaccgtatacccgcaaagctctaagttttgcccatcttagtagctggagtaattgagattggataagtttccctggattattttgagcccacttgtttgtttgaaccacgagtccacgatgtacatattatgtaatgactctctgtagtgcaccggcaaccttatgcctctgggtttctctgcagaagacttgaggcattgtatttcaataaagtcccccaatcttaatgaaattaggtcacccaatcttttgtccgacccggcaatgtatttcaacgaagtacagctcgattgcttccatttttccttcaataaactccacctttttcacatattagaataaacttcacaagaacgcatacttatagtcagttacaaaaacatatgtactgtatatttaatatctatatgacttaggaagttccatataaacaggattttgtggatttcattatcaaaacgggaaatagactatggattccaacgagggctctcatcgtataacacgaagtgggattgttagggcaaaacctgctgtcacggtatggaaggttttgaccttttttgtttaaatgtctttccattttagttcatttctgtaacaatttatttttgacaactttgtttacttcctactgctttcttactccttaggccgatggtaagattgagcctgctggggaggggttacctcatggatggttgaaagannnnnnnnnnnnnnnnnnnnnnnctgggtctagagtcaagggtgatacggtaagtgtagttccttttgattaaatcatgaaaataccaaacttgatcctttttttaatacgttatgtttcaaaattagtcatgcacatttttggtgtccttctgaactctgatgtctcttccacaagcaagccaaggataatccttgaaagaacaagtggctgctaatgattagatgcaaagcaaccccttgacttctcatctgcattagaatttatgcagtttcatttagtggagtctagaccacttacctttctttcccagaagcaatttatcaaatactctgatgatatatagttggattgcattgctgtttgccagctgtcaacatccgcaatgtgatggagcaagttaatgaacaacctttctgcaacacaattctaatatcaggacatgttcgagtaaatttctgtggaaccaaggacttttctttagctcttttcaattaactaaacatagcagtattttctgtgatactccgtgtgtcttctgtttggttaacaactgcctacgttacagtattatggagaaattactcgttagtgaatctttttcctttgtttatgcaaacatttagcataagaatgtgaagagttaatgcatggtaatgatcaacttgcagttcaccaatgttttctgcaataaaaataattagtcagttttgcacagaatatttttgttcaaccttgaaattatgacagtatgaatatgaagaatgagagctgctaacttcacaccttggttttagcctcacactaaaataattttggcgtgttctaacaagttagtagtgaatgtattctgttgataacaaattgattacaacttttcttgagttgttttcttacaataccttttaagctctcgttttatgccataagatggtctacttgaacctattatttgcttgacatcattttgtttactttatgttttaaccttttgttctgtagttttaactggtatgtccatcttatcactgcagttctatattgatccaaccaatatgtatgaatttcgttctcaaaaggatgttcaacggtatcttgaatctggagatgttactaattgtgtaatgatacaaaataagaggaaaatggaagacctgcacactgcaagaaaccaatctcatcatgtatgctccttttctattctagtggtatatctaatttgtaatatgtctatatgtttacaaaaaatctagtgccaggctgccagctacattattcaagagagagagtttttcagtagtactaagtccatgtatgaatctaaatataaacagtgttgttccttataaacagtgaaaataactatatttcactaaaactttgaagtataaaagagaataatactaaatcattctgtcaactataatgctaaatcaacaccatgtgatttctgctgtattaatgtattgtacgtgagtgaattggatgggtttttgcttgttacatttgttttccttgtttctttttctgtttgattactgtccccatcttataatcattgtttcattaaattcagacacgaagaccatctgatcacagacaacttgatgctggtgaaggggctactcaatgtgatctaccaatagcaagaggtaatagtgcacggagtgattttttggtaaatgcaaacagttcagacaattctgaagatatgtcatcatcagtgcccaagggtgtgtccgaagggaaacttacacggttaaagcttcagaaggcaagggttccgaatcaatccgtggagcatgaatcttccacaggagaagtagcaaatatggagcataagcccaaggaaaagaaacagaaaactaaacctgtcaaacagatctctacacctcttcgagcgtcacctcgtttagctgcgctgaagattaaccaagaaggcaataatgagcccaaagatgaagctctcagcacaaacacagacactgctaatcagtcacaaccaaagttgaccaaaagtcctaaagcaaaggctaattcctctgtacttcctgagaagagtgatggagcacatacttcaaatgcttctgaaattcctcaaaacaagtatccatcagctaccgagcaaatgcaaggatcatctgttcatcctcaacaggctggaacagctgatgctatgcctgggtccgccctttcatcgttattgcgaagtatctgtcagatccatgcctcaagtttgcgatcaagactcttgcaggtgacatccctgctctagacttcattccatcacaggacatgaacaaagggacgacaccgaattgttcctcttctgcttatgatggtagtagaaaccatgcgcaagtcgaccatgtcggcatgccaatgccaaggccatcagataagttctacggcagtggctggtttcctccccagtgagttccatctggggaatatgtggcaaatcttctcacctgcaaaagcaaatcagaagaaagccaaagactaaccagcctcacaggcttcttagaactcctcattaggtaccttgacaaggatgcatgttgcaagaaagactgtatcttgttggaactgtagtagatggttcgtcactaataagtaataataacctaataatatacccccatcttatgctaaactggacactattttctgtctgtctgaatttgtgtagtaacctgactactaattcatttgtttgtatcattagtgcagactagagatgctgattgtatgcagatgcctgtgccagattgtcatgctcagggtcactgctctgccagcacaaagacccttcatgtgtattactactacatgtaataatagcttagacatttgatatggcaatgtgcattggactaagttctacctaaattttgtttctggtttacctgtcctgagtttcttgtttgatggagttgcaaatgttgttcctgtgcacacactgtgttgattcttcggacttttttggaatgcaggaattctacagaattttcacaggaaacagttcagttcccgcataattcctccgttccaaagaaggccttcaagtactcaaatgttgttcctgtgcacatattttgtcgattcttcgcacacctttggaacatatgaattttagaggattttcgcaataaatagtttcaattcctgcgaaattctttcgttccaaagaaagcctttaaagtactcaaatgttcctgtgcacatactgtgttgattatacggacatctttggaacagatgaattttacaggattttcaccggaaacagtttagttcctgggaaattcctccatttcaaagaaggccaaattctagtactcgaatatatggctggcatttttgtgtctgctctcattttggtttctccatactttggttgggcactaaattgttgataccaacaccagttgttgggagatgcattggatgccatggaagtacagatcattggtcttatctgtgcttttgtggagttgtggtccttgacaaaccatgtccagaacaatgatcagacagcaaaaggatttgcccttctgagaggcccacccactagctgtaacactgcaagtcaa

SEQ ID NO: 14134 - DNA, 26367 bp, Oryza sativa
gggattcttggggggctccgctgctggtggtggtgggggagggatcgagaggatggccgtggagtcgccattcagggcggatgtgttgaggggcaaggcggcgctggtcaccggcggcggctccggcatcgggttcgagatcgccgcccagctcgcccgccacggcgcgcacgtcgccatcatgggccgccgccgcgaggtcctcgacaaggccgtcgccgccctccgctcccacggcctccgggtgagccctaagcccctctcccttcccgcctacgctacctaccacttcttctctatttaggattaaaaattgtttgttttttttttcatctcccagtcagtctcgtggtgctgctggtgagtcaaaatctcgatagagagattgatgttttcttgtctgagtccatcaatagatccgagtattcgtgggggaaggctaaaaccttgtgagagttgctagcgttaacgcgtctatatacgaggagcatactgaaaatttttctgaagcgtgctcgcgctgcatataaggattcctcatgactcatgcagatgtgatttatgcttcatgttcatgtgcctgactagtgaaataaatatagagttcatcatgcttccctctgatttcagtgctgatctttgggggtaagctagtcctaatctgtaagtgtaaccctgtagtaattctggcttgctgtcacgttcacaggctgttggttttgagggagatgtgcgcaagcaggaagatgccgcgagagtggttgccgcaacagttcaacattttggtaagctagacattcttgtcaatggggcagctggcaatttccttgcttccccggaggatttgacgcccaaagggttcaggacaggtacttcgattgaatcaatcctcgcacattagcagcattagttatgattttcttttgttccatttagatgttatgtgatttttctagtttgtgcagttctgctagtctggtatctttcaacaacactcgtgctattaacttgtctaagtatctaacagcagtctacttgagttcttgatgtttttctcttttacagagaagttagtattgactgggttttctctctgcagtcgttgacattgacacagtgggtacatacactatgtgctatgaagctctaaagtatctgaaaaagggtggccctgggaaaggtccctctactggtggcgtcatcatcaacataagtgctactttgcattacactgcggcctggtaccaaattcatgtctctgctgctaaggtacttggatcttctattatctgtgacgagaaaaggattgaaataagtagacttgtcctgatggattggcttctgtaggcgggcgttgatagtataacaagatcattggctctggaatggggaacagattatgacatcagggtcaatggaattgcaccagggccaattgaaggcactccaggaatgaggaagcttgcacctgaggaaatggccaaggggagtcgggaaataatgcctttatttaagttgggtgaaaaatgggacatagctatggctgcactttaccttgcttctgatgcaggttagttatgttcttgcatgttttctatccaaataatcagaagttccatttgctaactgaagttcagtaagttctgagcagctgcttacctgaaagttatcttgaagcaattgcttgcttgatagttataaatctaaaattatctgctattatattgtttgccagctttggtcaaataatgttcaacaataaatcagtgaagtgatgccttattttccaaatgaaaattttgccatttcatgttctctacaattcaatttgcaggaaaatatgtaaatgggactacagtggttgttgatggaggtctttggctaagtcgccctcgccatattccgaaggaggaagtgaaggagctctcaaaggttgtcgagaagaaggttagggcctctggtgttggtgtgccatcaagcaaattgtgatgtcctctatggtttatatcgccctcctacgtgtactgtagaatcctttaccgaggagtcccgtagaatacttggatgttgctatcacttgtcatcgaagttttctatgattctatctatcaactcctgtaacatgctcagcacattcaccttgttcacgctcgagttaaacatttgccaaagtggttctcattcatattgtatctggtaatattgcaatcaactttgaatcgcaaccaaaagatgtccatcactgaaatattcctatggcatgtcaaaaatgcacacttaaacaagtcgaggaccatttcatacttttgatacatgataaaatgctatgttgaagatttgaactactgccttgtcttccatgtttcatagagtcatgaacctatttaaatgttgaatttgggaagagtatgtcaaaatggactgcctgaagtggtaacctgtaactactgcaacattcaggcaagtggcacacaatttgttttgacaaagaatttgtatgcataaaacactaacacagcacataactactatattccttactaggtgtgaacatggctgaagtctcttagaaaaacaaaaacagataatgacacaccaggcaaatatgtatgagccttggcctcctatgcctcaactgcctcctgataaggagagcataatctccttaccatataagtcactatgatggttcccgaactccattggaagtactccatttaagagaagttctgttttcaccttgttctgctggctcctcatcatgacttatgaatataaattcacaagtgtccttctgatttttttttttttgaaacttaagaaacaccttgagactttttttttcttgtgaattgcaatgaatgagcaccaaaaatctgaaaaaaacctatccagagaaaactctgattgttcatcacttattattttctttgagaccagaactggtaagctctgggacttacattggtacaaagtgaagatatgtacatgtggcatagtatgtcatatatattgactatgacatccagcaggttaggtgtgtagggtggaccagaagctgccttactgaaaacattattgcttctagttattctctgtcttggtcaattctagcttggccttcttataggagaaacctggctgcaagcctgcaagctcatcacttgctatgctcaggggcagttacctgtccacagcaaggctgtttcaagcctccagcattatcttctccagttttttggtgccatctcaaaatacacacaaacccacacataaactccatcagcatgtatataagtgctaatttaaggacatactgttgtatgcactagttcacatgatagatatctggaacgtataaggtagtttaaagtctgtgtgcaaatacattttgttaaattgcataagttttataggaagttaatttagctaaatggctttatttgcgagttcgatcatattatggtgtgttatgttccttgctgcaatatatagtgggacaacctgacaagagatcatcactggtactggtcttttaagactgacataagaatttagcaggcatataaaggtgccctgagcccctgaaaactctctctctctctctctctctctctctctctctctcgtttcctgaatctgaggccatttgtttggtacatttctcatcatgcatttgaaatcatttctttgattttggtcttgcttgagcttttgtttcatgatccatgactagtacattttgaagaacactttctttgcaggctgaacaggaggaaagaagcaccaacctgatcaatggggcgtgggagagtagagctcaaaaagattgaaaatccgacaaaccgccaagttaccttctccaagaggaggatggggctgctcaagaaagcaaatgagctggccattctttgtgatgcacaaattggggtgattgtgttctcaggcactggcaagatgtacgagtactccagccccccttggaggtatgcataaagttttttgtttcaagttattgtctgtcctttgcatttcggtatttgtatttgaggcgaaatagaaatttcagacatcgttcataatacttcttgttaaatttcttcggtttcttcgatcagttctgctctattctacaacttttctatgatttttggaacttgtgttggaaaaaattgttgataatatgcaatgtttcatcatcatattttgaactgaattattagtgatgaactcaagggaatttacaactgattttatacaagtttctgccacctacagccatttcaacttagcttaaccatgtgaaattctcgaagagaaaccgatgatcaaatacataaagtcttttccttttggcaggattgcaaatatctttgatagatacctgaaagcccccagcacccgttttgaggagatggatgttcagcaggtacactggttcttgtaaaccactaccataagattttactttcattaacccaaaatcgttctttggcataaagagaatcatccaagagatgacaagaatgaaggatgagaacaacaggcttaggatcatcatgaggcagtatatgggtgatgacttggcttcactgactctgcaagatgtgagtaatcttgagcagcagattgagttttctctgtacaaagttcgtctaaggaaggtaaaaacaaaaacaacttgatgcagtagctgtaggttctgttacttgacaaaactctgcattcatcactgctcattgctaacaccctgatttgtagcagcaacagctacttgatcagcagctgcttgagatgcacagccgggtatgtaacaagaggatataccggttcagtattcttccctaccttatacactatattgaaataatcaagttttgattgccctctttccatcccaataggagatgcaaattccaggagatcagagcaactatctgtgccacatggtaagccatgctctaagctttctcctcaagtgaaattatgttgcggatttctgtattcgcgtaacttgtttgcgcctgtcaaaagaacctgattggcgagcaggcccaggcacctctgatggtgaatccgaagccgttcccgctgtgggatgtgggtggcagcagccagatgtacaatcaggatgctgagtcttccatgacagcgctgcagctttcacctcagcttgagtacaagcttcagccgctgcagcccaacctgcaggaggaggccaacctccatggctacgttcttcggctgtggtaagtcgctctctgcctcgtctttggctgctcgtttgatccatggacaagatcatcagtagtttgaagtgccataactttgcggttgtcatcatatgacagaattaaaatcctgtaaactcatcatgtgctgtaaattgtggttacctggaacttttttttttttgccgggtcgacaaagaagccgaccgaagtatattaagtattacctggaacattttgatcagtcatgaaacagaatgatctccaagaaactttatacattgacaaattgagttgttatctgcagattcctaaggacaccatggagtctggatgcaactgagcaaccaattgaggataatgagcttgtctgcctgaatctgctccagaactctagtctaaccagctgagaaataaactatatatacgcttcctgtgttattgaactgtttggctatgttgcatgtaaagtaatgataagtatggctttcttgtgtgttttcaagaactaatggctactattaaggtgtgtaacggttatgtacaacatatatgatgaccgtacatggtgagaatgcgtcttatttgagattgagccatattatgccggggatttccttatagcaaataaatcagtaaatcataaatctgaacaatatttcttttaggttaacaaagatgacacacacgggttaataaaggcggctcaaggttcattcaacatttcttttaaagattttattttattttggtaaaatactaagtatgaagttttatgttactggaaacaatctcacgccttaatcctttccacaagttgcttggcaacaattatcacaatatttggtgagtcataactcataacaactactccctccgttgtaggttagaagatgttttgattttaatcaaagtcaaactgcttacttaacctttcatattcatatgttttgtacatgaatgaggatggatagtactgtgcattaggtgagttggcagacacccgatcaagattgcaagacctagatatcgtgctacaacaattttgctacactaaataatagagctacggtaaattaatgccgttcattacattagttcactatgctacttacataaacaacagtgatctcgatccgacgtcacaacgctaaggtaggaattgttatacttcactctccattccctcccatcaatgcctcctcacccaaacgacccggttgctatttttaggtacacgtgttttttgaagaaagcacttttaaaaaggaaagtagtaaaataaaaatactcaatttaataaatcctaaattatctgtggcattgaattatgaaagtaaacactgaaagtttaccatttacaaaagtaaatgtactacccgacaatacttctcctcgagtaggggaaatagcataccatacttctttcgctgggcactgtactttatgacctttcttcgacacagcatcgcattcctcctctctcaggcattgaggagttggctcatccatgctatgctatcaatcgataatacgtaaaggatcaggtattacaggtaaactgtacctgtactccaaagcaatgaaaccaacagggaactctatcgttctagagacagacaaccagtgccatcccctaaaggcttagggattgtttggctgggtgcctgggtgtttcaacttgcacacatagcacctatcaaaagtgtggcgaacgaaaccctcaccgtatctttggcttaaaaatatgtggcgcgaagcagcaaagagccgcttaactttctttggtaggtaaaactatagaagcaaaacaaacaaggagctaaacagctgtgacgtgactaacatgatccaaacagcttcttgatgagatcctataaaaataaataaaaaaaagagacgtggtcgctgacacttttttcttgagagggtataattcaggatgcccaacaacacacaccacaacacacgcacacacgggagtgtgcgggccgaaacggcccgcttaaccggcccaacctaccaaatcattcgagcgaaaacaaaaaaaaaaactagaaaccggcgggaggagccccgggagggcggggcggggaggggaggctgtcaagtgggtcccaccaccgaatccttccgctatacatacatatactaccacgagttccccaactccgccaccgcgcagggcacgatctgggagggagagccgcgtcgccgtcgtcgtcgccgtcgtcggagatggagcccaacatcatcccggcctacggctgcgccaagctccacgccgccccgccggattacccctgcgtcgcccgcctccgccaccgccgcctcctctccttcctctggctccactccttcaaatccaccttcgaagcgtacgcatgatcgatgcaccgtgttttttctttcttttttttctctgatgatagatttcatccttgttcgcaggatggcggaggagacgaaggtgctactgtcgctgccgcggctggagcggctcatcgcccgcggcatgtggggcgaggccatcggctacgcctgccgcttcctgccgcggcggccgccgtcgctgcccgcgcagcggacgcacctcaccgcggaggcccagaccctcctcctattcctccacatgcacaggtgcttcgccgacgtcgtcgccggcaacgagaccggcgccgcctggtccgacaagcaccgccgccgctactgcctcgcccgtgttaccggcatctcctcccacgccatcgccatccgccgcattatccaaaccttcgtcctgtcggacaagatcaggtactagcagtagcagctatacatctcctctcttatttttccctttgaacgactcgcatcagacagcatgaagtttatattgatagagtagaaaaaaattactatctccgtttcaagttataagactttctatcattgcctatatttatatagatgttaataaatctagtcacatatgtatgaatgtggataatactaaaagtcttataatataaaacagaggaagtacaagattttttttttggggaaaggaagtacaagattacaacctttaaagatcgtaaccagaaaaaagaaaaaaaataactataagattataatccctgattaattgtaactaggaaaaagaaggaaaaatagccaccacccccacaatgtcagctatatctcctcagtttgaatctgagatcgaaaattagctaaattatataaaaaagttagcttaattaattgattgtatttgttccagggagtccatggattggggacgcgtgagagagaaagtggtgcgggtcgtccgacgcttggttcacgacactccagagctcgccggattcttggacttgccgggcggcatggtgaagccgcataacgtgctccccattggcttcgggtacaccaatgctgctgatttgattactcaaatcacaaactttattcttcatttgtgactgatttaatccgatatattgtttgctggaattgatcccttttttcctagtttccgatccaagcgtcacgtgagacaacaaagacggccgcgagcatatactattgcccagctctatcttgagatgaagagatggtatgcagcacaattatgtactaccttgagagtaatctcgcttcattaatgttaaatcttggcaattgcccattgttctgcccttttttaaaaagcccttttgtgacattcacaaacacttgcatatgttgccttttgcagtgtgccttcttcaggccagcctgatcaggggttaagtctgggtataatttccaactgtttaagtagcgtgttatcgtaattcgtaaaacaatattgcacctcttttattattttcactgttaattcttcacctgtgacaactgataaccattcatatttctaccacagaaggactgtcagataaggcgaggggctggatggcgcatatccttggtaaaactagccttcactctgcatatgccatccctttttttaatttccactttattatgccttgttcggtttaatccccataagaaaggattgaatcccctccgattcccctttaatcatattcacttgggggatggattaactgaacaaggcctttgtaggatttgattgctcgttcacgcgttttatgttatgatgccatttgattgccatgaactatcataattagaatgtaggtgatctggtcctactgcactgcgtttgagaaaccacatgtgtacagtatttatatgcatgtcaacttgtgtgatcatcagattcaagcttacgtgctggctgtgagtcttcagaacaccatcaatggcggtatccacttcgatcaagtgagaagaaaggtaagttaaaaatcgctgtctaccgaaacactaatatactcaaactcacacaaactcttctgtaccctttgtctgttttgttaaaaattttatgggagaatcagcttctcattaagtttaccatgatactattcaagtatcacacaatattcctgtgcagcagcctcttcaggattgatgttttctttgcattttatcagcatcaggctaccctcttccatctctaatttctgaactcattttcaggtgctccggttgctgcaatcactcagactatgtttagcaccataaaaactgatagtgaaaattctgggactgcttcagcgacaaaaaagggtaaccttcaatttcaatcgtgcatgtgcacaacacaattattcccttaaattgttgcacttgctgtagccatttctaacttctgagctcatgtaggcgttcttgacagtatagtcttgcagactaagtttggcaacatgacaagtcctgaaaaaaactatgggttctcatcattgacaaatgcaggtgaaactagttgaacatacttaatatttgttttctaacaacggcaatcctctatgttcacaataaatacttgtaaatgttgttaaatgacacaattttagtaatatatatgggcctatatgcatcggtgatgatgatatatctgatccatgatggcaagaaatgcaacatttattgtactatttgatctttttatgacaatagcagctgtttccaaattcagtatttgaatcacgggtcatctgctcatattttaatttagtgtcctgctaaaaactattggatatcatgaaaaattaatgaaaccaaattaagatcatggtctttttccccccaaatgttcaaatttacctttattcatctttaattttggatgtattcgctgttaagagaactgagaacattatacataaaaattcatccaatgtgatgatattacttaatccagtgatccttatgagtacgtgttaattcttgggcaggcacatatatgcattcgagtcaagaagattgccacactgagaattattgccagggtttcattccaaggaaacatcaaagggaagaactagcacctgaggaagatattgaccctaaaaggcaacacacaactctgacttttggtgaagcaagtctggtaagatgatggatttttatttctttcctttactatggtggagtaatagcaggaacaaaccaattaagggtgttaacagtaaaagactcatttattaacgtactagaatgaatttagtatcaaatgcatgattgcttctgtatagatctttagattaagcatggttgttcttaggcaagtcaacatccaacaacagcacaaaaatagtatctataacaacaaaataatttggtaattaatgcttgttggaaatggttgatttggggtatgctatggcatacatcaatttggtattgacttgtgccagtttattaaatctggtggagacaaattacctcaacttctttttttttaagcaagagacagcagccgaaaggttaaaactgttcttcagccatgaatatcaaagttaattaagttgcattatcgccatttcttttgctgaccattgcccttgatttgtggtagaactgattatgccatgaatatcaaaataattaagttacattatcgccgtttattttgctgaccttcatatatactggtgttcttgatctgttgtacagagtagcacaaccagtacactgtcgactagtttcaatcatcaaatggagatattttttgaagcatgatttctgttggctaaattaatcaatgcattttacaaaacatgagccgtgtacaggagagaattaacatgggctatttttttttatcctgcattatgtgactaattgagttccagaatataattaatacttgttggagttgcagccattgatcgctgttgctgaagctcagggtagagctcgcccagtggaactctccatgtgaattcggatgagctgcatgcagcatcggagctgttctggtctgctgggtgcttcctggatgaagaagacaagacagtcgatgaactactagccaatgctgttggaacatttggcgctttttttattttgctgctcctgctacctagccagctgaggcttttcatgtctcctaaagatatatatgttatcgcgcaactctacctgtctccgagtgcttaattactagctaagaactactactgttctattatgtaaacttggtcagactaaatcactaagatttttttttttgaatggaccggtacttagaatgtgcaaccaaactcatgcccatccgttcgttacacacatgggcggagctaccatgattcctgagtattcccggaaatacctaactttttttattaaaaagcaagtatacttcaagtatatacacatgtacacatattagtgcacctaaatcctcaattcttcgatccaaacacagcccaaccggcctcttgcaacgcctcctaccaacccgacccactccgtcatgatccatcatatatcagttgacccacttagccaccactcttccacacggccccctctcactctccctccgtgacccatccctccctggctcggctccctcgcgccgctccccatttccaaaccctaggcggcggcgtggcgaggcggcacgagctggaccgtgctaccgcggagggcggcggccggcgcccgccactccgccaagctcagacggtcaggccggttgggtggccggcggccgcgaggggtagtggcggccagcggctcagcgcttcgacaggaatattcaactttaaaattctagctccaccactggatacacacaccaaaagaaaacccattcgttacctcaaaaagtggaggatctactctgcagtgatctactctgcagttccgagtctccgactctgaagctattgctccgcgtaagcgctaattcgcgcaaacgcgcgacttaacgcgatgtcgcgcgcattttcagcgcgtgtacgtagcttatctaacatgattagtttatatactattaagtaattatattcttatatcatggatacagttaaggtaacccatcggcaagaaggttgattccatttttactagaaatttaaaaagttatacttcaaatttaaaatttaattcgaaagtttaatttaaattttaaaaactttcaacccgaaatttgaaaatttcaacacaaatttcgaaactttcaacgcaaattatgaaaactttcagcttaaattttgaaaccaaatcatgaatactttcaactcatagttgtaattttgaactccaaaattgaaactttgaactgataattcgaaattttcagcttgatttattatttattattttattttgcaaaataaaaagaaaaaaaaacatgtttagcgctaagcgcgttacagaggcaggcatgcatgcacagcgcagagggtgcgccacctcccgtgctggcgcaggtgcgcacctgagcgcgcgccgactgggctgcgtcgggtacattacaatttattacaaacacggcggaagctgcagccggtggccgccgcgtgtaatcccttcgcggttcgatcgatccatcagacgcctacgccgtcttccggcgcgctccctggactacccctgcgtcaccgccgactcctcgccttcgggtgcgttcgtttcagcttataggattagattcttctcatttttcgtcagcacgtttttcaaactgctaaacggtatatttcatgtaaaaactttctataaaaaagttgtttaaaaaaatccaacaaatttatttataaaaaaattatatattaatacttaattaatcatatgttaattacatttctcgttttacgtgctgctaatccgctcatcctatctattgaaactagcgcacccttcctcttcaacaacaactactccgatgcctaccatgagtacgttctacgaatcaatccccctcagttttcgcttctcacaattcgatcgatccatgagtaattttttgtttttcaggatgaacaagaggacatgtttggtgttccatgcatgtgatgtgagcgatctggtggaccttgtggagacgacgtacaggccagttgctgaaggcgggtgtgctacgtctggaggttcgccccgccgttcgagtcgagcgccgatcgaggccatgacccggcctcgatcgatcgggaggttcattgaccagctcatggtccggcggctggttcacgcgcatcctcgccgccgaccaccggagcttctccaaagctctacccttacagctgcgtcgtcctcgctggccacttcctcgaggcagccaagaacatggtggactctgccagatggtcaggtccaaggtggccaagttggccgaggagatggttgggttttgtttagttgaattttatcaagtgtcattcatcttgtctctagtcctcgttctattagtcggcgactataaatttagatcccctaataattggtgtgtgttgatttggtcgattatcgaatagatctaccacttcgatcgcaactattcctatgtgcttaatcacctattcgcaatatttaaattgcatcttatcttgttcttgcagtgttctctcatttgcattgcagggatcatcaaccgtgcgttacggttggtatgacaacatttatggtgtagcaattgcacggcgttctggacttgttctggttggtagtcacgtcgtaaacgttgcactcgatcaaagcaagatttatcccctcaacagaagatcaggccacgagagagagcgtcatcataagtttttaacacggtttattcttgtaatatgtttttgtaaagtgtcaaattgtcaaaacttcggtgcactggatatgcaactctatttgtcagtgcaactacagttagacgagcggtacgcgaatcgtttccaactctgaaattttgtactatgttcagcgaactctagatcagttttcaccctacttttctaattcctaaagtcaatgcaggtgagccagatgcatgcgtagaaacttggatgcatcccctcatgaaattatgaaattatagagagaatcccttatatgctattgaaatttgattcgatccctgatatgccacacaaaattggctcttcccttatatgccattgaatcaaatttgcacaccctctcgtgccactaccatgagttgactgatgttagcatccattaatctgtcaggttattgcataaatgaccaaaataacctctggcatatcgtggcgagggcggtgatctggcgaggcgagttcggcggctcgatgcgtcgagggcgtcgcccggtcccgggaggggcggcacccagtcgcgggtggggcggcgccgacaagggcgttggaggaggtcggcgagcgagtgggtgaatcagtgggtgacgcggagcgcgtcgcggaggacggagtcgaagacgccgacggagagcatggcgccgagggcgtgtttagccgccggccccggggggaggcgccagggcgcggttgagcctcgagggccgccgtgagcgcgcccttgccgccgccaatgccgggcagatgtggaacgccgcctggaatgacgatgcagtcgcgagcgcacctgagcgcggtcggcgagctagcttgttcgcgcaggatcggcggccaccgcgcgtctcccttcaatcctccccaagaccggcggccatcgcgcgtctcgtccccaacttccgccgctttcccccatcctccccaataccggcggccatcgccccatagatgacgacgacgagtaggcgtggtctgcgcggcggttgtggtgggaggagaggaaggagtcgttgccgccacccgcggcggccgcatcgaagagctccttctgcctccgcctccgccaccggttgcccgagcgagctcctccgctgccggccgcctgctccgcctccgcctcagccgcccggggaactctgcctccgccgcctgccgcccactccgcctccgtcccagccgcccgccatcgccgccagcgcccgagcagctctgcctgcccccgtccacgcccgcacgctgcctgtgaggggagggagaagagagagaggggggagagattgggatagagatagagtatggagagagagggatggggactggcaggtggggcccaccattttttattaaccaattggcactcatgtctaacaactcaggggtaaatatgtcttttcacgttcaagttagcagtcaacacacggttagctcacgggagtggcatgagagggtgcgcaaatttgagccaatggcatataagagaatagccaattttgtgtggcatatcagggattagaccaaatttcaatatcatataagggattctctcgaaattatatgaaggaacgttatctagcgtgttggagaaacgcctcatcagctaatgtccaatctcaggaatgaattgaagtttctaggcttctagcttgcagtctagtgcaatgcttgcgcaccatgagatggtttctcaggatcgatggtggtttctttgaaacacaaatggtatagtagtgcaggtcatgctgctactgctgctgcaagtatcccccagctaccgatgatgcgattgatgatacaagtaggcaagctgctgctcagagttttccagcttatctgtgatgatcatggtggtggtggatggtcaaattattcagacaacaggatgatgagtcctggctgcctcctcttgcatgagacagtaattgccaaattggcagacaatttatctttcttcctatccataaatctaggacggagtgaataagtgtaaatattaatcaaaactagcaaatatgctcgtgccttgcaacgggatatccaaattacatgtatattattcatatttattacacgatttgtgcttttctttacttatacgatagtggtgagacagatgattgacatgggaatcggggatatttgtttttaaaatgtttgtcgtgggtacacatgattgatgaaacatatgatagagatctgaaggtcaatttacgtattgttgctaggtctaatgattcgtattcaccacaaggaattgtgaaatcactccatggacctgataagcctgggatggtgaatcaaacccacccttgttggttttaataaaaagatgtgtattattttattatctaaattttaataaaatctattacatacacaaccagtgaattagtgaaaaacaatcaattaatagctaaaagtgcttcatgaaaagaaagcacaacacaaaagttatataaaaaatgcacggatcgataaattttataaaatctacttatacatcatgtaagaatatatcattaaatttattttttccatgataaatcagtaaaaccagagtatagaaaagaaagaaaagtaaaaacaaacaacgtagcatcgccttggctagcttctcataccacttcgctgagccgctcaccttgccttgttactcgcctcgtggcttaccggcgctaggtggttggatccgatggcctggtgactaagaatgaacaagagaatttagagtcaaccttgatgatagggagaatcagcatatgctcagagaagagccaattttcatatagtccgagatattaggtgaaaatatttatattaaattataaaaaaataaaaatagaaagagtatagaagaattttacttttgaaatcatttaatgaatatcatttcaccgtgttcacgcaagtgcatgcactgataatcgcgtcctgtacaagctttgtgatggctagggcagtttggctcaggttggtgccggttgaggacgtgtgatagacatgcagttgggggctgtgggcagatggcccagctggcccaaagaaaagatcagcagcgacgctgggtgcagaggaaacgtgtaacgcgggcccaactccgagccagcgcgtgcgtgcgtgcgtgaacggatgatttttttttcgcgcgaggacaacagataaaaaatcagagacggacaattacttttaatctcgggcaaattttttttacggacgaaacaaaatacggaagccttacctattttttattaggtatatatactagcaaaaatccccgtgcgttgcaacgggtaaataaattctaataataatatacgtttttcatgcataatcatgtcaatgataatgtttgtattttaatgaccgacttattttttttataaacggtgtattttttcttgtgcgattttctcaaaccatttttcagaaatggcgcatttctttctaaccgtttcttcctagcatgtttttttttattttttttactgacgacgaaaaccatatttttctccccttttttgcttttcttttctcacgcgttttttgcttgttttttaatgttctttttttgctttttttccaatataggagaatatatgacgaaataaaagccgtgtaatagatggcaaaaaaatcgatggatcctatctgactcaagcatccatcaatttagcgtttttttctaacagttttttcagagcgattttttttttgatagacggtgtttttttcatgcgcggttttttcaaatcatttttttagaaatggtgcattttttcttacagtttttccttgcatgttttttttaaaaaaaatttacccacgatggaaataatatttctcgcacgtttttttatggaagatggaaaacatttttagcatttttttgcgcttttttctcatgcatttttttaaccgtttttatttttctcgtgtattttctctttttaaatagttagattagattagagatagagaagagatatatactgattagaaatcgaaatttgtttagctctttccatttttttctcgcgtgcattttttattttgtacgaaccagctttttattttttacgaaccatttttttcgccattttcttagggaatcggacgaacttttttaaatgttttttcagattttttcgtctttataggaatcagactttattttcccgtttttaaaggaatcggatctggcctttatttttcaccacttttttttgccttttataggaattggatctacggtttttttttccacctaggggaaacaaaattttattgttgttgtttttcttctttttttttcttttttttgcagtttttttctttttatgcacctttatgcccttgttctctcccttttattattttttcttaaaaaaatgacctcaagtatcttattgcaagattatagggactcaaatgtaaatataaaaattatagggactcaaataaaaaagtacaaacccaaaaattaaaatcatataaaaatggaatgctctcgaccggtaggttccgttttttcaaacagatattcaatccggcacatcaattttttttcaccaagatgtatgaaatatcacggcatagattgaaaccaagaggaatgtgcctgggatctcggactcaaactaagaccgagaggagtggtgtgttttattttccgtttttaagggggaatcggatctagagtcgggctttttgttcgtttctgagagggagtcggactttattattattattttttcactatttattttgttttgatgggagtcggacttttttttatttttttcgttatttattttgttttgacgggagtcggactttttttatatatttttttcgctatttattttgttttgacggacaaagaaaacatctcttcttattttttaagtagtagtagagatatagatatatagattaattactactccctctgtttcagtttataaagcattgactttggtcaaaatcaaactgtttcaagtttaactaagtttatagacaaatatagtaatatttataatactaaattagtttcatcaaatcaataatcgaatatatttttataataaatttgtcttgagttaaaaatgttagtattcttttttacaaatttgatcaaacttaaaacagttttactttgaccaaagtacgtcttgtaacatgaaacagtagcttcaggtgctaaaccgcaggagcgagaaatgttactgtctttattctgccagtagcttctggtaggcgcgcgcctctctcatcccgtttcaaacatggcccagtacatgaaggcccaacatgtctaggggatcccgttccgggcaaactaattcggcccaactctgatttcgagtttttttccacgtgtcgcgtgttttctgctaccttcgatccggagcgtagctaacggctatgagtaaacctgctacagttaatagcggtccagcatagaaagaataaatagtcatgaatactcgtttccccgtaagaaatctaaccagttaagttacgtttaagtctttgtagtacttcctccatccttaaatataaaaaaagttttagagttgaatacggttattaagaaaataatacttaaggcttattcggattataagataggaaaaacataggaaaggaaaaatataggaatagaaaatgaatctaagtgtaaaacagggaatgaaaaacaaaggaatacaaaaattgagagcattcggatcacatgaaattgattgcctaggatttgcatgcaggaagtgaaaaaaagagcttgaggtggatggatttttcatgtacttttcctgtgaaatcagtaccaaaggaatttcctatgaccagttttcatgattcgaatgacaggaaagaaaaaaattcctatgcacagtattcctccaaaaatcctgtgaagatcctctaattcgaataaacccttagaattaaattgggggagaggggaggaattgtgattgattgagaagttgatgtaggtagaaaaagtgaatgatagatagttgtgattggtgggaaagagaatgttgatggagaagttattatattttaagataaattttaagtataagaagttgttatattttaggatgtagagagtattattttagccctgtgtggattatagtttgggccgatcagacgcgcttgatctgtagtgtgaagatttaagacggaggaatgaatagtggtattgctggtgaaaagtaacctatacgctgcacgcgcctctcgttatcttgtttcgttttggatggatggatgaatggattaacgggtccatctttactcatatgattatgtttattcatacggtttattaacaacataaaaactttcaacgcaaaatttgaaaactttcaatcaagatttaaaaactttcaagtcaaaattaagaactttcaactctacatttgtaaagagatgtgtgaaagatttaaaaaaattagaaagaaacggtgaaaaattaaaaaaaacgggcccagagataacaaaaccagaaaaaaaaggtcgaacgaaaacaaagcggcgccaaaatcggaaaaaaaaagtcgaaaagaaaaaaaagtgcgcgcggggagggggccagctggcgcgtgggcgcgcattaggcgcgctatgcattatatttattagagtgatatgaactagaagatgataataattgttttttgtttcttgagttaagggtggttgtgctttatattttagaatggatggagtattgaatagcccacacccatatccgtcgggtgtccggattgatagtaagggcttgttcactttgcttccattgtcaatcttactgttttttttttttgataaagttacccaaaaagtggctacgtttagtttgttgctgaattttagtaagtgcatatgaaatcttgctaaaatttagcaagcttactaattggtaatgtcaaaactcgataaagttaaaaatggtagcaaaataaactagcgctaaaattaccatccctggtccgacgctcggtttgactcgagtctgcccgagttaactcgttcgactgggcagcagtacatatatacaatacaacacggcggaaggcgtagcagcggatttgacggagaagccccttccgccccaatctctctcgcggctcgctcgctcgatcgatggacgccgagggatcatcagacgcggaggaggccagaggaggcagcaagatgctgctgcgctccctggactacccctgcgccacgcgcctccgccaccgccgactcctcgccttcctcatcaacaacgactacatggatgcctacgatgagtacgctccaccaaaatccaaatccccccttacttttgctccatcgatgagagtggagtagtaaagccgtgttgagttacattcaaatttccaaaaatcacgtcacataaaatatttacatacatataaagtattaaatgtggacgaaaaaaaccaactatatagtttacatgtaaattacgagatgaatcttttgagcctaattacaccatgatttgacaatgtgatgctatagtaaatatttgctaatgacgggttaattagacttaatagtttcgtatcgcagtttatatgcggaatctgtaatttgttttgttactagtctacgtttaatattttaaatatgtgtccatatacgtcaaaagaattggacgggaactaaacacaacctaatttgtgtgtgtacatgtgttttccgatctttcatcggggcttttaactatttgccacttttagatttggtaattaactatttgtcacacctatctcaataacatgtggatccacatgtgtatatgacatgtgggtccagtgacaaatagttaattgccacatctaaaaagtggcatatagttcaatatctctctttcatcaggataaacaagaggagacgtttggtgttccatgtgagcgacctggaggatctcatgaaggcaggccgtttggtggaggcgaggaactacgtgtggcgtttcgccccgcccggcggcggcggcggcgagccgagctcgagcgccgaggccgtcaccctgtggaagttcatccaccagctcatggtcctcgacagcttcgcccacggcggcatccgggaccacacggcgatccgaggctggttcacgcgcatcctcgccgagcccccgggcttctccgtgctcaatcccctcgtgcctcgccctcgccgcccacttcgtcgccggccgcgtcgaggcggccagggacatggcggactggaaggtggtccgctccaaggcggccagcttggccgggaagatggcgcgcgaggcgccggagatcaggtgcaccatgctcttgccgcttgcccgggccaagcccaaggacttgttccccctgattgcttcttcgaggtgcgtttctcttaacagtttcagcaaacttcttctaattaattcagccctgatctgatattgtcagtttcatattatttggtcacttctctttccaatcacattgatatatactatcttatctccattttaggttataaaatattttgactttggtcaaagtgaaactgtttcaataattgaatatatttttataataaatttgttttgagttgaaaatattactatttttttctacaaacctagtcaaacttaaaatagtttgactttgaccaaagtcaaaacgacttataatctgaaacggagatagagtatatgaagataatatatgaagagttgctgctattctcggtatttcgatcctagttactgccatttttttaaagactactgctgtgtatctgtcttcaattttgtttggctagttttcgtcggaggcgttatgtgaaggcagcacgacgggcatcatcatctcatcttgctcagttctacctgaacaagaagaagaggtctggtccaacagttacagaatacgaattaaaatgctcttcgattactctttctttttgttagtctttggttacaactaatcaatgtaatgttccttctttaattcatgcaggctgccttctccaagtcatccaggtgtgttgttatggaaccctcttttcttgctttctgaatttacttgtgagcaaatacgttttatagctcatcttaattaatacatgtagcaggacaatcatatgtcagtagatcagagctgtttgcacttcttggtatgtactagttctgtatttgcttcaattcaacttgcatatcgatcataactgttcttttgttgctcgtgtgtccacattattgtctgctgacacacttggattacatatgtatatgcataatgactgactgacttgtttgttcttcagaggtatgtttgtatactggtaggcgtccgcggccttgtactgaagatctttccaagcaaggtgtataatttgaattctatgaagttcatataagctgcatgttttaactgcgtagtttgttgcttacctgcaggcatccatagtgtcccatttatgcggactatgctaacaaattcctcaaacaaaggcaaccctgcaaacatacatccacgcaaaagtgctgtggtttaaaattcaaccagtgatgaaggtatcacgcaaaagtgctctccaaggttaaaagaaaaaagaggctgtggtttaaagttgctaatcttgcttcttatttgcaggtgagggattaaaaaaaaataggatgacatcgttcaagttgcgcgtctgcgcgcagagcaatagcttgtaatggatggactttgttttaacggatgggccttttggtgtgtgtaacaaatggatgggcctgggtttgggtgcacgctctaagtactgggcaataagttcactttaggtccctcaacttgtcgcccagtctgattttcatcctcagtccggaaaactggatacaacacatcccccaacttacaaaacctgcgacgaggttcctcgatggtattgatctcggttttggctgacgtggcgcttacgtggatcttttgactaatcttcgtcctacgtggcattgacgtggcgcttacgtggcagtttgatctggaaaaaataaaattaaaaattaaaaaattacagcaaaagatgcgagcccatatgtcagtcaataaaaaacagtggggcccacatgtcagtgggtcccacttcttccaccccatctcccaacctctatcttctctctccactagcgctcactcctctcctactccaccggcgagcacgcgcagatgccaaagagggacgaggtggggaggccggtgagggggggggtgacaagatcgggctcgtgacgccgccgctgataaggcgggctcaggagagggaaggtggagactgaagtgccccaccctcgcgagcttgagcttcgtctacaagcgacgcttgcggccgccaccaggaaggagcggcgagtgggggagtgaggggattgagatgagagagagagagagagagagagaaagctagagagagagatggtgggagctgcttcggccgtcgccgcctgttccgctccgctccaaccgccgcccgctccgctctcgatgacctattcgggccggcgccaagcgcaatgggtagggcatccatcttcttctagtggacgcacgcctctctcatcccgtttcaaacgtggcccagtacatgaaggcccaacatgtctaggggatcccgttccgggcgaactaattcgtcacaactctgatttcgaaattctttttccatgtgttgcgtgttttctgctgacttcgatccggagcgtacgcattgatctaacggctatggttaaacctgctacagttaatagcggtccaacactgaaagaataaatagtcgtgagtactcgtttcaccataaggaatctaaccagttaagttacgcagttttagtactactccctccattctagaatataaaaaagtttcagaggtgaacacagttattaagaaaatggttagaattaaatgaatgaaagttgtgattttgagaagtagatgtaggtagtaaaagtgaatgatagatacttcctccgtttcagattgtaagttattctagcattttccatattcatattgatgctaatgaatctagatagatatatgtctagattcattagcatcaatatgaatgtgagaaatgctagaatgacgtacattgtgaaatggagggagtagttgtgattgattagaaagagaatgttgatggagaaattgttatattttgagacaaattctaagtactataagttgttatattttgggatggagggagtattattttagcctgtgtggataaaagtttcggctgatctgacgcgcttgatctgtagtgtgaagatttaagatggaggaatgaatagtggtcttgcatgctggtgaaaactaacctatacgctgcacgcgcctctcgttatcttgtttcgttttggatggattaattagcgggtccatcttttatcatatgattatgtttattcatacggtttgttagcaactaaaaacttgtaataagaataattttacacgtgttgttaacgattcaaagcaaatgataaataaaactcataaattaactttaaaaatttcaattttagcataaagtataagtatagacgaaaagatgatgttgtaattaacctgcgatcttttgaaagtgagaatttattataatatggttttaaatccattattttaattttataatagctatttcattatctttttttatgatttattcagccagcaatcctcagtcagataagattatcctccacttcggccaactcaatttggagagcatgacttgcagcagcagtacttcattcgacaacgacgattacgtgcgtggaacaatcatagtccggccgtgatcagattcatgaatcacatgtctgacgttcgtgacaacaaccaatcaaccaccgtaaggaattgagagagattgggcaacaaaatgggaat

SEQ ID NO: 14135 - DNA, 516 bp, Oryza sativa
  unsure (1)..(516): unsure at all n locations
cgttcaagccaacaaaaaaagaaaatcatagcatccacgattactaatttctcagaggttttacgcaacaagtcaaaacaggaagctcaccaaggaaatgtgcaaggccagggagcctctcgggatcgcagaagtagcccaccgagacattcatcgacgccgccgcctgcaaacaaacaaagccgggattcacccattcaagccaaaaacccaggaggcaggcaccaaaacccccggcacatccccgatcgaaggagccagcgaaagcacggagaccttgtcggtgtcggggtcgctgacgaggaggcactcgagggcgttggggagcacgacgcggcggtacccgcgcttgtcgttgcggggcctggtgatctccgcgtnggnccccccctttccccccggggccccccccccgcggccccgccgcggcgaggtgcggccgcgaccgcccgtctacgacggctcggcgggggcgtcggtcgtcgtctcncgcgctggcctcgaacccgccattgc

SEQ ID NO: 14136 - DNA, 636 bp, Oryza sativa
atatttgctccccgtgcctccctcctccgtttccgccgttcgtcgcttgctctcgccgtcggattcgtgctcgcgacgtccacctgtctctccgccgtcgccgccgacctccggtacgccgccgacgtcgctccggactccctgccgactcggcgccacctccatcggcttcgccgcgttgtcggcgaccccgtccgccccttcgcttcgcccgccgaccgccggagctccgtcgccctcgtcatcccgaaccgcgccgacgatttcctccgctccgatcgtcgtttccgccgccctcgtcgtcccggggtgagccgtggaccgcccctttcgcttccctctcttctccgctctatcgggtgccgctccgccgcgccgttggtcgccggcggagaccatcggggcgcgggtgcgccgcctcccgtcggccgtgccggggaggcagccttcgggcgcgccccgcggatgtcaggttggcccggcagtcagccgcccgcgcccgcgggtgcggctgacgcgtgggacccacggcgccggccgccgccagccgcgtgcacccggtccaccgtgttctgtgtaggtgacgcgtgggccccactcccgtggactcggtccgcgcgccctctctctcggttg

SEQ ID NO: 14137 - DNA, 2038 bp, Oryza sativa
cgagaaggagacgcccgagagcgagccgccgccgacgttcctgcgggaggacgggtccggggcggggtccgggtcggtgcgggagcggttcgaggccatgatccgccgcgtgcagggggaggtgtgcgcggcgctggaggaggccgacgggagcggcgcccggttcgtggaggacgtgtggtcgcgccccggcggcggcgggggcatcagccgggtgctccaggacggccgcgtgttcgagaaggccggggtcaacgtctccgtcgtgtacggcgtcatgccccccgacgcgtaccgcgccgccaagggggaggccggcaagaacggcgcggcggcagatggccccaaggctgggcccgtgcccttctttgccgctggcattagctcggtaaggcacaattactggttcattttgagtgagaattttaggtgattttgcagttctagtcattgcattgccgtcagagatttggatttcttagcatcaggggtagtacactacactacgattccattcttcagctttgttggcatccgagattccgagtgcaagtgaactgtttaggtggtcagtaaaatttgggagtctttacatcgcagttgtgtgaatgatttggctattgtgggtgtttactgttcacaatgtccatttttaaacttccatgtgctgtttgacaataacaaacagttgttgagaaggaagtgtttgctagattagtgtttgcttttctgtttgaaatgtagtgatgtcattgctatcttattgtgagaacttgaaatgcataactttgaatttggatatgtagttaagcatttgaatgatgaatttagatgagcccgatattctatcgtcttcctgtatattctcataagagactaggaattctcatatatcggaaaattatgtttttaagaaatttggaacatgctgcattttgttagatgcttcagcttcagccatcatttgaagaactgcggtgaccatgtttgccatgcctgtgcaatatttcctactgtctcttgtatcccaagcactggtgactggtccactgtcttgtgctactgtttatgtgctactaattggaccagtagagttataaagagctagatctttagccaaactttgtatttttgttccacgattaaacacactcactcttgtttcaacatatcatacctttccagtaatggaattattccttttatctgcaggttcttcaccccaagaacccatttgctccaacattgcattttaactaccgctattttgagacagatgcaccgaaaggtatttgtgcgaacaatatacactgcataattttagtttcatcaagtgtaggtcaatcttagcaatttttatgattactttctttttccgcctgcagttgatatgttctctgttctatcctctttaaatcttttgtttagatatacatgtgaatgaagctagattttttttttgaaaaaaaaactggatatctgtatgagacatagagcaattctatttacagtaatgagtaaatataaaactcttaacattctcctatatattacgattaatttacatttggttggccatttaaaccacctttattatcaggaactgcgaatctcatcatgcagattattaattcataatgctctactgcagatgctcctggtgcaccaaggcaatggtggtttggaggtggtactgatttgactccttcatatatcattgaagaggatgtgaagcatttccattctgtatgtaacagttcctgcacatttcaaagccatatgtcctagactcctaggatcaagagttttatttccctcacgtagccaaaacactgttatttgctacttcgtatacatggaactcatttaatttttatgccttttcaggttcaaaaacaagcgtgtgataagtttgacccaagtttttacccgagattcaaaaaatggtgtgatgattatttctatattaaggtacattcagtttcttattgcgtgctatagcaattaagaaaggttctttaatctctgcatatgctgc

SEQ ID NO: 14138 - DNA, 700 bp, Oryza sativa
attcctgcagccccgattactcgcgtgttcttggtgcctcgtgtctttttttgttatcaaagggatatctgaaattgcagccatggtcgacactgttcaattctacagagaaatgtgtttactgtttattgtatttttatatcttatcgatctctctcactgacattcttttctttaccaatcagtatatattgagaagagattgggagtaggagggggaaatgcatcaagcctgcaagacatggtagtaatagtatgaaccaatgtgacagtgtgctgattattattattattattattatatctgaaacctgatgctctgtgtccctgattgaattaattattgtgatgaaatgcagcacaggaaggagctccaggcaaggacaagggaccagctccagacattggagttatctacgtctttgtacgacacggcgtgggtggccatggtgccactgcggggttcccgtcagcatccgtgtttcccacaatgcgtggagtggatattacaaaaccagcaggatgatggatcttggggtacaagaggattcggcgtggcggtcacaagagatgttctgtcgtctacgttggcgtgtgttcttgcactcaagagatggaatgttgggcaggagcacatcaggagaggtacaaacgactgtgcatttacctgtcgatgtttgttttaattgactctgtatgt

SEQ ID NO: 14139 - DNA, 11532 bp, Oryza sativa
actttcactaaagttccagcgtattcaagaacacgagcagcaagctcacatgcagctttcatgtgaataatgctcactttgtcatgcatttgtatctcacttgctatctctgaagcatcctttttaccaacgtaaggaggttgagttatgtgacctggtactggtagaggtggactcactgtcccacggatcagtggtgctcttttcttcacttgttccaaactttgctttcctcgtgacctttgagtttttgcaagtgttagaactgtatgaagaagatcatgaaggtgcagtggcactaatatgttctaggttatcagccactgaaccacatttcttatagaaggtaaagactcgacttatataggtggattttataccttgggtttgccttctccaatccctctaatctctttgcttggacaaggaaaggcttttgaaggcagctttttccttaaaaattagaagacatcaaacataactttgtttgtcgtttcccaaaaaacaaactttgtttgagtaatagaaagaaataatgtattactgaacatacttccataatatcgttgcagatgcagatatgcaaatgctacctataagaagaatcattgattttgagttacgagatgttctttctgtcacttaactgcattattagtttgatcatattattgattatgcacactgaaccactcagtctcctatacccattccattagcactaccaattgctcatagcattgttcagagttcagactctagtaacggaaaacataactttctttatctactcctcggattattcctgattcgtagcatcgtttctgcctttcagcagtaagagagagagagagaaaaaaaaaccttctccatccttcacagcattgttccagcaacactagtgactgattaaagcccctgactaaaccaaaatctagcacttagaatatcctgatattaaacccaaagttgtcagtttgtcacctcgcacagcgagacgctcgccgcaacaacagcagcctaaaatcacacgcggctgagcgagataaagtttatagaagtttcatgaaccccccacccatccagccaaccttcggcgatgccaaaatccgacgatatcgccatcatattgggagtgatgaatcatgaatagatacctcggacaccggatacggacggcggggggcggtgcagctccatggaagggactctcaccgccatcggagcgccactttggtggccggagcagccgcgcggcgcgaggagtgagagggccagaggttgaagaggataacacgggaaggctgcagatttttttcccccttcccttttcgccttctcgtttcggagaactttaatcatttgggccgtatcatgtttcccacgcacgtgaggcccatagtgtgcgagatggaacgggcttgcgacgtacgggtggcccattgtacatgggctgcagcccatataggttggcccactatatagtttccatggagtttgccccagaatctaccgcgctggtcagtggtcagggtcgccgtcgccgacgtgaggccggccacggccagcttcacggccacgacgctgagcgtggcgcccaggggcggatccagcataggctggcgggatctcaagcctctactactaacatgaacgtgaaaactatgagagccccacgaaaattgcactgaattttttaccttatatagatgagagggggactgtaactctatataatttgctcagacacctattcctttctatatccgtgatcgtctccgacaacgattgcaggcggtcgccctcgaacatgcgttccatcgtctggcacgcctcctagctcgttctcctcctccgtcgttctcaggtcggcggcggccggcggcggcattgttagcttcgccggaacgtctcttagctctccttttaaatttcccgcgctttctgttggtagcttcggtttgcttgcgttgagttgggtgcgtagtgtgaggcgcggggcgggagggattttatacgaggcgtggggatgcgaattggtttggttgctgcgtcatgttgtgacagtttggtagttgattaacgaactgttgctaacgatgttcctataaaaagtggggaaatgaactgtggctaaagatagctattgctgtcgtaccctgattatgtattttgatttgtttgttctcccagcgagagaacttccggtggctacttaaccttgacatgctatcatagtttcattttgtactggatcatgtctttaaggggatagtgtatatgctgttagtataaataagtgtgctttaagattttaccatgtataatttaaagaccaagcattcaacgggttaaatagaataccatcgtacaagtgactttgtcctataaatacattaaaatgtgttgttcatcccgtagcactaatagggggctgttaaaggaaccctaagcaatgacatttcttaggccctctttgtttaggcttaggcttattggactagacttttaagttagcttattgacttatatgatttataagccggtggatttaatgtcctaagtttagtggttgagtcatacatctacctcacataagccaaaaaagcttctccaacctagcttttggcttaatagtgttagagtgacttatggctttaaaaaagccaaacggaaaagctacttatttgtttaggcttagacttttcgacttataagttagcttataagcctaaacaaagagggccttagtcagggccacttgtacgatgatatttcataaaagttgcacttatcaatggcattttatggaattaagcgcttgttaattatatttcttgaattttataaaatatagtatagatataagaaaaaaaactattatgatccctcgatgggatatcctgtcatgtattacatgttattcaaataatcacgaatctttttttaaaaaatataaaaaatatttaacaagacaaaataatgtatgagatatcacttcacaaattttaagacgaagttgatagcgcaaaataggattagaccaaattaggcctataaaattcattccctagtccctataacttcctactcctatcttattatatctcttggatatagttggccaaataggctgcccagcatggcactggtcgtgcctgggccatggttagtcgggctggcacagcccgaccgacacgcaaggccgtgctgtgtcagcccacgtgcttcgtccaggtcaaaatagcgtaccttggatcgggccgcgggcctcgggtctcgggcctcggcccatataaccatctatactcctggaggaaaaaaaaataacaggcacgtcagcaggatgagttgagttcgtccagaacgttcaagccgatcacaccgatcacagcgcgagctcgatccaacggcctctgtctcgacagcaaggcagcgcacacaccatcgctccacgcgtcacctccttccacctcccgccgcgacgtgtcttcggacgtgtcgccccgctcgccttcctcgcccaccgcccgcctcctcctttacaaaaacccccgcctcccacacgcacgacacgacgcttgcacttacagctgcagctagctttgcccagttttgcttagcttttctctgcttccttcgatcccatccatgtccaggttgatggccgccatgctgctcggtggcgcccgcgtcgccggtaacaccaccaccgccgtgatggcgcttcatcatccgaggccgtcgtacttcctccctccccggccgcggctggcggcggcgagctggagccgcctccgcctgcagaccgcgccgagatcatcccaggtgcgtaccgttcgtccgtcgtcgatcgccgtcgccggtgagtgatgggtgttgttgggttggctggctgacatcaatggccgtcgtttttgttcggggtaggcgtacgacaactcgccggcggacgaccgaagggacgtcggggacaggtacagggacgccgcggaggaggcgaaggaggccaccggcgacgccaaggagcgggtgaaagggatggccggggaggccaagggcagggcggcggacattgccggcagggccaaggacgagaccaaggacacggcgtcgcgcgcggccgacgcggcgtcgcgggcgacggaccgggcgaagcacgaggccgccgacaaggcggcggacgtgaaggaccgcgccaaggacgcggcggacatggcgcagggcacggcgagggcggtgagggacaagacggcggagacggcggagggcgccatggacagggccggcgaggccaaggacaggacagtggaagggacgaagcacgccggcgagaaggtggcggagatgaccaaggaaggggcgagcaaggtggtggagacggcgcaggccatcggcgagaaggcgaagcaggcggcgcagggcgcgtggggcgccaccaaggaggcggcgcagggcgtcaaggacacggtcgccggcggcgacgtcgacgccgacgccgcgatgaaggagcaggacaggatcgcgcaggaggagaagaagaggcaggccagggagaagggcgctggcttgccttaggctaaaactgcatacttgttgcatgcttatttgtactaaaagcttttttttttagctgaattttagtcggttcagttcttttggttgaataatgttggcaaacttgagcctcctaatgtctgtaagactgtaactgtaatggaaaggaacttattgaagttattagccatgcaatgtaccaatgtacactagtagactgtaggagttctaatacgcctttcatacaccacatatttacttgtagactagtaattataatgcgcctttaatacgccacatatttaacagtttaaggtgactctaaactgaaaagcagtaaacacatgaagcggataaaatcagtggaaaaacagtgagctgagctgtgaagacaatttttctgacctgaatcaatctaattgataactttctggaaccttaacgacatataaggtactggaagagagacaattccagttgagaaagaaatgaactgaagccctgacaacactggactgctcgagtcagaccagagctaaaaatatttacacagaacgaaatgatcatcttttttttgttgttgttaacacttgtagatatcaaaatttttactcaaaaactcaaaacgagtaccttgtctagtacatggcaaaagaatctcttcctcacacaggaatacacatgttagctcaccacactctgatgtgtttgctacacaacatttgcttgcagatacatttcgcaattgtacaaaaattacaggagacgtggattcctaaaacagatgttatcccttcctgaataatgctagaggtgcaactatactcttcttctctttgcaatgccattcttctctagttagtgttatctctacttgatagcaacgaacaaaacaaaagggtgtcggaaagggtaccattcggcaatcaaacataagaggtcaagcgcacctgcatcacatttgtgtgtggaatgctcatcgacatcatcgccctgcggcagttgttcctcaagaatgcgaagaagtagtttatgatcagcttcttgaagaaccaggaattcttcctggctttgacgatggggttgtcaatgagatagacggctccagattgcttggcctgcctgatgaatgcgagctccagctcaaggttctgtgtgtaatccaccacaggatcgtgctgaggcgttgagcaactggcctcaggaataacttctgccgaaggcacaaagtctgccaggagagggacgtcaagcgagtagaggctaccatttggcgctacgattgtcctagatggggttggaggctcctcgtcagagtcgatgtcgtctccactttgtagggatagctctactgcctcccgctgtatgaacttctcgaggccttcaatcagaaggcgctcaaatgtgctttggctctcctggttcttatctttgtagccgtacctacactcatccaagttaacaccatcataagctttttgtgacgactacacatacttggagacaaattaactccaggagaaactacatcagtaactatttcgcatgacaaaactgcaaaatgcttataaggacggagctaaacttcaagtaagatatagcataccttgcaatacagcggaacatgtgataaccccttgtacaaacacgttggaaaagaaacctttcagtctggggaaccacgggcactggtacattcctgatgcatacaaaaacgattatcgagtggattgcaggaagggcaatcagaaaatgaccaaaaattgccggaactcctttcactatctcactgtagaccaagcctaatccaggagctctaatagtaccaaggttgggccccaattttctcatcaaatcctttgaaagcttctttttaacttcactgtcatacttcagtttgcttccataattccagatgaacataaccattagaataccagatgcaaaaattatcagagcccaacctccatctccaacactacttagagacgatgagaagaaaaccaactctaaggagaggaatgtgatgacaaatgacaacactttcacaatactggtttcccaaattagaagcattatgattgtaacatagactgtggccattatcatcaccccaagctcagctatggctgttcaatatggaacagggtaagcgcatgtagaacactgagcattacaacttattaaaaagcagataaatagacagatttgcactaaaaagtataaccatataattaagttattactagatgaataccctgccacattgctgagggaaattaagttgcataatatgcacaaataagattaaatacgaatattaaaactaaaacaaattgatacttatgaattttgaggcctaaaaaattgagattacttggtgttatgagagaagaaagaagagacaatttgaaccatagatctatcatccaatggctagaaataattaaggtgatgtggcttaatgatagaagagagataacattaactacacttagtggggatgaactatacaagtatataggattaccatatgcattgccaacatcatatatgcttctgaacagcagaataaagcccaagcaggaaaacaataaaaaccagttcacgacaggaatgtatatcttagccataaatttccgagacgtatgaatgatcttgagtcgaggaaagcaaccaagagctattgactgctttaggcattggaatatagctgtcgtcattgttctactagcaatcaatgcggctaaattggctattaagaaaacaggccagaaaactccacctgcaacgaaaacaacgcgtagtaagccaaagtatctaagtgctatggaatacttggtatcggctaaaattattgaagaaaaaacagtcaatgtaatcactaatatatattttttttcaaaatataaggattatacgtcgattgagattattcaattaaaaaagaatgggtaaatgttcagcaatatctgccttacttgggatggatgagaagaagatctgctcagatgaattttggtttgcaataagaaaagcgccttgtcctaaataggccaagacaaggcaaggaagaacaagaagcgcaaacattgactgcaaaggaggaataagatggatttaaatataatcacagagagtggttacattgagtatatctaggtgacaagaaaagaaatattagcaagacgatacctgaacatatcttacaggaaagtaggaaagatttgcaaagattgcctcggaccctgcaatatgttttggataagtgtatcaagtttcttttagcaaaagaaagagttgaatattccttcttaaaatagcatactgctgatggaaatcaattgtaactgatgatgggccgactagttatgatctttacctgttgcacataaaagacagccagcaagggacagccaagcctgaaagggattcctcccaaaataataaataatgtagagaggattaaatgctttaaaagctgctgggccatatgtactgagattgtatataccaattcctccgagacagcaaaaccatataagtaaagaagggccaagtgcaaaccccattttgctagtggcatacctctgtacactatacaagattacaagaagtacaactgaaatcatcaccacaaggcctgcaaataacatttagtggagttaaataaatagtttgcttaggtgctatcagatacagggatctaaaggatcaccttgtgaggcatttggtatcccaactttcaagccactgacagcagacagcactgcattcaagaataaagagttaaatattaactaatagcactcctaggagaggagattttaatataaacacaagtgtaaagtatccatttgatgtcttgtgtattctttatgatctacccagtaacaaatacttgaacatgaagaacataaaaaggaaaaggagaaaggaaataacctgacatagctggtgtgataactccatttgatatgaacattgcagtcccaaatagcactagacctagaagcaacttcttcaatagcaatgaagattcaagcttctcctttacttttatggatctctcaagctctggcgttggaagcttgagtcggaaactcgacatcctcttctcagagtgtacttggtttggaatgagactcacttttgcatttctgcaaatcaaagagtacaacgcaaatataccacctgtagagtcatggaatcactgaaagatgttaatgttctaacttagtcattatacaagactgaacatgacaaactaaattcacaacctcagatataccttcaccatcatcattagcccaaaggacgactaagacatacttcactagtggcatcgaaattagagtataaaggacaagtgacagtgctccaagaacatcctcctctccaagaatgggatacttgctgaacatgacatcaaatgtatacaatggacttattccaatatctccaaacaccacagcaagagtctgaagggcaagaaacattgtcctgccaaaatcaaactcctgcacatgtaaataaaccatatggaagataattaaggaaacatcatcaataatgctagctggtttttcaaagtagcgtgtacatttcaggatctaggtacaattatttcgatgtaccataagaatatcccatcgttcgggtgtttgcaatttttttttttgaaaggatgtttgcaaatattattcagctgatgagtcttcaaaatgttcccttccctgaaaaatcgcagttacttggatgaatcttcaaaatgtttttttttctagatgagtatgttcaaacaattagtgtagttttttatttaaaagaaaaggcaggtgatttgtcagacaatcggtgtagttgatcgcacaagatcatgaacatcacatctcccttaggcatctgatcaattgcaaaccattctcattgtcgtccaacacaaggttaaaccaaaagtaactagtacacatgcctaatcgttgccatttttcctcatgattctaatcgcatgggcaaatcaactttaatcataccgtgacagccatatcattctccaaatctctcgcaccaaatgacgcacaagcacacgcacgaaagaaaaagaaaaagaaaaaaaaagcaaaccgaagtaaatcaaaccgcaagccagaggcccctcacctcgctgtcctcgatgtgctgcgcgacggagacctcgtagccctcgacgtcgaaccagtcgacggacggcacggtgcggatcagcttctgcttctccccatcctcgccctccccctccccctcgccgccgccgccgccgtcctcctcgtcctcctcctcctcggacccgaagctcccgcccctgcccacggccccgacggccgcggccgccgcctccaccgtgtccccgtcctcctccccctcgtcgtcctcctccgtggatacccaccgccactccatcgacggcgccttccgcatccccccgccgcccatcgccgacgccgacgccgacgacgacgacgacgcggccatagtatcccgatcggatcgagaggcgaggcgaggcgaggcgagaagggaccaggagaaaaattcgtctccgtgtgttgcgtgtggagatgtggaggcgcggatggaggaggaggaggaggagagatcaggagagagagagagagagagagagagagagagagagagagcgacaaaaccgcgagccggagagagagaggcgagtgggttgaactgagcggtttcgttcgcggggggcgatgctgaggtggcacacgtgctgaccacgtgagagcgggctagcggttcttttttttaaaaaaaaaacctcgttgaaatgtggatgcttttttgtaaaatttattcaaacgattcaaaatttagtccctttttatctagaattagagtgaattgcatattggaccgctaatatttgccttggttgcttattggactaaaggtaaatatatctttttcacattgggcctgctaactctacaatagttgcacattgaaccggtgttcttctccaactcccttctccattaagttgtattgtacccgatttgtagaagtctctgcacctgccatctagctcaagctcgctaccacagatgagcaaggcttcgggagaccaagaccttgagtgagctgccgccggccggtgatcaagcccctgccctacgctgcaccgccctacgctgcaccgagctcgaccttcactgacaccaccttgcactggatctgcattgagcattgccccgcgctcgagctcaccatcggcggtgagcagaccatcaagatcacgccaccaatctagctttaccacctccaatccctgcctgtgcactggagctcaagtttgagctcgaccttcgtcagctcaggccactcggtcgatctcgcccgcacccgcccctgcatcaagctcaccctcctggccctgcaatctctcaaactaaacctccatccaacaagctgctgctgcaggggagaagttgatggtaagcagctacgattaggttgagtaagcgttggctgagctccttcgtggatatctgttaactgttggccaccagtgttcgagagagataagagataccgacactgactgacatgtgggccactagtgttaagtgaacttttggtaataatacctagcccaaagtgaaaagttgtgctaccacctagtccatcatgtaacaaaggtaataaaaactggtccattatgaaatttactcttaggattataatctagcttacaaataaaaaagtctaagcctaaataaataagcagccttttcatttgggtttttaaagacctacttatttggtagaactccaactcctaaatttagctccaggagttgagtgtggagtagagttgtggagtagtctaaacctaaatccacctctctaatgtattctgtgagagtgctccacccattacccaactactccctccgttccgatatgtagcaacct

SEQ ID NO: 14140 - DNA, 699 bp, Oryza sativa
gagtgattttgatgcaaagtttcatggaaatgctcttgacataaggtgctgtattttgtttgcatagttttcttcttttgctgcaagtaattgaaggggaggataagggcgatctttttaactgtgtgagttcctcaggtatcaattcataccacagatgatctttctgaacagcctctttggctacttagcactcctaattctcatcaagtggtgcacgggctctcaagctgacctatatcatgtgatgatatatatgttccttgatccttctggcaatcttggagaaaatcaactattttggggccagaaggaacttcaggtttgtataaccttttattaacaagaaaaaggcttcactacctcattttcctgccagctaacaattattactctccgttcagatacttttgttgcttatggctattgtagctgttccgtggatgctcttcccaaagccttttatcttgaagaaacttcacaaggaggtagatttttcatgaaaattcttatagttgatcaacaaagcatttcccttttgagatgggcattgatttgttttcatgttctagtactgcatgcataacttgacaaccacagaaaccactgccattacatactctgcaagtacttgtgcacattgttagtctttttatgcaatgggctaatggttagagttatggcttagggttgtagggt

SEQ ID NO: 14141 - DNA, 4259 bp, Oryza sativa
cccatcacccacgcacggaaaatgaagtgtccattagcgtgtgattaattaagtatcagctaaatttttttcaaaaatatatcaatatgatttttttaaaaaaagcaactttcatatataaacgtttttttaaaaaaaaacataccgtttagtaatttgaaaagcgtgtgcgcggaaaatgagaggagggagttgggaactcctggtattgaaacacagccttagtgctctaaggttgtgtaatactacatatgcttagaaataaactctactcctttttttcgcttgacaaccattattgctcgttatggatgcctgaaaatcaaagatgttgcttgttgtctcagaacaaggaaagtgttacttatatgttgccatgagaaaagcaccatacattttccccacaatatagttgaacacactttaaaaaaatcttcattttaaagtttcaaatcactgcattaagaatacaacaagacgttagaaggatcaagaggatagacatctgcaccggggcaattccattagttgcaaaaccggaatatttctaatggtcttacatcagctctcattctctaatagaaggcttttattgtcttagaagattcagataggctgatagctgggctattaggtattgcatgattgatataaccctggcatttatcattaggatgcgcaacgtacgtatcagctgaaatgctcaaacggcatacttttcgcttgcttcacctaaagaaagtcagaaaaaatcagctgtccattgctccattttgctgaacatgggttcacgtcacaacgtggccgcgctcgttaatcagaaacacctttcctcctaccaggaataatacaataaaacaaggtgctgtctatacaactattaaaaaaaattctctcgtatatatagtcttcccatcgctctgtatcaaagattcaatgggctatccccgctaaaaaaaaaagattcaatgggctaaactaactcttacacacacttattagccttttgtttaggtttatgttttaagtcgattttttcttatatggtttataagtcattggcttttaaaccttaaatttaatggtgtaatcctatctcatcttgcattagcccaataggttactctgacataactttttaacataacggtgtaatcgtggtttatggttttaaaagagccaaacaaaaaaacttgccttgttgcttagacttagatttttttataaatcgtctaataagcctaaataaagaggacctaaagatataagcctaatcttcacctgcgactcgttcttaccagtgaggcaagtcattcccaacctccactcctggcgatctccaacaaggttacctacgccattgatcttctccatctccacctaactaattagcatattcttcctgatattcggtgaggtacctctactttgccaatctccctcatctctaaccgatcctactgttgattcatcatcaccatgtaaccattcggccaatattccccgtcactgcccacctacggcttcagaagtatcgccactgccttgtcgaccccttatccaccacccgtcgccaaacaccatctcgacctccctttaaaccaagggtccccctcccccttcgtacccctaccacctctactgttattaactgttagggggtcaccatcgttctcactgtgggagaatcgacatatcgcgagctagagaacaaagatctcgcacacaaatcttgaagccaattagatagtctaaaacatgtaagatttattcccctgtttttctatcaaatgactgcaagtagcccctccattttatattataagacatttagacttttttatagtaatttttttttcacttttaaccaaaattatagaaaatttggaaacatctacaacaataaattagtttaatttaatgaaacggtgaatatattttgataatatgtttgttgtgtgttgtaaatattactatgttttttattaacttggacaaattttaaaaagttttactaaaaaaaatcaaagtgcctcataaggatctactccctccgttttacaatgtaagtcattctagcatttcccacattcatattgatgttagtgaatccagacatatatatctatctagattcattaacaacaacatgaacgtgggaaatattagaatgacttacattgtgaaacggaggaagtatctacaaatatctcgccataaaacagaggcgaaaaccatcaaatttcgggactataggatacaaagttacaaacttaatcaccacaaatcgccaggcccatacaacatcgacaaagatcattggtgtgggttggtttctcattaggagtcttagataaatgaatcagtacttataaaaagtataccaaagttacgctacaattacatcataattttattcaaagttacatgaaaggtgttaaatgatcacactgaattctaaacactacggcgactgcattgttgcccagcgccgtagtgggcatggtgcacatcaaaacaacttcagccagcacaaatctagatgaatatcaaaagtttaaatatcgaatgtaatcgggcgaaaattatatcgctggaagtatagtatgtccgtcttatatataatatagtgagggagtagcaaatccgataaaacaatcacaacactgagcaacgagacatgagtcaaaagccaggaaatctccaagcattgccatgaacccatgatagcgcggagggcaaaggtgaccaaccgccaccccccacaaaaacaggggccgttcgtttcgttgatgggcgcaggcatggtggtggaagcagcaaggggccctcgtgggccacgggtctcatgtgacaacaggtgacgctgggaatgcgccactacaaactgtttctctgctatgtgatgtgatgcgatcatggggatgggccgcgcgccgggatccgcatggataatgctgccgcctgacaggatggatgctgatgtggtacgtgggggggccagtgcagagcgcatcgcatcgccatcgccacgccaatgcatggccagcatatgggttcttcttcttcccttctgctgctgttgcaacttgcaggttgcaaggcggttgggtgacagtatcaggcccgtagtatggtttgtgctttaccacggtctaaactcttcgtttgtttcatctgggatcctgacgaaaaaggctggtgatgtttgctacgaaatgggctggcccaagacagaaaagggcccaggactgagaaatgggccgaaatgtttgaatcacgccgattgaagaacaaaaggttacatacaaacagctctcatcggtgaatctgagagaatcagaactgacgaaaactaacaaaaagcctaatccaatctgtcacgcccggatgaattaacccttcatataccacgtatgatacagctatgagcacgtttacccccaaccagtacaagcacactcctatgtttttctcctttttccttttgtaccaaagcaaccggcaaaaagaatttactacaacacgggaaaagatgagcaaattccctagcgcatagcgcgcgcagtttgattctgatcagcctcatttcttccacatgccgctgatccgcctgagcacgttgccgttcttcctggccgccgcgtcgtcgtcgagctcgtcccacaggccggcgtacttgccgccgccgccgccgcctccttcaagcgactcgctccggtccaccaccttcccgttgccgcccttgcccaccgtgagcagcgccatggcggtctcggcggccttcctccactgctcggcctgcacccgcagacgcctcagctcggcctccatctcccccttcttcgccgcctccgccgccgcgtcggcggcgtccgtcgccttcgccgaggccttcttctcggaggtgtgctgctgcagctcgcgcttcagctgcccgttctccaggagcgcgccctgcagctgctccttcagctcgttgtccgttctcgtctcggattggagcttctcgttcgcgtccagggcgcgccgcagctcggagtccttgtcgaagaggctcgccttgaggaagatgacctcggacttggtgctctcgagcgccgcggcgagcttgccgtgccgcgagtcggactccatttttatctggtccatgagctcgtaggcgcactgcgtctccactgtgctcaggatgcgctcttcttggaacctggcctccgtggactccaattccgacctcagctcagcgacctccgatgccg

SEQ ID NO: 14142 - DNA, 532 bp, Oryza sativa
aaggagaagccgaggtcttagattactggtacatcttggttggcaagcatggaatagacagaatgaaaggctttagatgctcaagaatgaaggctttagatgctcaagaagatggttccttgctatgtttaaagtgcgctctttatattgttaacttaagattgtgttggtaaaaaccatgccttgtcagatttttgcttctgttaaggggaaagtactgtgctgagctattttctccgattttgaggcgccaatgttttgtttgtttctttgatgactccagctcgtttcgttcatctgttctttgtttgagcctgaagcatcgtttagctattgatttttatatgctcgtatggtttccggttatcttcgtcggcgtccctttgatttactggcttactgctagtcacatgcacatatttactgtgactctaatatgatacctgcgcttatgttttgcatttgcttggattcatccctttgattcatctcccaaacggccaaaccatccgatttgtgctgaattttttga

SEQ ID NO: 14143 - DNA, 1358 bp, Oryza sativa
ttatatctagggttttgtgcaacttcgaccataaaatatggggttttctgaaatttactctattttaaatgttatcattctgagaaagatttttgtcaactgcaagactatatgttacaatctctttttttttgtacttgatctaataatatatctagctattatattatctcgaaatatgcttaatacttaattgctatttgaacatttcagtccttcgagtttgggatgtgcttctgtttgatggaaatcgcgtgatgctctttcgaacagctcttgccctaatggagttgtatggtactgggtcgatcttttgcatttttgtcgctcaaacaattgtaacaaaaaaaagtttgtataatctcaggatatatattggtcactgcatgaatacttaccactggtgttggttacaggtcctgcgcttgtgacaacaaaggatgctggggatgctgtgacccttttacagtctttggctggttctacttttgacagcagccaacttgttttaactgcatgcatgggttatcaagctgtagacgaagcaaggctgcaagaactgcgaaataaacaccggccatctgttatatcttcaatggaacagagagcaaaaggtcttcgtgtttggagggacaccaatggccttgcgtcaaagctctataatttcaagcgtgaccctgaaccattggtgtctttatcaacagaacaattaagtgacttgacagaaactagttctggaagtacagatgacatgtatagtggcctgactgtcaacactgagattgattctttgcctgatccaaaagaccaggtatccttctcaaaataacacttctttcacccctaaaattatcaattatggtttcaaaaaaattcagcagacaaactaaataagtcaaaaagtcgtgtataaatatttaatcaatactgttctccatgttataagtgcatacagtgtcacgcatgcttaggatttcaggaaactgtttgcatccattcttttcatatttttggcaaattttatttggggtagaggacgactggtgagataaacaagatgcattattatccttatgctcttgatagggcaaatcagttttttctgaagtagacagcttgactacttctgaaagcaaactgctttggtctaatattttgcatattcaccagaaaatagcttctgtagggattctttatggtttatttctccatattcacaatatgaggattgagagctcatggcacaatagagctatagagaatagatgttatgatttgttttggttatcatttaaagaaaatagaatgatgtactattgatgggttccttttgttgttttagaatattggttttggtt

SEQ ID NO: 14144 - DNA, 807 bp, Oryza sativa
cttaatgcccaaagccgaagatacgatgcagtattgagacagcgccaagtacaaattcaatggaatgtatcatttgatgcacaaaaacttcattaaagttgaagtcatcatgacgtgaccgggctgagtctggttcagaatctggatccatttctgaggtcccaagaaagcgataggtgtgaccttgaaacctctgcagccaggtatattagaaaagcaattcactagatagcataaccatgaccaaaagtttattgcttaatcaagatcacccaaaagatttttaacctcagctccattttcattaaagaacaattacagatctcaaggaaccttttccaactttttgtgtatggtgtataatctgaacattgttttctagatcatttgtcagtacatacaactatgcaacaagaactatttcttaagctgctatgtaaagcacctcaaccagaatcagccactcaaattcaacatccattcagatgactagcatcgcaaagctcaaatcctggcgctgcctcatggacagaaccaaggaggaagcattcattccatcaaccagcaaccaatctaattttgtcctggaccggttgctctctggaaagacgggatccagttttgactgttgttgcagtttctaaaaccctgatcatggtagatccacccaccaattttttttatggggttcaaatactctactacaagattttgcatggagccaaggaaataaaacactctaagccatggatcacatgcttaattgttgaacgcggtatatcccagagcatgtgcacaatatagcct

SEQ ID NO: 14145 - DNA, 577 bp, Oryza sativa
gcatgcgtgacactgtatgcacttataacatggagaacagtattgattaaatatttatacacgactttttgacttatttagtttgtctgctgaatttttttgaaaccataattgataattttaggggtgaaagaagtgttattttgagaaggatacctggtcttttggatcaggcaaagaatcaatctcagtgttgacagtcaggccactatacatgtcatctgtacttccagaactagtttctgtcaagtcacttaattgttctgttgataaagacaccaatggttcagggtcacgcttgaaattatagagctttgacgcaaggccattggtgtccctccaaacacgaagaccttttgctctctgttccattgaagatataacagatggccggtgtttatttcgcagttcttgcagccttgcttcgtctacagcttgataacccatgcatgcagttaaaacaagttggctgctgtcaaaagtagaaccagccaaagactgtaaaagggtcacagcatccccagcatcctttgttgtcacaagcgcaggacctgtaaccaacaccagtggtaagtat

SEQ ID NO: 14146 - DNA, 653 bp, Oryza sativa
ttagcactcctaattctcatcaagtggtgcacgggctctcaagctgacctatatcatgtgatgatatatatgttccttgatccttctggcaatcttggagaaaatcaactattttggggccagaaggaacttcaggtttgtataaccttttattaacaagaaaaaggcttcactacctcattttcctgccagctaacaattattactctccgttcagatacttttgttgcttatggctattgtagctgttccgtggatgctcttcccaaagccttttatcttgaagaaacttcacaaggaggtagatttttcatgaaaattcttatagttgatcaacaaagcatttcccttttgagatgggcattgatttgttttcatgttctagtactgcatgcataacttgacaaccacagaaaccactgccattacatactctgcaagtacttgtgcacattgttagtctttttatgcaatgggctaatggttagagttatggcttagggttgtagggttgcgtcttctcctgattgaagtatatccactggagtgaatagatgagctgcctaatccaaaacattatttatttagcagaaatattggattaatactccttccgttttttaatagatgacgctgttgactttagacataca

SEQ ID NO: 14147 - DNA, 526 bp, Oryza sativa
cgaattcgagctcggtacccactgaattaattaacgaatggccaattcaacgacctcattaatgaaactatgtgaatggcaactggctaatcacagtgtagtagtacaaattgctaatctagttggattctagaattgatcaaagctagcaggaagcagctgatacctgcgccgggggtgatgcagacgagaccggtcatcatgccctgcacggcgccgatgacggagggcttgccgaagaagatgacgtcgaggcaggtccaggtgaggaggctcgccgcggcgctgacgttggtgttgagcacggcgatggacgcggtgatgtttggggcgtacggcgcgccgccgttgaacccggcccagcccagccacagcagcccgccgccggcgatcatgaggaggatgttgttcggcgagaaccgctccctgtcgctcttcagcctcggccccacctgtcacaaaaaaagtatttattaatcgccgtcacgtggttaacacttaacgccgtcgcgattcgtgccacgta

SEQ ID NO: 14148 - DNA, 554 bp, Oryza sativa
aaatccttttcacggccactaagtgacactccttaggagcggcttgaaaccgtgcacacatgcaaacactaaacatgatatccggcctagatgcggtaaggtaaagcaagctaccaatcatggaacgataaagctttaaatctaccggtttacctccctcatcaaggtcgagatgtccgttggttgccataggtgtcttgatgggcttcgcatcctccaaaccaaacctcttgagtagatccttgatgtacttggtttggctcacgaacgtcccatccttgagttgcttgatttgaagtccaaggaagaagctcaactctccaatcatggacatctcaaattccctagacatcatatcaccaaattccttcaacttgtgtgaaaccttgcgccaccaaccttgccttgtttctcaccaccaatccactttgttcctaaatatccactttgtccctatgacattgtggtctctaggtctttcaaccaaagtccacaccttgtttcttgcaaagttgttgagctcttcatgcatagcattcatccaatccggatca

SEQ ID NO: 14149 - DNA, 610 bp, Oryza sativa
ccctctctgcgcgggcgccttccagattgaggcgcgcctgctcctcccgccgctgcgccgcggcctcggcctcctcgagagctcgctcccactcagtgagctcgtcctcacggaggcggagtgcggactcctcttcggcgcaggcggcctcgtgcgccgccagcgttgcctcccggatggcgacggcggcctcgcgacccgccagttccctctccttcgtgtccagggcgcgggcgcgctcctccagcaccgtggcgcgagcctcaagggcctcttcgcgctgccgggacgcgtcgagcttcttctctagctccgccgcccggctcccgtattggaggcagaggtcgtcctgcgccgcgttgaacacggcggtggcgatgagggcagtctcccgctcctcctccacctccctggcgatctccgccaggtccctacgacgggcctcgagctcggaggcgtgccggctgtgtgccttgcggcccgcctccaccatggcttccaccgagcgccgaccctcttcgacacgcgcccacgccctatcgacctccccccgctctgcctgcaggacttccatctgggcgcttaacccgtccaacaccatggtgttcgc

SEQ ID NO: 14150 - DNA, 1229 bp, Oryza sativa
tagaatatcaggtgtctatttttttgtagtgctatgtaaaacgtaccaagaacttgctttgcagttaacctgagttttggatcaggctccaacatgcgtcgaaccaaatctttagcattttctgaaacatttggccagggttcgcgtttgaaatcgatatttccacgaagaatggcttgtgccaccccttgctcagtctctgaaaaaattccaggcgagattgtttgagggagatgacagccaatgatagcgaaggttttaaaagaaaagcaacataccagcccaaaatggaggaactccacataacaaaatatacaagataactcctgcactccaaatatctatttccggaccatagtttctcttcaatacctctggagccatgtaatatgggcttcccacaatttcagaaaacttctcacctaaaagaacataacaatcacataaggactggatggaactaggagttttgtctgtatacaaagaacaacgatcaactgttgtacaagcactgtgagtccacaacattataaaacaggaaaatgccattattgacaaggattgacttcatattcaattctctctcatttcctcatgattcttaggtaccataattttcatgaaacatactaaggagttcaactcacaggggttccacaaacaaacaagaaactattcaagtttctgagccttctgtgtcgaaatgctctaccttgttacaaggtaacataacaaaattcagttgtctgcagaaaaatgtaaaatatgacacaagcaaggtagcaatgtcaccataagaattcaatgcctccgggtgattagtgcatagcagtgcgtatgtagcagctaagaagaatccaataatcactgaagataaaaaaaaacataaaatgaggtatataggcaatgagcttgccctgtgcagcagtgcggactgccttggctgctaggtgctttaggtgttagcctcagtgagcttgctgcattttgttctaagagacttttttttttaatcttgtgccactcttcacaactctattctttcttttccataaaaaaatcacgcttctatcttttgccactattccattagtgtgcatttctctatttctatccctgtctgatcaacaaaggttggccatcaagctttccccccgaaagacaattatggcattgcatatgttccaaatgaaaagaaaaaaatactaaatgaacaatgtagagaaagg

SEQ ID NO: 14151 - DNA, 709 bp, Oryza sativa
ttcctgcagccctagatgcattggctgccagctcgatccgcaccgacgatactccggcgaggcaaagcgcggcgtaaggaggaggaggaaaagtggccgggatggagtcggtcggcgacccgcgggatgggccgtcgacggagcgcgcgttcgaggggcagcccgtcccgccgtggacggagcaggtgacgctgcgcgccgtggtggcgagcgtggcgctgggcgtggccctgagcagcgtgatgatgaacctggtgttcacgtcggggatcatcccgtcgctcaacatctccgccggcctcctcggcttcttcttcgtctacccttcctctgtgtgactaaatttgccatcaatagaacattgtatccccgataattttgtagcagtggaaaacgggtgacaagcgtccatcgagaggagccaggcaatggccatagttagtgaacacattggcatagctctgggtggaagagagattcgagcaacttatcacggattgtagcgtgggtggaagagattcagtcgacgctcgagggtggcggcaaggcaagatagcaaccgtagcaataatatcctcgttcgtcgctccacaccaccatattggtggtctaaggggcgatgctagagataggagccccagcctgattacccatggccctagcctgaaccacatctcatcaagtcacgtaccgtttccagccacgtcag

SEQ ID NO: 14152 - DNA, 2628 bp, Oryza sativa
attcctgcagccctggctgtgggaaaccatgctccttacggcaggaacttcccaggaagaaagccacagggaggttctccaatggccggcttgttccagacctcctcaatgagaagctgcagctcaaagaattctcaccaccattcctggagaaggacctgtccaacaatgacatcatgaccggggtgaacttcgcgtcggctggttcaggatttgaagaccagacgtcacgcttgtccaataccctgccaatgtcgaaacaggtgaacctcttcaaggagtacctcctccggctcaggaacatcgtcggagaggaggaggcttccaggatcatagagaactccctgatatttatcagctcaggaaccaatgacttcacacgttattatcgttccttaaagaggaagaagatgaacataggtgaataccaggatagtgtactccggatagcacaggcttctgtcaaggtaaaagatcataagcatttcctgagttgtttgtactcagctagattgaagctgattgtttcaattctgaagcagtagagactagatatatgactcttctttcacttactggaatgcaggaactgtttagcctgggtgggaggcagttctgcttggcaggtcttccaccatttggctgcacaccatttcagattacgttaagtggagatcctgacagagcatgtgtggatgagcagaacagggatgcccaggcctacaactctaaacttgaaaagctacttccagcattgcaaggctcactccatggaagcaaaattgtctacttggatgcctatcaagctttcaaggagatcctcgacaatcccgctaaatatggtatggttgtccaataatggcgtgagttgtaacttactacattacaaatacacgcattcatttgtaatatcatataaagttgtgaagcataataccacaacagatttggtaaacactaaaaacaccacaatgctaaacttgggaattaacagctagaagctgacaggaaaccaaacaactaactagctaacaatttaatggcaagagacagaaatatcatttcttagttacttattccatgtactgttttttttttgtaactatagcagctctcaccaaagtttgccatgataacaggatttatagagataacacgaggatgttgtgggactgggctcagagaagtcggactgttgtgcaatgcattgagccctatctgcaggaacgagtcatcatttgtattttacgatgctgtgcacccaacagagagggtctataggataacaactgattacatactgaaaaatgctattccacagttcagttaaatcaaattatcaaataatatttcattccttatgttgatgcattctgcccgttctttttgctgtgcagtgtgcactaagtccatataacaagaaagaaccctttgaacatttaccattaatcgtgttatgcttatgtatgacacactgtaatccttggcagtcccaataatgggtttaaactgtttacaaggtgaaatatagaatgaagaacataaaactttgactggataagaaaaaaatgagatgactatagagacaaaacgactacagggttatccctttgtaagagtgatgaaaggagttttctataaatcttccatactgtgaaatcaacattttggttgaagcaagggttccgctaaataaaaggtcgagaggtctgcaaattccatcaaaataaacaaacaaactaagctaccatatggatccagaacgaactggcacatattgtgcattttttatgcctctgttttataaatgggatagattcagtgttgaataaaaaatgtcttagattatagaaaaacacatcaacatctaaaacatcaaattagtttcattaaaatctaccaggaaatatgtcttgatagtgtgtttttctataaacttggtcaaagtttaagaagtctgacttagaaaactaaaatgtcttacaatatggagcagagggagaagaagataaatcctgggtaaaacagtgcagtagtatattagcattagttgctctaggactccagagttcacatgatcccaattagtaaagcatcaaccactacagcacatactgtgaaaataatacaagtggctaaaacaaggatgctacacaccttaggctggtctccctgagaaacattataacacagattagcacaacgcacccagaagaagcacttcacctggtcattgctttgaacaactgctgaattcgtgatctcacatcctcaagtcgcatatatgactctcctgcagatcctgttgccttcaacatctcagccatatccctgtaggctggaattaccagctcctccactaaaatgctaaaatccactccttgctgcttatccaccaagacccaccgtgactgcacttggcaaattgcttctacaaagttgttaaaacggctcagcttctctgtaataacattcacgttgctgcaaaaccttttgtccatctcaagtatcatgatagccttaccccaggtagcccgtcggtattccaaaatccattggttaacctttgaatgtattaccttgatccaatcctcacccagcaagaccttagttcacaaccattgactt

SEQ ID NO: 14153 - DNA, 16946 bp, Oryza sativa
cagctagatatttataagttacttttcagaatctctagctccttaaccttacactttgttcaggaccaatctttaaataactagtcatacggtgatacatacgcaaaagtttcttttaaatgagtattgcagagcctgagctgataaggataaaccggggaaggtattagcagtctctgtttcagaaaagagcatgttctggaatctggagtgtcagatgattgtaccattagtgcttaataaaccatcttcgccatccttctgaaaatggggcccactctactttggaatgctatttacaagcacaaacgtgccacccatgtgattagtgagaatcaggagagccgggaaggttgtttattactgcaacagccaggaaggcagaaagaagtacaattgccaacgaggctgtcttaaaaagagtccttcagctccaccggtttgctgtttacagttttatttacacttgatctgtataacaacaggcctaatagaacaatcaagcgtgagcgtgactagtctccttatctgagacagtcaatgatactgaactcgctgttagagaaaagagagaaattttttttgcagaggcaaagaaagggggaaaaaattcgcaactttatgtgctacacaatgccttgtttgcgaatgttgtttacttctactccgtatttgttagtctacttggttagcttcatctgatcttgaactgtttgagttttctcgacgaaatggcgctccagagaggtcagaaccacaccgcgatgcagaaggcaagtagaacggccaacttttgtggatccctctgcattacaagaacatggacatcgatcaggcttgtgtatctgaacaaaatgatgtgaactgaaatgtgcaaaacaaatctgtgcatgttcttattagtcccacaaatgccaataaccataacactagttgcatgacggaaacgctggctcaatcaactgcaaaatacatctagaccaagcagagtagtatagattccagaacagcttgaaacaaaacattttgttgcctcatgcctgtttctaaggtttatttgaactgacagttttgctagctaagcacaccttgcctcctcggcttgctcttgtctgttgagcaatggcgaggtgtttccccctgcatgcctcaggaagttcaccatcataagctctgcagatgtaggcttcaaaatttgtgtaatcctgcagatcagtgacataatgtgctagttctcctgacagatttaagtaatggtgtataatatgactagaattttcagaaaagaaatggaacttacatcaccaagggggcgcccgtttacggtcacccagggtacaaactgatgaggaggctgaagggcattcgtctctgcagcatactggagttgaagctgcacattcaattgatttattattagatgatcaaaattcaacgtacatagaaatatgctgctgagctgttctgaacaaatctgaagaatagcgcaagaatcagatccattatcttgtgaatgcatattactccctccgtcccaaaatttagcattttttttgtggatgggacgtatcctagtagaatctggacagaccttctatccagattcgtagtaataaattatgtcctatccagctaaaagttgctatattttaggacggatggagtatatggtggtcttcagaaaaaaaatcatttaggatgtactttcattgttactaaacacaactataccagaactacttattttatttttctaaataaaaaaaacaagctgagtactttcttagctcaacatatatcaactgcaaatctgaaagtaaaagacaatggaaataggaagccaataactgaacctacctgtgtgccgtaccctgagttatagcagtccataacaggttgagaggctagaccagtttcttgaaagcaagattgccacgcgttccatttttgagtcagcgctaaatgctcaatgcaattaatgaaagggaaatgctgttcctgcattcagaagaacagatactggtggcacttcagtgcattgtctcaaattctatcgatgtgagcaatagatgagcttggcagatctaccatatgctcattcatacagtacatcatactactactatatagatggattaaatgccagcatgttttgtcacataattacactacaggacactgaactattgagttcagaaacttttttttttgttctgttaatgtaaggcattaccgcgtcaggccaaagtctgatcacgcaagcttctatcgcattgagttggcattcctcctctccatgctgcaaaaccaagcaattagagtaggcaatcggaaaccatggtgagcgcggggcgaggatgacgaacagattaataacgagatgggtgaggaacggaggctagcgatcgaggcggacctggcaggtaatcgatccgtcgggcgagacgcggccattgccgaaggggacgaggcggaggtcaacgacgggggagaggccgtcccggaagatcctcgcgagatcgttgacgacgaagccggagcagaacgggcacagcgtctcgtaatagaccgacatcgtgaccctcccagcggcgcatggcgccgtggcgaaggagaacagtacgagggacaagatgaggattcgaggaagaattcgcgaggaggaagaacaagaacaacaagccatggggcaagcggggagaggaaaagagagctaaaggcgccgcctttttttttttttggtgcagggggctagccaatgtacgcgtcgtcgatcgaatcgatcgatcgcgagatcgatatgctttagctccttttggaggcgaaaggaaggagacggaggaggagatgctcttggatcatctcctctcctggaaggcagccttttcccaggtcaggttgcgcgggagacaggttttcaagaagcgagcgtggcttcatgtcaggccggcgaatcgaatcgagtgagaagaaccagctttgccgcttgctactgtagcctttgctttcgatggtgtggcgacctgtggctgtggggttcaacgtacgattacatgttcgaactccacacaagagcaccgagtgactttatgctggatgccgcagatatcgacgatcaggttcctatggggctatggggcatgggctacgtcactagaaactccgatgactgcacatatgagggaaactgttttaacggctcgagtggactcacccgtttattacatgtcatctaaataaaatgacaaagatttttaactgtaagctggagtcggttcgaaaaataaaatgacaaagatttttgagttgtaggatgacctagttggttatcttattgctgcaggtaaaagagaacaagtaaagggagggacctggaagagatctcagagctagatttcttctgctttccttttcctgttctttactctgttccttttttattttgaatgattttgtttctcttctatccacttcatttcttagcctttttccactttctactttatgatgtttgctcccttattcttctttcgctttttgatcagttttaagtccagaaccaccaaatgatgcaatttaaaacatatccatttctgaagttaaaaaaagtgtattattgatggggaggaaatgcctacgcattccgacagtttattcaaccgtgaaacctgaaatacagcagtttctgaacctgagtacgaaatatatgttcacaggcttatatataacctttgcttctcaagcaatccacagagtccctgatggttttttcgaacggaatgaaatgcacaccaagatcaattagcttcttcgaggcagcctttgatctcaccacccacccttgtttatcctcctggattctgatgcagaaaagaaaaagaaagaaattagcaagagaagaacactgcatctgatttaagagatgttgatgcccatagatgcatcacctgtggatcgggaattcagggtaaagctcagcaagtttatcatggaaatcaatcagacgctctatggactcgatgcataagtggcgtccctgtgccgatgtgttctcatagatcactaccgcggactgtgccacatctctgacatcgacacagccaatgtagaagtcatcgatgtcaaacctctggcctgtgcatgacaagcgatcttagaagctacttacatcaattaaacattgtaacactgaagagagttgagagactgacctccgagaatctgaagcagcatatggagactagaagtaggggatggcatcaacattgggcccaataccaagcctggattgagggcgaccagctgcaagccttcctttgcggcgaagtcccaggcagccttctctgccagcgttttagatacgttgtaccaatgctgcactgagtaaaattagcacagcttgaagaaaaaaaaaaggtacagtgcactacatatttccacaatgtgaagttgatttaattccgttgccattacagcacatgcatatagaagcaaaatatagtaacttttcggattgcgtgtctggatgatgtagatattcccatctgacatgcactgtgctttttccaaataaggaaaaagcacagcaagtctgcaacaaccaacagattgcacaactcacaccaagcgtaacatcatatatcagcacatatgattgtgatttgtgacttgttaattagtgccagcaccctgattacccccaagtcccccaacacatcgcagactcccggtgcggctagtgcagttgcaaattgggaagttgtgtacctgatgtttcttgaggagctcgacgtcggcccagctgtcgtcgtcgatgaccttatcagcaggccactcaggattgggcactatggcaacctgcgacgccatcagcattacacgggcgacaccgcagtccttcgcggcacggaggacgttgagagtgccactcaccgctggcttcagcagctcaccctgcagggcaggcacagcagcagaaaacgtcgtaaattaggcgatgagttgaccgaaagaactgcattcgtgcaagtgtgcaggcagtactgcagctgcagctgtgcgattgtgaagggagaatttgttgcctcggggtcttgagtcgggtgaagtgtgagaggggaagccaggtggaagacgccgtgggcgccgtccaccgccggcgtgatggaggccgggtcgaggaggtccatctggaacagccggagccgcgtgtcggcgccgtccagagcctgcaggtgcctcgtctcgccgtcgtcctctacgagagaagaaaaaaccggagatcttgagctgcccgcgtatggttcggtgtagtcatgatctcgtggagatgagcagagagaatctagagcgcgtgttacatacggaggttcttgacggtggcgtggacggtgtagccgcggtcgaggaggaggcggacgagccacgagccgatgaagccgctgccgcccgtcacgcagacgagggcgccgctgctgtccccggtcgccgccatctcgccgctccgctctccgcaatccgctcgactcggcgcgctcggacggacacgggcaccgtggtggaaagagaccgggtggcccgtgtttggcacgttgcgtgaactaggcgggttagctagcgtggtgcacgagggccacatgaatagccatatgaatccgaaaacacttaccctcggtcgtccggcgcgggggagccggatcgggcgctccccccacgcccctctccccacgtgtgcacctataggtccacttacttctctttcttttttcataaaagatattttacctagtgtatttacaatgtttcactatttatacacctaatattgtagtgaattaaaatactctttaaaaaaaccatatattttggaaactctctattaagggaatttggtttattttttgttttaccaaagatgtttcaactagtgtactcacaatgtttcactatgtatagatctaatgttgcattgaacggaacatttcattgcaacaaaaaaaacccacatattttggaaaccccctattaagggaatttggtttattttttgttctaccgaaaaatgtttcatctagtgtactcacaatgtttctatgtatagatctaatgttgcactgaactgaaacattctttcgctatttactgaaacattgtttttatataaggtgaagcaacacctgatttgaaagagtgaaacatttccgatctacatagtgaaacaattccggtggaacatcgtgcaacatttaaaataattcaataataagctaaattttttttcatcggaatatatccatgtgtggtcttgttttgaagatttaattgcaacaaatttaatagtgcaatcggatcatgatttgaatgagtaatttaagagaaaaatcagtttaaaatagttttgcacgtaaacgattttcccggccccggatcgggcgaccgaccgtagccgcgtccatatgaatccatcgtttccattcgtcgttgagatggacagcgctgagccggtgagtggcccagtttgctctctgagctagtagtactccttccatcccatcctataatataagaaattattcccttttgaataagtataaggatagcatgaaaatactataatacctctattaaatgatatttgcttataggtgagtgggtagttaagggttaaaatgggtaaaaatttgaattgtaattgatggatgtgacaagtagtacaccaaaatcccttatattgtgggacaactaaaaaatggtaaaatcccttatattatgggacggagggagtattacattacaaattaaggtcagcaacgatgttgacgtgattccgcattgcaacaatttaatcaaaatactattatcttcttaaaaaaatataagaagtttagattagatacgagtataacgaaagttaacgaattaaataaaaagtgattgtgattggtcaagaaaagaaaataggtaaggaatttgaatagtgagaagttgtgattgtttaagaaaaaaatatgagtgaagaaattgttactccattcatcctataataagttaattttatatgggatgtggcatttctcagcgaattgtcagcctcagtatgaattctctgcttgtaccgttgtatggtggagccaaccgaacatccaatgcgagatattcaactatttattacttttagatttagcaattaattatttaccattagattgatacatcattcatatatatgaatcgtaaatagttaaacatcaaatttaaaatttaaaagtaacaaataattaaatgccccgcacaacacccgggcgggtggtggttcagacttcagagaggcgagtgcaccagaggcattgaagtaaatcgcaatccttagttggatgctagttggattggtttggatcgacatgggctggaggttttcagactttcactttgggccaactgggaagatgtccatttgttccgttggctggcctgagccctgagccttccaaggatttcttactccctccgtttgatctttttaattaaacttatttgaatttaataaattttataaaaatatcataatattttaaatataaaaaaatgtgttattaaaatatattcaatgctaaatttaatgaaattaatttagtgttttagatgctaaatttttctataaatttggtcaaccttaaaaaggtttgacttgaaaaaaaagttaaaatgacttgaaatttgaaacggagagaccagtttgttccttaccatttcccactgcagtttatctccagtaccatatctctttcccctcaaaacagggcaaaatatcatctctctccgaattacgttttttccgatgggtatcatcaaaaacagttcgatgacggatttgatgtagcccgtggaatctggagttctggacaagaaaaataatttcagaccaccgaacgatgatttgtttttaataaaaatgaagatcgaagcatcctcggtatctaccgtggaaaaataaacgaatcaataaagataatttatgatatatctgtagtcttaacggttaaaaagtaggaaaaagtacgaattatccaaccgaattatcgcggtcgtccgaattatcccaaaaccataaaaccggacattcttcacccccaactatgtaaattggacaaattaccccctcgacccaatccgcggtagttttggtccacatggcgtacgcgtggcagtccagtcagcactctatttataaaaaaaaatgtgggacccacccgtcatctcctcatcctctcttcatctctcttctctctctctcactcttcctctctctgtcaaacgggtcggcggcggcgtgcgggggaggacgcggcggcagcgggcggtaccgaccagggggggtgaggaggatggagcgcacggcggcggcagtggcgggtgacgcggaggcggcggcagcagcgatggggaatgaggaggatgacgacgacgaggatggcgacggaggagtggaggacgacggcgaggacgttggctgcggtggccatggcggagaggcggagcgcggggaggacgcggctgtggtgggcggtgctgaggaggtggcggagcgccggggtgcgcccgagctttgtcaccgcccccgctgtgcccgctgtcccgacggctccacagagagagagagagagagagggaggggggaagctgcgccgagcggccgcctccttatcccccgcccctggtgctctgctacctcctcggcgccgcccccgccgccgcgtcctccccgcgctccacctctccgccatgaccgccgcagccagcgtcctcgtcctcgtcctccactccgccatcgccatccttgtcgtcctcctcctcatcccccgccaccgtgcacgccatcctcgtcgtagtcctcctcatctcctctcgtcggcgccgcccgccgccgccgcgtcctccccggcgctccgccactgcccgcacgccgctaccgcgtcctcccccgcacgccaccgccaacccgtttgagagagagaggaagagtgagagagagagaagagagaggatgaggagatgataggtgggtcccacattttttttatataaatagagtgctgactggactgccacgcgtacgccacgtggaccaaaaccaccgcggattgggtcgaggggggtaatttgtccggtttgcatagttgggagtgaagaatgcccggttttgtggttctggggtaattcgaacgaccacgatagttcgggagggtaattcgtactttttccttataaaatatggttgaaaaattgactttgataaaaaaagagagactaaattaagttttaaaatttagattttcaatgcagttgatgagcaaataaacaggaaggacatgtttgcacaagtgatgcaaaatttatctcctcgatgacttcacgtgtcctatcggagagatttgataatttaacacttcttaaaatggctttcgattatttgatatcttggcccactttcattcactcagatggtcccacatatcatcctcacaggtttcaatgaaaataactggaaaaaaatgtgttaaattatcaatttttttgtcctatcgatgccggtcggacacaataatcgtccaacgtgcatggtgaggcaaatcgccactcccggtctacaaaagtatcatcctagctactactacaccatgcaactggccgcgcaatttgccaagtcgacctcctgctttggatgcttacatggtcacatataatctctatcctttctctgttccttgtcctagttgggtctttcgcaaaccagtacatgcggcgagcaattaaagtggccgacagtgtaagcacacaatcatggcgccaaaccctcgataccaattcgccggatggcgagttgttctacctcattagtcattagttttccttgtcactcaaccccctcatgtcctgcacaaacctcgatttcaattcgctgtttactgcttcttccacagtcgatgcgacttccatgacaatttaaccacgcaaactgcacaggagtatttcaatagctgggccaatcttttttgtaagcagagtaagacaaacttgaaactagtgctaattgtccaagcttgctggtaactactgatgcgtagtgctcaagccactaatttagctgacaaccagcaaaggagcttgtgacactgacatgcggcaatgtttctctgcgtatgtcgagaagaaagacttgtagatggagtatgatttgtgaaccacttgcagctcaagtgtgcgctacatgacctacatcacaatgcaactcggctcaagtttacgtggtacatttgcaagatggagtaggccaaggaaaggcatcgccggacagggggctgcctccgatttttcttggctagattttgaatggagacacaggcacacagctctcgtttgaaatgtatgcgcgcgcgcgcggcagcaagttggcttcgctgcaggattcctccagattgagacttggaaatgtgggatgattgtctgtttacggcacaagttgttaatttgtttattttagtccctgttaatttgtccatttagcacgcgtgtcttttacaagttttatgtgcttttgacgtatttcattttagttgtgtgttattgaattatattccacctgtttaaaaatatttgatattcagaaaaatattgggttaaacttttaaattccgaccatcaaccataaatgcgtagtttaaaaacaaaagaaatgataaatgcagttttgtcttgaaaagtatactttcataatatcaataatcttgttagattttatatacttattttaatataaaactgatcgtgaaaattttaaaagtttaaccgaatcttgttatcgtaaacataaaatatttagggtgtagctatatttatggcgtcatatttttcatcaaaaaatagtcggcatgtatttacattgtaagtccctaaattacatatgtaattttagtgtatttacaatgtaagtctcaaaattacatatgtaagtactaaaattacatactaattacatatgtaagtggggtgtaaatgaggtgtaactactgtgtaagtggctgaaaaaaaatcgactgtagcatatggcgccatatttctagcaactccgaatatttatgattggagggagtctatattgcagacctttctccaccttaaatcattttaggcctacgagattcgatctaatccacaattaacctgcaggagtttgcagtattccatcccactggtcctacatatatatatccttttccaattttcttaattagaattgcatctatatatgagctgagaaagaaataccttaattagaaatttagaatataatatcgaataaccttcgagtcgcagtgaatcaaatcataattatgctcaagagcgatagaaaacaatggctatggggccaggataagcagttgacaacttggcagttggcacacgaaatttcatatgcaaagaaaggagcaacacttgtagtaccaagttgcatcaatgttaaaatgcacgctgaaagaactcgtagagaaaaaaaagaaataaaataataagaaccgtatagcaaacaacgaatctggacatacctttgtctagattcattgtactaggagaatgtaaccctacatcccttcctagattacggagggaataagtaattttctcatcatttgatattgttggcttattagatgcaaaatttaaaatttgaaactaaattcggagttaatatttgggtttatcttcgtacttgcataatataaaagttttacctttaaattatttttattattccatttatatttctacgatttattgtgttcttttaaaaaaaatgggggcatggcctagtttggtgcctctaaagaataaggattgagataagaagcttatcaaatattgccatcaagcctatgtaagcgtacctttttttaaggggcaattgcaaatttaccactactttgaatcgttattgcaagattgccactagaaaattacaaaaataccactagaactgtcattcaagtggtatccttgcaatattaaaaaaaccgatggcaaatttgcaaatgcccctttttttaacggtgagttgcttaccgtaggaagaataagatcaggtgatactctagtagttttgatacgacgtgctaaagagtatcactacttaaacagagcccggccaaaacaacgggtcatgcccccccccccccaaggcatgtggcgaatgagtcggcaggttatctctttgcccactgtacacgaagaatctaaagtctaattgcgccctaggttatcataccaacagctggaccattgagatccaaatcaaagcgttcaagaatggtggaaatattggccaacaaatcctattggtcgtgtggaaaatctggaaggaaagaaaccggtcttcgagcacaggagaccatgacccctagactcatggtgaaaataaagaagcaagcaagaacatgggtcttggcaggtgcaaaacggctacgagagattttaccaaacacttaggtccagtacagctctatacagtttttcctttccatctctagaggttgtatttttctaccactatatgtctatattcaatgaaatagcaaaatctcgtactaattccgttaaaaaaaaagaagcgtccggcgagataactacttgaaaagctactctcatcacatcaaaattatttaaagttcgtgcacatgtagtcaattaatgagactatatattaactgggacgtagcataatgttatgcctcttgttgactaaaaatgttcgggtataaatgggatcgataattgatatattttataggctaaattacgtcagagagtttataaccatcaaacggcttgccgagtcactttgtaagtaggtgataataggatgtcactacaaacgatttaaaatgagaccctttaacagaccgtccaaaatgaaacatgaccaatatagtcagctatcaaaagtggcttaaatacaaaccatctttgctaaggtgctctgaaatttgataactcatgagagtttttactgcccttaaagtgatacccccagatacttgatactggcaggtaccatttgaaatcaaaccactaaatcaacaaggtcatgatcggaaataatttttccatgggaaacgctccaccaggcccacatgtcaggaatgacatgctcatgcctctctctctctctctctcccattgcttgtgtctctcgcgcgaccacgaccgcatctcggtcttttgaccatcgtcacgttctcatccaactcctttgacaacgcgtgagtgagttgccttccccaacaaggcctgaccagcaactcacctcatcgaattctagcttgcctcctcctagtttcgatgatggcgcatatgcgccgcctcggcctcccataacctgccttcgagagttgcttgcttcgtccccgacaccggtatactagtactattaggtaggagggaggaggacagtgatcattgagccaacacccttagccggcccattaccatcaccactgcccccggagggcaccactgagttggaggatcggaggcctccttaccattgccctcggccaaatataatggactagagacgctggtgagaggggagggtgtgagaaagggcaagtgatggtggggaaggaggagaaagaggagccgttgaggtgagagcagaatgacaattgatgatccgtcgaggaaggatgaacacgatgccttggggaattacataaatggaaaaaagacgaccattttacttttataatttacatggtgttttgaggcttggtgtggtgggatgagtgccggtgttggtaagtagcaaagatcctcagccctccgatgatgatcgatgagtggctatgatttggtacctctttccggcagtaccaaagatcctcagccatccgatgagatgatcaattagtggctacgatttgatacctccctcccccgaacaagggtaagaactacgaactctcttactacgggtactatttcctccgtttcaggtgataagatgttttggctttgatcaaagccaaactattttaagtttgaccaagtttataaaaaatatagtaatattttcgatcaaaggtaaatttattataaaaatatatttaattattaatttaataaaactaatttggtaatgtaaatattattatatttgtctataaacttagtcaaacttgaagcagtttgactttgaccaaagttaaaacatcgtacaacctgagacggagggagtatcacacaagatttatactatactccctatatataactcaaaccatcaacgatgatgatacaccataaactatcctaattgtcaattattgtcattaattagacgaatttaggtacaaatttaatagatgcgtcaaagatcaaacataaataattgtgtcacccatagaatgtacttatgtacgtactgatcagaatcatttcgatgaaaatactccgaagacaaataaagctagcttcttactttgcaatacgacagtatatataaattgctcagcctgtggcagctggctagctagtcgtctcgaaatctcagtgaaaaaaaaatgaacatgattatgagcaggttaatcttgacgtacggtacacattacaccgtacttaatttgtcaaaacaagaaattaaaccagtctaaatcaaaactaattaagctagcactatctaattaattaccctacatagataagtatgaaaaataaagagcccggccggcggctggctcgccaggcaggcatatgcatgcatcatgcatgatcgatcgatccgttggcgcgcggcgcttccggcgcgagccgctcgaccgttcgcgcaagcgactggaggttgcagcgcacgatcgtgtccacgaacacgcgcgtctcctcccaggtgttccccggcggcacgtccaccacgtacgactcgaccaccacggccatcgccggcgccgccgcctcgtggacggtggtcaccgagcggtagttggcgaggcggtgctcgccgccgacgatccggaagctgagcacgcggcggtcgtcgtccaggacctcgagccgctcgcggctgctcgtggccggcagcccggacacgacgcgcacctcccgcaccgacccgacctcgccgccgtcgccgtccacgaggcggcagctcttgatgaacttcttgtacgcctgcggccggtcgaacctccgcaccaccgaccacaccgcgtccgccggcgccgcgatcgcctgcaccacggtggagaagcactgccccgcgcccaccgcgtgctcgtggtaccgcgccacctcgcacggcaccgccgggcacgccttaccgccgccggctccggagccgatcggccggctgagctgcggcggtggcgaaggacgtacggcggcgtacggcattgtatcaagcgctcgtcgttgccttctttttcctctgtaaagtaagaatgagacagacaggggtgggtcaggattaacgacgaaagttctcgtccctgagattttatatgcgtcatttgtgaggcaagaggtggatggttgcatgttaaataggtgtgcttgctttcgttactgtggtggttagttgagcaagttgatgcgctccttcaggggttactgacgagggtaatcaggggacgatagagttttgacttttttgaggtttgtttctaatggagtagtagtaaaaagggctggaagtaactagtttgaacaagtcattaggtagaaaaagcgaagattaaactggctatagtggtttccctcttggtcttactagagtaggtgataaaatagtaaccttgttgttacggatagacctatctataaatagcaacttgcagaatctttcgtctatgtgaacctaattaatatgacgtcaaaatagattaatgcaaagtttctttagcatgtggtacatggaccggagaattagtactaaaccaattactccttagccacttgccagtacaaaatggactagcaacctgcgcgtcacgaacggaagaatccatggaatccttgtctacttccctagtacgtctttctagaagtgacattctgagtagtatatagatagaacctaattcaaagcctaatgttatgttctcccctgttgtttaatcagctaagaaatccatactccatatgcctctgtgcccattgggttcaactaactcatcattgtccaatagaaaaagagatggtgataaattatcaagtgtgggaaaaattgaaaataaaatccttgttagctgactcatctaacaagtgtgctgtgtgcaagaggtgcaacttgtgctccacttggtactgacgtgctgtgatggattgggaatctgtgatctcatcttttttgaatggcctgggctccactaatagcccacagaggcacagagaggtgatagccttgattaggccagtgccgtggcgcgactggatagagaagcccaagccaacccggcacgcaaaaggctcgcaaaactcggcccaactcgaggaaagtggcctcgttgatgctcctcggcataatcagccaagaggggttgctagttggcgcgtgccagctgctcccgacccaaggcgcatcaacccttttttttcgcgatttgttttttctttttttttgcgatttttttcggtttttttttcgtttttttctgataactttttaaaatctttagcacacttattttttaaaaaatgttttgagttgaaagtttttaaatcttaacttgaaaatttttaaatctgatttgaaagtattcaaatctcgagttgaaatttttcgaatctgagttgaaagttttcaaatctcgagttgaaagttttcgaatcggagtcgaaagttttcaattctcgagttgaaagtttttaaatctgagtcgaaagttttcatatttttt

SEQ ID NO: 14154 - DNA, 1388 bp, Oryza sativa
ccattccacgttcgagagcaaactgtatctgagcttcatgctcatctttgggtgcaacagacatagtaatgacattcctgtcagcaagtatccaccaaagctggcaacaccgcatccaacatccagaacagttcttgtatgggtcccccattcaatgtttggcatgatctattaaatcaacaaggctggaagtaaacaattataacaagggataacatcatatcggatactttgaagcaatatattttaactttgcatgattatcctaggaatatatgtccatgtttgcttttgaaccaccaggatccatattaattttaggaatatgccacttaaacactgaacttaggctgtgaagttgtttcacagacaagcataaatttattgtcttaatattatgaaacttatctacgacttaacaacttctaaagtatatacctgttgaataaatcgaatgtatttagtcacaccagctttaaattgagttccacctccagggaaaacaaaataattgccagacttcctaacccagttctggtccttcttgtattccactaactttggatgagggacattattgtaccaaatctgaaatttgcagaggaaatatgtcatcacaagatatagccacaattggcttttataaaacagaattctagttgatgaacatcttgtggacgatgccacaattggcttttataaaacagaattctagttgatgaacatcttgtggacgatagttgcacagataaaatgcacgggtctttctgatttgacaaaaaaaaaatcctactacctagtggatatgcacaattctcaacctggcaacatacattagacggggacgttgaagccacgtccctaagaccctaacagtgttctccattatggtttccaggttcatttgtacatataagttcataacagtagctagtttagtaacaaaatactgaagaaactgcaatgtttgctttgtttacttggatgcttaaacatgctagtttgggttgagtatcaccgatcacggcacagccaaaccacacggcacacaacagactctttgtcaggtactcctatgggacaagatttagcaatatcaaattaccattactaccatttcaccattgtggaatgaacaaggtaaaaccgcttcctcgcttaccgaagaaggcaagcagtcatgctcaccatgtcacggctgcgcggccacggcaagggtgaccggtaccccgtgggcagcggcacgaggcacctcggcctcggcgccgtcgggcagtggcgctcccggtgctccatgtgacgcagcgacttcaacgccttcaccgccttcacgttgtccaggcacggtatgtagtccgcggccaccactcccttccccacctcgcaca

SEQ ID NO: 14155 - DNA, 1223 bp, Oryza sativa
ttcctgcagcctcacttcttccaagtatggcgagaaacacatgctgtcacaaggtagttcatcacatacctttcattggatgcactccaccatctagtggacaagactcacttggatcacgtcgtactaggttttcaagagccattaagatggccttaattgacaatccgaggcattcacgaagagcagctacttcaggattaaaagcatcatcaagaacaggaagtatatcacgtacagcatcatacatatcaactatgcggaatagacattctggattttttccagcagcggcaataaaatttccgaaggataggagttggagaaatggatgacacgcagtgacaaaagcaacgtcactgtaggatgtgaaaccctcaaaaatgctatcacacaggtgtctttcacttgggatcaagatgtgaaacacaacacgaattgcagggatccagcacatgatttgaatctcaagctcctcccacgatgctgacttgaacatctctgccatgtgagcatgaaccccaaggcgtgcaatgctctcatcaatgaagttgaggcgtgaagaagcataggtctcagcacatgaatcaccaaaaccagcggcaaccatcctctttgcaattcggtttgcctcaaagattacgccctcaggtaaagcatcaacaatgatgtcgaagttgctaactggctgggctacaagggtgtgcctatcatcatcatcatcatggcttttcctggtgttggggtagctgcagttggtatcgaagccagatgcatcaatcaggtgctgcaactcttctccaagcctcaaggaacaacgctctagaagatggtcaaaactctcaaggaggatatggtccgctgacatgctttcaaggctgtggatggtggaagttagttcatccacagcttctaagaaggcatcagcatcatcagaactagaccagaggggccgattcaagcagagaaattgggaaatcaggtcgttaagtgcctgcagagtatcctccatgccagccatcaccctttcttagattaaattccttcagatctgcaactttggatatatgaacttcttgagtcttcagtgcaagccatggaagaggatggtgcagtccagtccaaagatctgcagctgacaaaattgactaggatgaatgaaattgcgaacatacctcagtgaagacgaattttgaaattggtgatgcaagggctgcaggaat

SEQ ID NO: 14156 - DNA, 15297 bp, Oryza sativa
tcctgcagcccagtcggtggcgcagccgcagtcgtactcgatgacggccgtggtggtggtgttgtcaaaggccacgccctgcgcggagtcgtaggcgcgcgcggcgaggtagtaccgggtgggcgcctggtccatggtgacgaggacgtcggtggtctggcccggcgcgatcatgagcaccgaggtggtgaacggcttggtgtaggacgcgtcgacgccgaccacggtcatcttgtgctgcgcgatcgagacgaacagctcctggttgagtgccgcgttgatgaaccgcagcagcgccgtctcgccgggcttcaccgggacagccgtggtctctgcatgcatgttatcatgtctctgtaaatttgccacgcactgacgcacacacactggctggtagaacacgcatactagagtgagtgattttctaccttccttggagcagttgtacagatcaccaggctgaccgttgatggtgtacgcgtcggagatgttcggcgcggcgccggtcctctgagcctccctgatgacttggatcgggtccgcgtcccaccattcccctgtccatcgtgccaagtgccaacattttcagtgtcagttcagacgactgatctgatagttaatatgcagatctgtgtacaaaagtaggaaggatcaagactgaccgagaataagggggacttctcgcgcgggcttctcgaaggggtaggtcttgttctccctggggcggatgatgagcgcgccgtagacggtggccctgagccaggagctgtgcgcgtgccaccacagcgtgccctcctgcccctcgatggtgaaccggtacttgtagctgccgcccggcttgatcgggcactgtgtcacgaactccggcccgtccgcccaccccgtcctgaactgccggatgccgtgcctgcacgcgcgcgttgatcaccatgtgttagctagctagatctcgaccggcggcgcagaaaacaacaatcgtcgccgttgacgaccaggagcggaagtcgttagctgtttgattggtgtacgtagttgggtcgacgacacgtaccaatggatggtgacgttgtactgcgcgtggttgacgacgttgatcaccacggtgtcgccctcccggacctccagcgtcggccccggcagctgcccgttcaccgtgatcacgttgtgtgtcttgcacagcctcttcaccggcgtctcttgaaccttcaataatccatacacaaaaagcagtaccagtacattaattacacgtacagaaaacggtgcatcgagatatacaggcaataatagtgtgctcgtagctagtaagatgacacaagaggaaaatatatggcacgtacaatgaattcatgatggtgcacttcggcgccggcgagcagcgcgagcacgctgcacgagaggaggaagagcagccgggacgacgaggacgacgccatgccggctaagcgcaaacgttgcggcgcgtgtgctggcgtcggctcaccgatcgaacgggtgacacagtagcttagctatagctcttgccctgaaggtttctgtgtggcgatgagaaacttcccacagtgatggcgcggtatatatagcgtttcaaaaaggacatggttctacgatcgatttctcgttgtgtttcgtcatgcatgttgcttctctggttggttggttaggttttgattcttgcgtggtagagggaaaactttcgcaaacacatgctcattcacgcatgcatgcctcgaggtcgagttcgtgtcaccaaggttcaactatgcagatagtttggtgcacccactggcctgcccaggccagcagcggctgcccccgttggcgccctggtttcacagaacaaagcttaagcactttcttcgcacgcgccaacgcgtcaagttgtgtttggacaatggttctgagatttttgtgtgctgtgtcatctgattaggttgttactttacttagcttttgcttcgagtttgaaagacagacattccatttcgtaccgctaccaatccgttaatccgtcaattgaatgggacaaagtcgttgcggttaatccatttttaccccatggtttgagaagcaaaactatctcatgcaaacgataattaagggtggattggtgttttgcagtctagctactgatttgctttgtgatttagttctattcatccttttgaaccttgtctgatttcagacgaaacctatagctagagactgtttgttgaccatctctgtcgtatcagttagtctgccgttatcaatagctgagtagggagtaatacttgtgccttttcatgtcaattgcgtctttgctaaaacttgtgggcaaagcgaacttagtttggaattataatgattaggagttaactgtcacattttatattattaattcctcactgctcagctgtgagccttttgtgtttccactgctgaatctgattggagtcatattgtattgaccttagtactggggagttggaactggtagctagcctataatatcaagtgtcaatatttgttccaacaatcctccaaatcaatcttctgataataacacattggcaccaaatctgattgcagcccattttctagacggcgggtgtgcatgcatggcttgcaaatgagcttggaagctaagacttaacactttacatgcatccatcaatcgtcgtaaaacgaatttccatttcttcatatgaactgctcgtaaaacgaatttccatttcttcatatgaactgctccaacatattggcatcgattccagatataaatcgcattagcgtcacctaaacaatgaagttcttgctgatgcaatattgaattgagggggaaatgataatgaaatgtctcttgtttctgcagttgacatcaacaccttgttctgaaagtctgaacaatgacactagaaaagcaccaagctccaactttagaaaaacgtttgcatttttgccgtcgtggacggaccaaggggggtagtaggttgttaacttggcgcgccggcgtgttgccgtcgtccacgacgaccagtcgaccaccctgcaaagcgtcagcgtatctatcttggtgagtcatcttcttctctgagttaggagggggcaggtgagaacaacaaaaatgttcaagcaaagcaaccaaactccgatccactctcaaagcctccaaggctccaaccaatctgagaagaatttcggacatgccgtttgacttcaatcattagtgagatcatcacttgatgatagtggcgttgtctctggccatgccagggggatttcttttttgttttgacagagcagctttggactttgcaggttggagagaaaaatgccatggctgaattctgcgccttattataatcggggttggatgaggcgtccgcgtcctcttgtcatccgggtacgactgaatatacaatgtgattagtattttggatcaatgacgaggtggatgcagtgacaaagcagttgttgatgagaagtactactacattatctggaaactctgcaacatgtagttagtcaaaaaaaaaaaaactctgcaacatgttatgcagcattttcgatcgctagttttgtaacaaaatttaatcaatggctgcagcaaaatattcacatcttccgtagtactcccccgttacacaatataagtcattctagcatttctcacatttatattgatgttaatgaatcaagatagatatatatgtttagattcattaacatcaatatgaatgtgaaaaatgttagaatgacttatattgtgaaacggaagaagtacctatcctctgtccgcagggtatgaccctgaacttctttagttatgatcgttttgctatgtggattgatcgtttgctgtgttcgttggagctgggaacatattctctccacacagaaaatggagcgacgcattttcttataattaattaagtatttgctattttttttaaaaaaatgattaatataattttttaaagcaacttcgcatataaatttcttttaaaaaatacaccgcttagcggtttgaaaagtgttgaattcagcctaaattgttcagaaattttcgagcaatcaaaactgcagttcagcctcagtaaagcgcaaaaatggccatctttcgtagtgaaggtctgaagcagaacaaatgcttgcctgggccccatctggcattgagtgtacgatacgaaaatgcgtggcgttgctcgcggcgtaccagacgctcgccttccccggctttgactcacagactccacgtctccaccccgaatctcacttcccgtctcgcccccgcccccaatcctcaccgccgccgcccgggccagccatggtgggcgccgacgccgagtcctcggcggtggtcgacgccggcgagggccacggagacctggccctcgattcctcctccgctgcctccaccgaccctctgctccacccgccgccgtccccttcctccaccccctcctctcccaccgcgatcgccgaccacgacgcgttcatcgaggaagacggcgaggatgactccgcgccccacgtcccatccgcttccgacgaggcggccccggagttcgtccagatcaccgtctccgagcctaagaagcacgcggagccggccgcgggggcagcgggggtcattcctggctccgggagctacttctcctacctcatcaccaccagggcggccgacggcggcctgttccgcgtgaggcggcgcttccgcgacgtcgtcgccctcgcggaccgcctcgcggcggcctaccgggggctcttcgtcccggcgcgaccagacaagagcatcgtcgaggggcaggtcatgcagcggcatgagttcgtgaaccagcgctgcgccgcgctccagcgctacctcggccgccttgccgcgcaccccaccatcggccgcagcgccgaactccatgacttcctgactgagccaagcggcattcccacctccgcgggcgagtcacccagatcggatcccgcgttgagtgctgccatgtccgcggccgccgttaccgctccaacggcgcctgcaaagcctgggagagatatttttgggatgtttaaggacctgaagcagacggtggcgaatggattggtggcagtgaggccgcctccagtggaggaggaaactgatgcaaagttcgtcatgcacaaggccaagctggagtacttcgagcagcatctcacgacggcatctcagcaggtactgtgcttgttttgtactggtttagctggatgctagagcacatacaaacacagagtttacccttctgcataattagtacattatcatcgctgatagacaggataaatgaagcaagtgacatagagagttcctcatgcatgcttataatttgcgagttgagcaacaaatagatatgttgtggcacaaattttcagtgatgtgaataagcacagcaactgatcttctcgtttgtgcggtttgtaggtagaggctcttcttaaagcttatgatgatcttaaagcaactacaggtcaactgggaatgacattcattaagctggcaaagtttgaaaaggagcaggatacatgtaattctcagagaaaaagagctgttgatatgagcaatttcgcaaatgctgttatcaacatgagcagatcacagacaaaactaaatgctaaaattgaaatacatctggtatgttggaaattgtaatagaaagaatgtttgcttcttatgatttcttttcatgaatcataatattatttttgctttgacagggcactatctatgaatacttggagacaatgacttctgttcgtaatgcatttactgatcgcgcaaatgctttgcttcgtgtgcaaagtctgtcaggagatttatttctcttgcatactcaggcagcaaaacttgagtccgtatcatccagaggaatgggcaggaaagattaagataccaaaagattgaagaactgaaagaaacaataagaaaaacagaagatgcaaaaggcaatgcacgccaggaatatgagcttatcaaggtaattcacttgaacttgtggattaaattgagtgtacaatttgtgcattgtacttatcattcttcccagttaaatgttgacttattgttcataactgttgtatatttaactgcattatgcaaggttgtcactgtataagttcagatgacaaaatcaactacagtacggtttgttgtatttctttgttttggtccttttggaagagaaatacaatcaattgtcatgcagatcgatgcataacctgactgtagtatgttcagtttacgtttgtaacagagtgctgtttttttaacacagtaccttgcaatacttaaatggcttgaaacatcacacatactctacatgtgcatcacttgttcattctaattttagctcattagggaacataatgtttctaaagaggtcacaatgaatttagaactgtgctgtcaacactagcagcaggggtacgattgtttcgaaatgaacaagagtcaagagtgttggttccaaaatggtcatgttagaggctttgagctgtggtgaatgcattcagagtgcatccattgtttctgatgtcaaatgagttgctacgtacgtactgatctttaagttttcacgatgtaactttctgcaatttagaagatgatgatatgatatctgacttggttgtgctatgctgtgtactgggacctggtttcttctggaaaacctgtatgaggtttattttccaggtggaacctgtatgtcatgacaatactggagtatggttgagcctgtcattcaactcattaactatatatatcggggtagtttccttttgggttattgtcaaaatattggagtttactttttaacattttcttataatgcaggaaaacaacatgaatgagatcataaggtttaacaaagaaaaacgccatggtttggttgagatgctgaaaggctttgtaagaaatcaggtagaatcactaaaattcaattgcaatgttattcttttgtctgctgttgtggatcctttcaatctattaatgataagcaaatgataaatatgcacttacttctgtattccaacaaaattccaagagtattagctagtgctgagatggaatgagagttactgtgatcatatggtgtatgtagtatctggtttaaattaaattcagtggatgatatctagttgcttcctttctgtcaatctgcaaagctaacactttgaaatctgttgtggcaactggtaaccatgatggtatgaaatttacctcgcacaactttgaagtctgcatctctatccatttaagattggttgtttcatttcatcgcagtctcagctttggttgcatttgtcaatttaaacctattcttctttttgacttcgctggtgatcctattcctagagcaacaactagacatttcccaaactatgcacacctagtgacctcagatgatggagaggaggggtcaaattggcattgttgatattacagcataatttgttccatagtggtcactatgcttaaaaatgatttagtgggctactgtgtttttttctctagaagagagtttgcaatttcattgccatcaggttcaccgttcatgttctctctctttttctttttttctttttcaaaatttccttctatactattgacatcaatagcacatttcatattttcagtaaatgcagtaaccacaaagctattaaaacttgcatcattgttcttctgcgatgcaggtttcatactcagagcatatttctagtatatggacaaaggtagcagaagaaaccacaggatatacaggcaagggcagctgaagtaggatgtaaatatgcatgtgaattttagccttttatctgcagatcaacatcagttacagaattcgaaatcgtcttatagctcaacacagtggtatagagtatagactataaacagagatgtcacacttccctccatccaaagggcgtcggatctgtgatttttctggagatggtatctccggctgtttaggcgtatagcagaattttctaggaaagagaatcaaatgatcagcaaaccaacacaactgtttttttttcccagtcctttttttttccaccctgggctttacagtaatgtaatgttgagtttctgtacacgaaactagattagctggaattttctggttcctgagagaaccacatacatgaagatttctttttggtctccgaacatatttgtacgcatgcacttacctgccagctactccagttgccatatccacttctttttgtttcctctacgtaggagagtactggatggtttttgtgatgtgcaacggtttggctcgatattatgctgggcattcaccaggcagaacgagccacgtttctgcagaaggtgagccacccattccagcaggctgctgactgggcatgctcgcgacgactcagcctgtggatgtgcggctcgtgatcgtggcgatgacctgacgactccttttgggcccatagccatcggcatcagctgcttatccccctacacgtaagtatcattttgtcagtttctaccggtggttccgaacctgtaattcgatgaaagatttcttcccagccttccttgtgtcattattttttttgaaggaaaggcaaaaagcattgccttgtatatattaatagagcaggagaaaattatagcgtggtatatacagggttagacgaaaaaagaataacccgtaaaagaagaggcaaaaagcagggattaggtgatatcttccaagattccaaactcttgtaagattgcagcccctgctttgacgcatgctctgccttcctccttgatttttgctaaaattgaggacggcgcagacgcattgttgcggaagattcttatgttttgttcgcaccagatttcccacgagattagaatcaccagagtcctgagaggcttgcgtggggtgcttggggactccgctacgagagtccaccattgctcgaccgagtgacaattttcccaattgtccatttggaggtcagtcccggtccatctttgaatttccgtccatatcctctttgtgagtctgcatttggctaggagatgtaaggccgattcatcgacggtgtagcagagtgggcaagtcttttggttttgccatcctcttttttccagtctatccgccgtccatactctattttgagtgaccagccaggagaagaatttgcatttcggaggtgcccatgccttccaaattgactgatagaagatggatttcgcagccccgaggaactgcagccgataggccgattttgcggagtactgtccatttgctgtgagattccaacggatgctaccatggctttcgttgagcggccgcatggttctgatcattatccaaaggtggacatattgctggagttgattcgcctcagcgatacgggagatgtcaatatctcggatccagttgttttccgaaatggcatcttgcacggttctgttttttcttttggagaccatgaaaatctctagggcgatcagttgcggcgtttgattatctaaccatttcgagctccaaaagcgcgcagtttgccgtctcccaccgttattgttgttgcggccgcgaagaggtctttatctagctgattgcatgggagcacagttcccacccaaggtttgtctggcgccacccattcgttccaaagccatctaagtctgagggctgatgcgaagcgttgcaggtccagaacacccaggccaccccaatctttaggcctgcagactcttttccagttgactttgcatttttcccctgagatattttcgcctcccgcccataggaattttttccttattttgtccaactcctctaaggtcccgtctggcagttttagagatgttaggtggtagatgggttgtgccgtgaggactgattttgtcagacagattctagcggcggtcgacatcattttcccttgccacggggcgagacgcgatcgacatttgtccctcaggggctggatgtggattttcttgagtcttccaaccacgagaggtagaccaaggtacttcattgggaagtttgtgagtcccgctgggaagatcctagttatgctggagagatcaatgttatcacaccggattggggcaatttggcttttgctcatgtttgttcagaggtcggtcacatgcccaaagtcacttaagatgttggtgagagctgtcatatcttggacacttgggttcacgaatatggccgcatcatccgcatagagggaggttctgaacctgggggctcttcctcgaaggggggatagatgccctagctccgttgctttctctagaaggtggtgaagtgggtcaattgctagaatgaagagcagcggtgaaagggggtcgccctgtctgagacctcttccgtgttttataggcgatcctgggcatccattgaggaggatctttgttgtcgaggaggctaagatgtttgagacccagttagtccatctggatgtgaagcctttcctctgtataaggtcgattaggtaatcccatctaaccaaatcgaaagctttggttatgtctagtttcagcaggagggttggcgttcttgtctgatggaattttctcgtcaggtttctcacatacataaagttgtcgtgtatgtatcttttctttatgaaggcgctctgggtgtggctgatcagggtccccatgtggggttgcaaacgcaaggtgagcacttttgaaattagctttcctattccatgtatgagactgattggcctgtagtctccagcgcattttgccccttcttttttttggtatgagcaccacatttgccgaattgaggatcgggaggttgttgcttcgcagctggtcaaaggaatggatgaccgccatgatgtctccttttatcgtttcccaacaagctttgtagaaggctccggtgaagccgtccgagcctggcgctttatcgctaggggactgctttagcgcagcatggacttcctcttcagtaatgggaccactgattgcagagcagttgaaagtcggtagctgcaggacgtcccagtcgagatcttttgaacgtgggcctgggcgcgccatgaaggtctggaagtgctcttttagagcggcaactttttcgttgtgttttaatttccacatgtttcccactcgtagcctctggatgaaattttttctcttccttgcattcatcttcaaatggaagaattttgtgtttgcatccccctctctgagattggtgattcgtgctgcctgccttctgcgagctctttcaacgatcgctaggcctatcaccctatctttgaggtttcttcttagcgcgagttcagcttggctgagttgccttgactcttgagctatatcgaattggagaataatctcgagcgccatatggaggtgcagtctcccgtgcgatattagtttcttactccacgctcttagtcttattgccgtatttcctagcttgtggaagagtatgtgatgtgcttcatggtgtggttggggggctgaccaggcttctgtcaccacctcctggaaacctgggagctggatccagaagttttcgaagcggaaagttttcacgcgtggggcctctccttgttcagttagcatcagcgggcaatggtctgagagcgaggtggagagggcatgcagtaggtgcttctcaaaggttgtgtcccaactagcgttgcaaaagaaacgatttagtttgacaagggtcaggctgtcttgctcgttactccaggtgtaacgcctgttttgaagtgcaatctccttgagctcgcaagcgttgagagtttctttgaaaatgcgcatttgtctgcggttgaggtttgcgttatttttgtctgaagctttgtaaattatgtgaaagtctccgagcaccagccattttgaattgtcagatggcttgatgcctcatagttctctcaagaaggtttgctttgcactctccctggttggcccgtaaacaaccgtgatgaggaaggtagtctgacattcttttagggagactgtggccgaaagtgagtaggttctctgcacgaagtctttgatatcaacaaaatcctcattccaaaggattaggataccgccccttgttcctagtggtcctgtcgccggcttgaattgaaaagaccataagcatcccccgccaagggagtttaccagcctagcgtctatgttgctcatttttgtttcttgaagacatgtgatgtggggtttagcctcttagagcgtctctcttactgtcgctcttctagccggtctgttcaaaccacgaacgttccaggagaggatatcgatgagcggatatgtccttgtgtcattattgtgtgtacagaaactacatattgctctctacaatgacaggtacactagtttgcactgtagtagttcaaaaccgtaccacaaggggaaaatgggagcgacagataccactccatctctgccatgaaaaatcgaaaattagacccgttctccaccacgagaaattccctaaaaaatctagattttaagttcaattctctgtacaacttctgctgcatctgcagctgcatggtggtgtcaagcaagtgcagccatttctgttccactcaacctgttccttctattcttttcctgtgaaaaaattttcctgggtaatttctgggataggtttatcagaattgcaaaattgtgcaccgagacagagaggctccgcgaggggaaacgggcgtcttcgcgtctgttttactctaccccaacgaccacaagctgctccgtgctccctctctggactcgccccatttcctctcgccgccggcgcgtcggcgccgcgcctccggctgaggagaatgctgccccccgcgcccacccgaaacccgggagcctgcaggttcatacccctcctcccaccaaaaccgcttctctctcccgccgccgccgccgcctcctcccgcggtggcctctgcgtcgccgccgcatcccgccgcgatttcctcctcctagtcccctccatcgccgcggcctccaccgtgctccagtccctcccgctatccgcctccgccgcggacgatgagaagcaggccgcgtcgcccgcgccgggccctgcagcggctccggctccaacctccgcgggagagcccgaggcggaggcgctgtcgagggtgtacgacgcgacggtcatcggggagccgcaggccgtggggaaggacgcgcggcggagggtgtgggagaagctgatggccgcgcgggtggtgtacctcggcgaggccgagctcgtgcccgaccgcgacgacagggtgctcgagctcgaggtcgtgaggaagctggcggcacggtgcgccgaggccggaaggagcatctcgcttgcgctcgaagccttcccgtgcaacctccaggagcagctcaaccagttcatggacaggaggtctttgttctacacttctacagttgtacttattagtctagtttatctagctgactgactgactgactatatacaggatgggctcttgttgtgatttatctgtagctttgagtttttagagatttgagtcctaatcgtttcaaattcaagtgcagttagtacttgtcagtctgtagtttgtgttgagctctgagattacttaggctctattagattgtagcgttaaaggctctattagattgtagcgttaaactttgtggaaaccttgccacaatactagctaaaattgccttgcagcaacatcaccaaacaaatgttgtactgtaaaagttccaaccggccaccccaaatggattttctagaattgatatgtacctactacattgcaagcatgatggcggatggccatgaattaatgtctgaatgctgcttatgataatatcaagtgcacttaccttatgaaaattcattctttgctcagaattgatggcaacaacttaaggttgtacacttctcactgggcaccagagcgctggcaggagtatgaaccccttttgaactactgtcgtgataatggagtcaaacttgttgcctgtggaactccacttgaggtaatccatatgttacattgcccccaaatagtgcatgtgatcaattcagttgtattgccataacagtattttttattgatcattcttattttgtagacaagttgcaatttagtcattttatattgatattacaccattccaactggcaagttttttcttgcattttatagttagtctagtgtttttaccaactgaatatgggcctgttctacaccttttttttttggcccatgtccagaaaatgactcctattataaccccctccaccctccttttctcccatgcccaagtaaatgttctatatgcattatgctaaatatatggtttacttttcatcatttacaatatttggttgaaatacaattatatagtccattttctggctaggtgtcaagaactgtccaagcagaaggaattagaggcctttcaaaagcacaaagaaagctgtacgctcctccagctggctcaggcttcatttctggttttacatccatctcaggccgatcattgatagacaagatttcagcaattcatggctctccatttggcccaagctcgtacctatctgcacaggcaagagtagttgatgactataccatgtcccaaaaaataatgaaagaaattactaatggatatccttcagggatgcttgttgttgtaactggttcaagccatgttatatatggttcacgtggaattggagtccctgctagaatatctaaaaagatgcaaaagaagaaacaagttgtagtacttcttaatcctgagaggcaaggtattaggagagaaggtgaaatccctgtagctgatttcttgtggtactctgctgccaagccatgcagtcgaaattgctttgaccgtgctgaaattgctagagttatgaatgcggctggtaggaggcgagaagcattaccccaggtatcactcgctcttgctcaaatatctgtggtgttacataacctaataattgtaaatgctgtgcatagaggtgttaagtccaatggaaaagtatagctattggcagagagacatatatttgatgaagagtctgtaaaaacaagtgattttttcatcgaatagtcaattgaactcctttaaaagtaattagtgtaaaagatcttggtatagttaatcagtttttgtttactaatacagccttttccccctcttatctctaagaatttgagctaatggtacattctgctttaaatttatgacaggatcttcagaaaggaatagatcttggcgtggtttctcctgagatactgcaaaacttttttgaccttgagaaatatcctgttatggctgaactgatt

SEQ ID NO: 14157 - DNA, 4073 bp, Oryza sativa
ctcactggggtgtcgccgtgtcgccgtgcttaatcgccagcgttggttccagaacttaccgcgccgtcgggccggtaaatcccggcgggcggtggatgtgagccgtagcttgtcgtatggacggtcagatgaggcccgtggagatgggggcaagataaagtaaaaggcgcggtgaccacggcagacttgcggtggatggggcggtggggaaagcataaatgcggatagcggtgggttagacgagggttttaattactcactgacatgtagggtcacggggttttgagtgtcacgtcgtggcggaaaggcgccggtgggctagcgtgattgacgcggaacccgaggtggacggactatggaaatcgcacttgggctgccttcccgcaacatccgcttgggcttggcaaagtacatcgaggcataaaactacatgggctgccaaaaagggacggtccattaagggcccaagattccaaaagagttaggtctcggcccactcaggaagatattgttaatcgtggtagggtgagattcaaatcacgggttaaacaacggaaagaaaaggctgacgcgtgggtcccaagtttgccccgagtccactgtgaaacgaggttggttcatgggagagtggaggcggcacagatccacccatcgacgggcataaatttgggctaatcccgaatctattcgctcccagaacaaacgccatggcctccgccgccgcaccgacgccgcagccgttgctccccgtgaccaaccccgcggccgccggtggctccgcgccgtcctccggctcggcgctcaccgacgcgccgctcgccacgccggcgttccggctcttcgtgagtaggttctccgacacggcgcggcgctcgctcgccgaccgacggccctggacggagctggtcgaccggtcggccatctcaagccggactagctctccgaggccacctcgcggctgcgccgcaacctcgcctacttccgcgtcaactacgccgccgtggtggcgttctccctcgcggcctcgctgctggcgcaccccttctccctcctcgtcctcctcgccatcctcggcggctggtgcttcctctacgtcttccgagccgccgaccagcccgtcgttctcttcggccgcaccttcaccgaccgcgagacgctgctcggcctcgtcgtcgcgtccgtgctggccttcttcatgacctccgtggcgtcgctcatcatctccgggctgctcgtcggcggcgcgatcgttgccgtgcacggcgcattccgcgtgcctgaggacctcttccttgacgacccgagcgttggctccaatggcaacactaccagcaggctgctctccttcctcggggcgcccggatctggggtttgatgcggcgcaggatctggtaggattcttgggctcgtggaatttattttgagtacgaattggcatggatctggttcgtcggctgtagctaattggttgccgctctgcttgtgcttaattgtgagtagttatgaatatgcagatcatattttgccttctaatatgtggttcgaattatgcaaagatctgctagatttgtacttcacttgttagtttgaatctgagtggtgactggtaagaattgttagatgtcagcaactcagtatgtcttgtgctctgttctttcaagtaactgtacaccgactccttagcaagtttatggtccttcaattacttactgcgttgtttggatcattttatttactgcactatttggagcatttatctgctttattatattcactgctttatctgaatgttttggtgttgtactgcaatatttgcttttcatgtcttactacatagtattttggagaaccagtgcattgtaatacagcaaggatgtatatctgtgattcttaaactgtaggactctataggtttgttatgttgtcaataagtatggacacttgagagtatcacttatcagtttgttgtgttggttagaatgtccagaacttcaataccattttacagtgaatgccttcaatatttgagtagttatgcaaagttttaagttattccagttatgttgcatgtaggatagagaaacttacagttttcttgcattggtcaaatatgttggtaaaccttctttgatatcttattgacttgctgccagagcatcccagtaacatgtttttgctgtatatacatggcaattaatattttaactggtgttttacgatccttgagtaatgagtaggcccctgagatatgtagtggtacctttcatctgcagaattaccataaattaacactacaaagtgtgatacctctgcattacccttctaaggatcaatggtgaatcctagactgtcttatggtacgagtccaggcaagtctctcgttgatatatcactgcataactttctcataagatgctgcagattaaaagtctaacctttgaaggtgcttcatcattcttgcctgtttgaactacctttggatattggattatgataaagacatatggcagttttttttttcaatttgacttactcaacaccttgattgacttcttatgttgaatatatgtgagaatggttgactttgtaaattggaagctagaacagcaccagcgacaatgagacagatgttaacgttgactaattgtcagtactcaatagtacgaattttgcttctctatggaagttttgcattaatgttgcagtatggagttagtcacttttcgatatcacatgggtcttccagttatttactcttttccaggtaagtattggctaatgattggggttgaatattcttaggacttcctcattttcgaagatgttttctcggctattctctgagttggagtatatgtttaacggatttcctaaatttatggcgtcatattctgttgctcgtcatattctgtttaacggatttcacagtcgaatattttggccatcagttcatcagtgcacgaatctcactgaatattttgtgcacgaatatgtggggaaggaattatgggttgtgaaatatgactcctgacagaagaaagctaaggataagctttgtcaataacactagtagtaccatacagaagtgcaaaagcggacaacagaatgcgatatggaaagtttgggccgttttggtttgctaccaaaactgagccataccaatattttggttatcagaacagtaacactaagagtttggattgtgaccaaatcactggtagtgcctagacttaatttggtagcaaggcattggctggaattggtagccatccgtcgcccgccggaagcgcccagaagcaggtcacacagcccaaactagttcacaaactagttcacgcacttccgttcaaaaaaaaaggctagggcttcatcttttctctacttcaataaatacccagccactactcgtctcctcggctggccgcctcaccgctctgcttatttgtgcttattctacagcaaatagtaccaaatctattacaccacaaaaaaaattggtaacccttcattggtaccaatccaaatggaaattgacccataaaaatttggcacttcattggcactaatccaaacactcataattactgtgctatactaccaaaatcttggtagtgccaaaacttgcctaggaataagagcaagttcaatagtatagcccactactagctctaattcatctatagcaaatctaataatcaattcatacaatagttgcttactatactattaatatatggtcccacctgtcatacacacattgcgtcttggagtctgtgctgcagctggctacaaatctgtagcccgctgctcttctctctcatcgtttatttcattaaaatatgtttatagctgactactctaagccccatagtaactggtagtacttcctactccagcagaaatgaaatgatgactacttgactatcctttgacatttctttcctccttcgatggacgcatttcagtactatgttgcatatttgcaatggtgatctgagtaacacttgctacaaaaaggatttattccaaaataatgcatagaaatcacataaaaactcttaactttacagggg

SEQ ID NO: 14158 - DNA, 2321 bp, Oryza sativa
  unsure (1)..(2321): unsure at all n locations
tacttggctggtccatactgtctcacctaagagcatctttccaccagaaacctcaattctacatttgagcaatgaacgtcagtcaacctttagatcatgcttcaatgtatccaccacaatcattcatgatcttatttcaaccgtgttaataaaaaatactctaggtcaacaaaactcattgttgaaatagaacacaattatcaacaactttaacatgagagctaatttcacaatggcatttaatatcagtataaaggcaataaaggaatacataaagatttatgtttgaaccacttcatcaggaaaacaaacccaaaagaggaaaaggctaattagcttgccatgcttattatgaaagagttcttaccactctaaccatcataaaagccgggcaatataaattggctaaaatctagtggatctgaatgatataggtgcttatcacttgaatgcagtaagcatttgaaataaacaaaccatcacacttcatttgtgaaaacttaaggagcaaataagccaaaaaaggaaatatcaataacatcataaattagattgcattaccaattgataattaaacagacacctaggataatttacaaagtttaagaaacccataattttctcatctaagatgaaaagtaaaccttatggaacaatgccaccaaacacataatggcatcaccagtgttcagatatccaccatagcagcaacaatgacaccaaaatcacagctatagaagcatagtgactataatgaactaataatcacttggacactccttcaaacaggtgctggattcgtgcttcgacatcttctggggaatgcttgatgaacaagtcctgtgcagcttccgcagatgatttcaaccttgaaatcaagcccatatatgcagacttcacagaatctggnatgctgccctaacatcctcgcgcagctgctcatctgcaatcacccattctgactggatagcacatatctcttccaagtagccattaaanannngnagtttttgtagcaaggccgtgcagggagactaccaatgccaggaccacccgtctgcaacactgacatgacctttgcccaagccccacgctggtactccaaactccaacggcgcactctactcatcatctgcttcatccactatcaccaagcaaaaccccaagctcactgtcattcaccttgtgaataatgtacttcccgttgttcatcaagaatatggatgcaagtggcgggtccctatatatcttagatttggtctccaaattcttgtgaagcacatccatgatccatgcaatgtgcactgcaagtgacgaagtggggcgatcgggatcaacagcaatagctgccccgccaacagcacctaagtcaccttccatcacctcttccagtgtctgtcttgatccacacgcagcacggagatagttcatcacataccgggtgattgggtgtatgccaccaccaggaacagaaacacgggcaggatcacgtcggatgagattttccaattccatgaatatacctttgatagaggaaccaagggtgttgcaaacagcagagacctcggcacgaagtgcagcagagtagggatcagcaaagacagggtcgaggtcaggaaggaggtctcgcacggcctcatacatgtcaatgacacggaagaggcgctctggagcacgactagcagcagaaactgcgtcgccgaaggagataagctgcagcacctgggtacgaactgcagcaacaaaagcgaggtcgccataaggggcgaggccgtcaaagacacggtcgcagaggcggcgctcgctggggatcaggatgcggaacaccatcttgaaggccgggatccatcgggcaatgtcgaactcgagctcctcccacggcaaggagtgaacctcgtcgatagtgcgggcacggatgccgaggcgggcgacgctctcgtcgataaatccgcggcgtgcggccgcgtacgcctcggcacactcgcggccgaagccagcgtccaccatccgcctcgcgatctggtgcacgtcggagaccgatcccggggggagggcgtcgatgaccacgtcgaagtccgagaccggcttggcgattgggattggctcatcgccgtagccgtcgtccgcgtcgtagtcctcctcctcgctctcatcagaagcgaacccgccgggcgctggcggcgccacgtcgtcggggcgctctatgagcgcccggaattcatcctccagccgggccatacaccggctgagcagctcatcggcacggtcgagcagcccgcggttggtcccagctgcgtccagctcctgcacggtgccgatta

SEQ ID NO: 14159 - DNA, 1824 bp, Oryza sativa
tatgtattaaaagattcacaccagtcatgatataccccaatcaaacctctgttgaaaatgataggcaaggcttctggatgatcaaaaggtacaacgttcataacccacaaaggtttgtggatgagtgacgccgcaaatctggtagaagaaagaaaaccaggtaattttatctcaccatcaaacaaactatatagctagactgctcatcgttataagaaaaagaaggatccttgaaacatactgtaaacagcaattggaatcgtgtgaacagaacatctgcttttgaagattacatagaatgatagatccttaacacaacaagctactattagactacaatctgggacatttcagaaattcaagaagttcaagcctatacgtgtaaagattggctgctgaaatccactaaacaaaatgaaatgtactcttcaatagaaaagctaccatataaggaatagtgaacactagaacactgggaccaatatataaactctcaaaaccaacaaccggactaaaccaaatgaacagtctaactattcaggaaaacaaaggacagaaaatttcatgggatcaaaacaaagcattcaaacattgaaagacatggtcataacttgtgaaatatcaacaagcccattgaagaaaattaagaatcaaagttttctcaccctccaaaaccagcattcatatccatgacattgcgaacggtagaccaattaactgcaaactcattgaaatatacttctgaaacaaggtccttccagtgctttgtgtcagaatcaaatttttcttgagaaaactgagtagaagcgttgtcagatatagttgagtatttgatgttaagcctttctggccaggaaatgggccagctgtttccttcacctgaacttgacacagcaggtaacaagaggcaactatcaagtggtgcatacctaaagagggcaacaaaaaaataacattagtttatctagtacaataaaacttctacaaagcttagacaccagtagcaagaactactagcagatgacacaaaacttaagtgcctacatcagtgcagcaatcagcccaaacatgcactagtgatgtaaggacttgcacaaattgtgtaagtctcaactgtatgtgaaataaaacaaaggaaatgactcatcaataagatgtaccaaggggaatgtgatccttccctactagggcataggggtggttcattctgttttctctcaaagtagcaagaatttgaggttggcttctgatatataacaacaccaatcctattaacatccttagattttactactgtcctccagcaaattgacttggtcagagtaaccatcgctgcaataagtggaacacaaactccagttagcaagaatacattgatccctacaatcatatgtaaactatattgatccgtgcctttaaggaaaagtaacaggtagtaacatatataaacccatcacaggtcaaacaacagtgaaatattctgtaatcatacacgcataatgagaacactatcatatgaatttgttaaattcatgttcttaactgcagactgtgttacacaccaatattgttaaaaatgtcaacataactgagacgatactttttatattcttaaaatgtgatgctatctcaactgcctgggaacttagtgtgccaagcctctgaagctttcactcgttctaacaagactttgtaatttcccttctagtacacaccccttcattatacagaggtaccaaatttacagtcttttttttattctacttaatataagccagcatggaacttgctattatatagggtcacaataagggctgcaggaat

SEQ ID NO: 14160 - DNA, 2466 bp, Oryza sativa
taaacggattatcgcggccgcgcatgtttcagcagcgcaatttgttctgagaattaaagtgtctacaaattaacacgacctggagtatatatgcttcttaatttgtcggctagcagacatttctgaaacatctgattatggcatgcatgaccgtgtcagtagaaaagtgttgttattaagcctgtatagtaattaattgagttcaaattaaagcaccaggtacgaattaaaaaaatactacatctacgttctcaaatagtgcttgcagtcaaactttgataccttacataactttcattttgctaaatgatatcaattaaacggtgtatcaatttcataaattggatatagcaataaataaatcagcaaaattcttttattttagatagaagaaacttttcttctatctaaaataaaagaatgtacccttctatccaaatccaatttgcatcgataaaataaatccaaattccagtagtagatgaataattgcaaatttttgtgtgtacgatattagaataacttcaaaataactgacataattttttatttttcctgatcagaaaaatacatgaaaaagaaaggaggtagaaaaatttttggatttatggttaaagaagaaaaagaagaaaactggggttctgttgaatttcaagtattcagtggtgagggaatttattcatgactaagggagtatagcacaggaaaagcaggtagtaatgagttcttatacctggttcaccatcgtggaggtggtaaataaagcaggtagtagtatcatctcgtaatagcattactgtcaggtcataagaactaaacaaatattaaaatctctatcttccattcattccctatttgtctcatttttctattgtaatatggccccaccttactatccacttctagcaatatatacttataatggtaacttcaactattattacctacatttaaatggtgcaccttacttactactcctacttaggagtaggtaatttcactacgccagatcctcacacctgtgacggcatatctgtgacggacataagtgttggtcagtaatgagggtcacctttgacgggttctacggggtgccgtcatcggtgagccatccggcgacgacccgtcacaggtaactagtcacctgtgacggtccaaaaatagaacccgtcaaaggtgaggtaaagtcacctctgacgagccaaaaatatttagcccgtcacaggtaactagtcacctctgacggtccaaaaatagaacccgtcaaaggtgagctaaagtcaccagtgacggatcaaattttgtgtgcccgtcaaagatcacaaaaaaaaaaaaatcgctctcctcacccttatcctcttcttctccctactgccgagtccatccttatcctcttcttctttctccctttctccctcccctctctctctcccttcttccgggcgcctcccccacagcaacgagagaccgagcgatgagtgttgggcagcgaggcagccgcaggccgctcgtcgccaccggatggcgccctccctcctcacagccgcagccccagatggcgccctccctcctcgacgccgcctcgcccttcctcctctacggcggcggcatcgagcgatgagtgttgagcagcgaggcagccgcaggctgctcgtcgccgcctgatggcgctcaccctcctcgaaaccgcagccccagatggcgccctccctcctcgacgccgcctcgcccttcctcctctacagcgccgccgccgccggtggcagccgcaggccgctcgccgccgccaccaccggtcgccacgccgcctcctctctccgcgtcggcgccctcaagtactgccggatctacaagccctaccaccggatctacaagccccggagctccggtcgctgcctccttcaccctccgccccaaggtcgccggtcgcctcatctccaccatcccgagctcctgggcaccagatccggtctctatgtggttagggaccaccggatctggtcgcccccatgctccggccaccgtctccttcgtctactccgccgccgtcgtctcttcgtctactccgccaccgagctcgggtcgccgtcgccgtagcgctgaccgccgtttcttcgtcttctccgcgcccaagctgatggcaggtggaggcccattgttctgttcatgatgaacgattctgcttgccttccttgtggtgttcatgttgctactgtgattgatgattttgcttcttgttgcgactgttcctgtgatttgtaatcgggacaaatgtaatggagacgagaagaattgcgacgatttttttgatttgtgaatgccagatgtgatttgtgattgtccaaatgaatttgatggcaacctaggaggatggtgtttttttttctttttttcccacttttcacaccagtgacggctcccaattttgaccagtgacatgttaaaatatatacgggctgcaggaat

SEQ ID NO: 14161 - DNA, 2245 bp, Oryza sativa
ttgacgatagatcggggattgagatcttgagatggcacggacactagacaacaagcaaggaaacaaaatttcgcaattagggtttttgagagataattttcccgctaggcgccacgacggaacgggcgctacaagcagccaccgccgccgcccttcgtgtccgggcttggcggggacctggtggtggttaagctagtgtccgcgacggtgccgaggtggaagaagtacgacttcgccaggtgtaaggtgcagatcatggcgatggccaggttttgccacccccgcatcctcttcgatgaccatcgcgatggcgtgtccctccctgccgcgctcttgacaaacagtgttggtgatgatgtggcatcctgacatgtggggtccacgtgggtcccacgctaactcaacctccacgtcggataaaaccggggtcaaaaacaccaaaggatctaaaatgaacggttttgtaagttgagagatgtcatatatctagttttgtggttggggacgatttttgtaactcgatgacaagttgagggaccttcggtgtactttttacaacggactttgacccctcggcccggtagaaccaatttaactgacgattgcggctcataggccataacccatacatgtctccgtacccatgcggcccacgttcacggtttgttctcctgtgatctgctgggtccgcacgacgcgggcctaccacagacgaacacgaacatagcgtgcgcggccgaacgtggtgtgtcctcgtctccgctgcgacgggcgtgggcgagcaccaccgctcgtctacgcgctcgagcatcagatctcatcagatctcgtgagccaccgtcgcccggcggcaatggtcaagccaaaggtaaggatagtatgggtggctatcaaacacccgatcatagtgctgccctaataaattagggtaatatgatattatctattatcttacattgacagttttggaatcaaactaaacctaacctttttcatgagcttctagcattgatgtgtagtcagcgtgttgcactggaccagttttttgaaattttagaatctgatttttaggattaattttaggtggtttcttccgcagttttgttgcccaactcttttttattttttcatgtttgctattcctaagtaaacaagtaaaagaaaccagctaaatttattcttaaaatcaacatttcaaattaaaattagcttcgtcttaaaagccgaagaagctatgccaaatactggcttcttaaattgcatgaacaaaataataatagagaggaaacacatcacttacacaatgctttcttcacctctgaagcgcttcgaaaaaaataaactaaaggtaagtttcagcacgccaacgtacgcccctctctggcggattcaggtccggcctgtccattctacacccattgctggggacaatatcatagtatttgatgggtgttcaatccaaacagacgagtcaactgtgaagcatgcaaagaaataatatacccgagacaacacaaaaagcaccggtaacaaaatagcttgggagtttactgttgttactttgcaagaaggcatgaaaacatcattgctaaatatacgaaggtaaataccaatgaataatcaagacatgctttcaaaatccacaatctgttattgctaacctattggctattgctgtagccataagttctttaatttgtacacaacaaaacggaaacaaaagaatcaactcagtaagcccgatggttaatatggactgctaactacaaacagagggaatgaactcaccgttgatatggggctaatttgtgtcatctatgctatgcgaagaatccatgtaattagaatttaaagaatcaaatcagttgtttgatttttactaacagcaacagaagacgaagcatgaatcatcttgactcagaacctgcactgtatgggcgccagaagccctttgtagcgacaagaaattgttgcttcacaattgcagtcctgtagtgcaaagagcgaagaactggatccatttttctaatcacttgctcagtatcttgcaacacgaaccattttccaggtctaagtatcctatcaatttctgctgctacttcaatgatatcacacctaaaatacaaaagcattaataccaagcttgcttgattctgtacgttggtagaagagaataatgatatttaaacagaacagttctcaaagaatcaagacatgatttttcacctatttgtgaggccctgaa

SEQ ID NO: 14162 - DNA, 9917 bp, Oryza sativa
taggtcccagaccatactgtgccaggaagcccaggggtcctctccgacaccaccccggcgaatccacatgtctctcggcatcaaggctcccctgataagctagttactcagccaggggtgtcccattccacccatgtggtcgtacttgtcttatgtttggatgaaattccaaggaatcggtccttaagtgcgagagcgggaaaccgtacacccggtacgttccccggtccgcggatttggaaattcatttagttcgcaagcaccgacccaggtgtcgggttttccaaggcttttgtaaaactccagttttacccaagttgttacttcagattttaaatttgaaggcgaccgtcgatattcgcacagagtgcacgagtatcgagtcgcatctgggtggttacaaggggacatggtgtaacaattaacaacggatggatcaaatgcaacaagttaggtaggtccgccaatctgccttgcagacgggacaacagattaagtgtgatcctatcaatgcataatattttgcaagcaatataattaaatttcaaatataggctcaagttgttcaaaggtggcttgccttgctcgagatctggagcttgatccttgaaatcctcgcactgcgggtcttcgggctccgaaactacacgcgaaacgggacaactcaacaaacggcgaaaataaagccctattaatgacccctaagcgtgccattaggtagatctcgagatttgggaaattttggaagttgaacggagtcaagcggagttatggttggaaagatattgaatttctaaggttattggattttttttggtctaaaggaaaaaggatttaattaaatcccttttggaaaaagaaaaaggaaatgatgaagggagggactctagactttcctcgggcggctagggcgcggcccaaaggtattcggctcggtccggccgagctaaacgggccggacggcccaaagcggcccatttacgcgcgcgcgcgggagaggagagagagagagccggtggaccgggctcacctcgcgcggccccgggtgggacccgcttgtcagcggctcggcccaccgtgcggagggagcacgcggcgcatgcgcgcggctcgcggtgagggcggaggcggcgggcccacgtgcagcctcacggcttaccgcggaccacgcgcacggggagaaacggagggagcggctggccgggtcggcttatctggtcgcggccgaggtggcgccgacgtggcgcctacgtggcagccacgcgggtcggcggaaggtagacgaaggcccagccgaaacggacggcgggcggcggcggcgatcggcggagcgggccacggcgatacaagcgacagcgagtacaccgggcggtagtacgggacgagaggagacgagccaacggctcggattcgccggaggtagctcggcggcggcggattgcggcggcggcaaccggcggcggaagaagagggaaacggcgatgaggccacgagaggtcgatttccggcggtgagagcatctacaaggccacgggaactcgatgctagggttggattggacggagctatgccgagctgggctggcgacgtgcggctacttcggagctcgagcggcgacggcggcgagcacaaggcgagcaacggcatcggtcggggcggcgccggccaactatgggaggtctactcgagctaaaaccgaagtctaagggggggagacggagcgaggagggagaacgaagcgaaacatcaccgcggggagggagaggcgctgtgacgagaggccgacggcgcgggagtgacctctccggcctcgggccggggaagaggaagaagaggcgcggccggagtcctcttcggcgtccttgctcgtgccggctcctccgacacgcgcggcgatgattggggacggcgaaaaaaagagacggcagtggaggaggcgaaaatggggaggaaaggagaaggggaggccgggggtttaaggaggcggcaatgtcggtttggggaaccgacttgcgcggtcaagagcgcgagctggcgctcggctagcggccaaagcggtggcagacgggatgacgccggcgggagaggaaaaaggaggaaggggaaaaggaggaggagaaaggaattctctcctttgccgattcgggaaaaagagggtgggcgcggggcgacgacgcggcagagggaggtgaggcgcggcctccgggccttggcggctagcgcgcggagtggcgggggccggtgatgacgacggcgggcggtttggagcggagcggcgacagcggcgactggcgcgggcagagctgacggcggcggcgaccgggcggtcggccactcggcttgcgcgggcgcgagcggctcacgcgcgcacgcgcgcggcgcgcgggcaaagcggcgggatcgggagagagcgagggagcgcgagggagagagagagagaggaaaaaggaaaagggccggggaggcaaagcagactttgcggaggaaaaagattcggaagatttggattcggaaattggaacttgacgatagatcggggattgagatcttgagatggcacggacactagacaacaagcaaggaaacaaaatttcgcaattagggtttttgagagataattttcccgctaggcgccacgacggaacgggcgctacagaccaacccccctaacaaggatctcgaccccgagatccagcacctaagggagcagctccggaaactcggcgcggagaagatcttctcgttcccaggttgcctcatcttcagaatgattgctccattggaccttgtagaacttgatggtctttcttcgagtctgacgttctgcttcctcaagaaccttgatcggtctttccttgtaggtcagattcttttccagctcgatgttacccaggggaacttgctcttctggaactcgaagacatttctttaactgggatacgtggaacacgttgtgcacatctgcgagaccttcaggtagctcaagctgataagccacttcgccacgtctggcggttatgaggtaggggccgatatagcggggtgctaacttgccggacatcccaaaccttctcattcctcggagtggtgatacccgtaggtacacatgatctcctttttcgaactcaaggtcacgcctccgattgtcagcgtaattcttctgacggttctgtgctgtcttcaaacgttctcgtatcagcttaacttgttcttctgctgacttgagtatgtcaggaccgaataccaaggcttcgcccacctcattccagcacaagggagtgcggcaccttcttccgaacattgcctcattcggcgacatctgaatgctggcctgataactgttgttgtatgagaactcggcatacggcaaacaacgatcccaagtgccttcgaaatccaaggcacatgctcgcagcatgtcttctaggatctggtttactctttctgtctgaccatcggtctgcgggtggtaggccgtactaaaattcagatcagttccgagtgcttcatgcaattgcttccagaaccttgaggtgaactgagtgcctcgatccgacactattttcttgggacagccaaatctacatacgacatgagtcatgtagagttctgctagtttctttccatcataggtggtcttcactggcacgaaatgtgctgacttcgtgagtcggtccacgattacccaaatggagtcgtatccgctgggggttcttggcaaaccggtgatgaaatccattccgatctcttcccatttccactcgggaatcggtaagggttgtagcagtccagctggcctttggtgttctgccttgactctttggcaaatgtcacacagggctacgtattctgcgacatctcgtttcattccagcccaccagaagtatgccttgatatcttggtacatcttcgtacttcctgggtgaatggagtaggcggactcatgagcttcctttaggatgaggtctcttaactccttcttggccggtacacagatgcgtggaccgtaccaaactgtgccttgatcgtctatggagaagttggtgtctttcttctcctgtattctttctattaactcttttatcccttcgtcttctttctgtgcctcccgaatttgcgattctagggtaggctgtactgtcaagctggcagggactcctgactgtaccacggtcagccttaacttctccaattctctgcacagttgaccttggtcaggccgtatttgagctatattgcaataggccttgcgacttagcgcatcagcgaccacgttggctttaccaggatgatagtggattccaagatcgtaatccttgattagttccaaccatcttctctgtctcatatttaactcggtctgagtgaagatatacttaagacttttgtgatcggtgtatacttcacatctgttcccgattaaatagtgcctccagatcttaagagcatgaatcacggctgccaactcgagatcatgggtggggtaattgacttcatgaggcctgagctgcctggatgcataggccacaacctttcgttcttgcattaggacacatcctaagccctgtcttgatgcatcacagaagatctcgaagtcttttcggatatctggcaaggtgagaactggggcagtggtcaatcttttcttcatttcttgaaagctgtcttcacaggctgtggaccattgaaatttcttctccttctttaacagctcggtcataggtctggctagcttagagaatccttcaatgaatcttcgataatatccagctaagccgaggaagctgcgaatctctgacacattcttgggcgggttccacgcaagtacagcttcaactttgctgggatctacttcgacaccgttggaggagatcacgtgaccaagaaaagctactcggtccaaccagaattcgcatttcgagaatttagcgaatagttgatgatctctgagcttttccattatcagcctcaggtgttcagcatgttcttcctcgttcttagagtatatcaggatgtcatcgatgaataccacgacaaactggtccaggtattccataaagattttgttcattaagttcatgaagaatgctggagcattggtgagtccgaaggacattactgtaaactcatatagaccataacgcgtcgagaaagcggtcttcggaatatcttcagatctgattttcagttggtggtaacctgacctcaagtcaatttttgagaagactcttgctcctttaagttgatcgaataagtcgtcaatccgaggcaacgggtacttgttctttatagttacttcattcagggctctatagtcaattaccattctctcagagccatcctttttcttaaccagaagcactggggctccccaaggggatgagctaggtcgcacataacctttactttccagttcttcgatttgtcttttaacttctgctaattcattagcggccattcggtagggtctttttgcaattggagctgtgcctggtgccagttctatggcgaactcaatctctctatctggtggcattcttgttaattcttccggaaatacgtcgggatattcacagactatgggcaccgactccaaggaggtgcttgcaaacaggttaggatagaccgacttgcggtaggggtgttaggggtaaagcggacttgctttcctccaggtccttgcaaggtgatggacttttcggcacaatctatctgtcctttgtgcttagccaaccaatccatccctagaatgatgtccaagctttgcgagtctaggactatcggtttggctaggaagtcaacttcctcaattctaaggttaacttccgggcatatttgagttgcccttatatttcttccaggggaatgtactatcattggtacacgcaaattttgggttttccaaccatttcttttcacaaaagcttgcgatatgaaagaatgggaagctcctgaatcaaacagaactattgcgggtacggagttgacagagaacatacccatcacaacgtctggagcatcctgagcggtttcagcttgaatgtgattcacacgtcctcgaccaaagtggttggaagcacgggaaccttgtccacttgcctgagagctaggacgagactgagctgccgctggagtaggagttctggcggtgctgccattagcatgccctgagttggtgttggtaggattctgaggacactgtctagcatagtgacccatctggttgcaccggaaacactgaactgctgacggtccctgtggtgacttgaaggaggtaacactgtttggcgcagtgttgccactagggcatgcttctgtggctgaggtgccggacggtttatctgaggacgaggggcgtagcctggctggcggttagtctgagtgaccgactgatggtattgcatgggttgaccgtagcgagggcgaggtgcgcctcgggaagaatttccctgatggttagacttgcgtttcttgtattcttcggtggcctcttttctggcatcctcaagtagaagtgctttgttgatcatatgttgaaaagtggggaagtcatgagcaagcaactggagtctcattccaactgcgattcctttcaagaatttcctgatctttttcttatcggtgtctacttcctcaggggcgtaccgagccaacttgttgaactgacttaggtactcattgacactgctgtggccttgcttaagtctgttaaattcttctttcttcatgtcaatagtgctttcaggcacatgagctgcacggaaggcagctgcaaactcatcccaagcaatgttagtgggttcaggatgtgcattgcagtaattctcccaccaatctgcggcaggtcctcttagctggtgagaggcgtagagcgtcttctcaacaggagtacactgcactaagttgagttttctatcaacatctttcaaccaatcgtcagcctcgacgggctcgacggtctgagagaactctggcggtcgagacctcagaaagtccgtcagcttggatctgttgttgcccacgtgagggtggccatttccatgcgcattatgctgaaagctggctatggctgtggttagaccttgcaggatttgtgtctgaactgccattatgtgttgcatgttgttttccacatgaggtggggaagggaggcgttctcctccagaattgtgactggcagtgtggtgagagcggtgagactgctccaactctgcttcacgggaaactgtgcgatgcgagcggttgctgcggcgaggttgctcaacctctgcgtcgcgggaaacagtacggtgcgaacggttgctgtggtgagaatgctcattagctggttcgtgatttgcttctgcttcaactctaccatcatcaaaaccaaagcggactggtgcacgagctgtacgacgggggcggctagccatctaaactcccagaaaagggcggggtaagagtcagataagcacttaggagggcaaggagcaaagcaaatagcaactcagatagcacacactaggcataaactggatttttcaaatcataaaaacacctgatacaacgggtgtggactagtcacagagctacgccgagcttgactgtgcgcacacctcctaggagaaccagactaccaaacaacacccacaacaatcacacgcacgcactacctcgccacgactccaaaagagttggcggcggaacaaaagggcctaacacacggacggctgctgaagactgcctcctctactcctcgtcggccgggctgcctcctgtggtcggctcctcagtcgaagaaacgtcgatcggctggcgcgaagggaccggcgggacctgtcgagggccggcagcagcacgggccgctggcggtgggggagctgggtggcggaaacggaacacggtggaagaaccaacaacacgcttccgcgcagtgcggataaagcgtgggccacggcgggaggaagcgactggagtgtgtccgggggtgtaggaagggctaactgggtgtgggtagggggagtacactggtgagtacggtgcacgcgagctgggggagcgcgggccactgggtgtgcgagcagagccgcgggagctgtgggaggacaggtggctggcgtggcagagacggcctgagtcccaagagatagtgtcaactgaggtgacaccctcctcggccagacgggcctccaaggcggcgtagcggcgggcaagggaacggtaagcctcaaggagtaggtcgtgctgagtggcctgagcctccgaaagctcgaccatgcgagtcagcactggctgagactcgctgtacggacaagggtacctggcgtctgagtggccagaaggaagacgtggaagctgccggaaggcggagcctccgagacggtggccgtagtcgtgggccaggcggcgaagcgcagtccaggagaggtcctggtacgcgatctggagagtgggcctggccacagtgaagtggtgagggcgaaggccaactccgtgtatacctccacgagggtaaaggtacacagagagctcacagtgagggggaacacggtccacggagtaccccgtgtactcgggacacgagaagccaaggaaacgggcgaggtcacgaagctgggcgacgtggtgaccctcaccaaaaccgtgggaactgaagctggcgttcactgccatctacaattttgaaagagggagaaagatcagtaacccttttttgaaacaaactatggaaaataaagaaaacagaagaaaccctagtttttcgcaagtagttttgaatctagtatccttagggtcgtcctaagcgtcgggtttcgccctagggccaagcctgtgctctgataccatctcttgtcacgccccgaaccagttccggctggaactagcccgtgacgctccaaattaacctgttaatcgataccagtcccaggaaacagtgctggtatcacagggagacagaatatcatagcaacagaggtctctttattatagagtaggagtacagtcatgttgggctacggacagatcccgagctcacaactgcattacaaaagcgaaacggaagccaggacttggaccaatcatcacaggcgcgacttgggaactaggccgaaaccctaaaactcatcgtagccggcttgctcctggaagaactcctcatcagcaggatccacttcatcttcttccgcaactgggggggggattatttatatagagcaagggtgagtacgggagtactcagcaagccaggggaaaataagtgtttaatgcaggcttcaaggaaaggctgttgtttttgcaattgattttatttgaactcttttctaaaagcaactaagtgagtgcttctcaaacgacacggacgaggcagtgcgtctcgtccggtcggagtatgtgcaatgtatcagtctttagattttgaaacaaggttggcacccggccaaaagctttttaaacggccacccgggccaacacctttcaaatggccacccgggcctagctgatcccatcagctgcaggtttcttttcaaacatcgaacccgatttcacaacagcaaatttcacaagcagtagtcaaacaaaactacgctaggaatcacctcacatccgcccatgaccgtgggcacggctgttcgaacagtttgttaacctctgcagagggggtacactttacccacacgacattactaacccgggtcacccagcccgtggggatcagccacgtcgggagacctccaagctttcatgacaaggcatttcgaaagccgacacaggtttaccatatgccgacgagaggggtcccagaccaacaacaggttaggtcccagaccatactgtgccaggaagcccaggggtcctctccgacaccaccccggcgaatccacatgtctctcggcatcaaggctcccctgataagctagttactcagccagggg

SEQ ID NO: 14163 - DNA, 3286 bp, Oryza sativa
aactctgctttcgcccttcctgcattataggaataacttggagtgaaaagcttggaccccacatgatggtcccttgtggtggcggtacaacacaatgattgagaaatcaattgaacatatgatggtcatgcctgtgcggtcaaagcgtgggctcatgttctactcccaccatctcctcaactacattgcttccccatctttgtcgaacctcttcactgttgggcctcaccaatgcccagcgacaccgaccagtttgcctcccattgtgagtatctccgcactcaacaccgtcgtcttaaatgtcacgtaggcctacccgacaccacccgcatggcctccgtcggcgtatgggtcaccgtcaatggccacttcaagcttccagtcaccaagcacttccttgagaacgtattattcaaattatcatatggatcgtttttcaaattcagtgtttgtttggtcatgacttcatgtagaacgaatccatgtttatactagatgggtacgccgcgcgttgctgcgagagaattatgtgataatatagtagatatgagttctaaaattttatttcttacctactatacgatttgtttcatgtgtttatatatttttgtacttttatcaattatccaaaaaaaaacagttatgattgggttgtatagtatgctttttaggggaaagagatgcaatttacacccttgatgaatcattcaaatgctaaaaacaattgaggtgatgtggcttcatgagaaaagagagaattggcattacctatacttagtggagatgatttatagatatataggattcaaaagtcataggttcgctgcagagtagacctactttaattaattattaattttgatttcctaattattatgggtccacatgtcatatggataatggggcttgttactattatatatttgttctattaatgactcggttatttcctaattgacaagttggtgatcctttgacatcgtttaaattgtagacttactggtggagcaaaagcaaaacatgatatgatttatggttgtgcgcttggcatgggaaggcaaatcggatgtgctgcgtgtgtggagcttattggattccgacgtgtgggatgcttgatcgtcgatgtggaagcggtgaatttggtttggaagtgatcgatcaggctcacacgtgctgctagggcgccaatgcagaaacacgaaaaccgtcgatgtacgctagacaacgacgaataacagaaacagtaaaaatattttaaatatgtaaagataaagataaagaaaaaaacgagaccatgaggaaataaagcatgaacggggtgtggtgagatatatttttgtcctttttttattatagatcactgtccttttgtgattagcaatttaagttgtttgtttattttttagaaacaaaaaagaaaaaaaaaagatcggaagggggagaagcaagcgcggggtgggggtgggacgtattttcgtctttttacgattagatcttttgttcttttgtgattaggaatttaggtccgattattttccctttttttccacgtccgaatttttttatgccatgaaggaaatcacacctttttctattatatataaacggataacggaaacattttaaatttattaagtactccctacgtcccataatataagggattttaagtttttgcttgtactgtttgaccactcgtcttctttaaaaaaatttaaaattattattttttttacttaccttatttttttttacttaccttattatccaaagtattttaagcataactttttattttttatatttgtacaatttttttaataagatgagtggtcaaacaatgcaaacaaaaactcaaaatttcattatgggagagagagagagtagtagagatagagataggaataagagatagagattggccagggtacataagtatccagcgtttctgttttttttccactcccaaatcttttcccgatttcattttttttaatttatgatctttttctaactgacttcttttataggaactactgcacgaaccaatttaacggaattttagctccgtttggatttttttaacggacttggaaaaagtacaccgaaggtcccttcacttgccatcgagttacaaaattatcccccaaccgcaaaaccaaatatatgatatccctcaacttagaaaaattgttcacttaacatttaacgtcctttagtggttttgacccgcttttatccgacgtggcggctgagtcagcgtaggacccacatgggccctatatatcaagatgccacatcatcaccctctctccccatcctctcccttcctcctcttctctcactctctcttcctctctcacttttctcctctcaggtaggcaggctggtgggtggggaggaggtcgccggggtaaggcgggggaggaggtccaacggttggcgatagcggcgcctgccggtacgaatcctgctgccgcgccgccatgtcctcctcccgtgggccgtaggaggtctgacggccggcgatgggggagaaggggagggcagcgcctgcgggtatgaatcccgctgccacgccgccatgtcctcctcccgcgggttgtcgtctcctccgtcccaccagaaccctaacgatcccttcgccgcggcgaagacggaggcggaaggggaggcggcgccgcccggaaaccctatcatgcccagtgaccctccctcaccgcagatggaggccacttcagagacactcacccaagaggagatgttgcgtcggcggaagagctgtaggcgcaacaccggcgtctcgtcgacatgtatcggcggctctactggacgctcgggaaggagcgtcgggcgcggcaccagtagtacgcctgggagcttgggcggagctcgcttgaggccgagcagtgtcacgccccgaaccagttccggctggaactagcccgtgacgctccaaattaacctgttaatcgataccagtcccaggaaacagtgctggtatcacagggagacagaatatcatagcaacagaggtctctttattatagagtaggagtacagtcatgttgggctacggacagatcccgagctcacaactgcattacaaaagcgaaacggaagccaggacttggaccaatcatcacaggcgcgacttgggaactaggccgaaaccctaaaactcatcgtagccggcttgctcctggaagaactcctcatcagcaggatccacttcatcttctttcgcaactgggggggggattatttatatagagcaagggtgagt

SEQ ID NO: 14164 - DNA, 694 bp, Oryza sativa
tgaagagatggagatttgaggacagtattaaatgcaaaacactttctgattttacaagattttgtggataacaactgcaagatcttgaaacttcttgatgattcaatccaaatgagtagcagctcaaccctcttacatgatgaaaaaatgtgttttattttattttttgtcaggtttttgaaggcccccttgtgaattccctgttgtccatcagacaaggaggcctcaagatgtacatcatagaggacaaagggggtgccattgccctcatgctggcctccctcttcttcctggggacatggcctgcggtcctcaccctcctcgagcgccgaggccggctcccgcagcacacctacctcgactactcgatcacgaacctcctcgctgcggtcctcatcgcgctcaccttcggtcagctcggcgatagcaagcccaacatgcccaatttcttcacccagctcagtcaggttagccaccttctcttaagcatctgaaatagtatatccctgaattaatacatttctgattgttagttagtctgaaattttgctgacagtgatttttttttgtttgcaatgaaggataattggccttcagtgctgtttgcaatggcagggggtgttgtgctcagtatagggaacctctctactcagtatgcatgggcatatgtaggtctctcagtgactgaggtcat

SEQ ID NO: 14165 - DNA, 685 bp, Oryza sativa
cgatgaatcatccggagaggatcaggatgccaaggtttcaccatccgctgaggatgaagaagctggcaagaaagctgaggatggcaggtccaaattgtcagacgaacagaaagtgaaacagcagagaccacataagattcagatatggtcggaaataaggccctccttaggccacattggggagatgatgagcttgcgtgtcaagaagaagcaatcttctgcagataaggagaatgcagcgaatgaactccaatctgcaaataatgaagaaatcaaaccctcagaggactccgatgatgagttctatgatgtagagaaagttgatcccaaccaagaagggcctgtagctgatagtgctgatgctgattcaggcatgaatgttgatgcgaatcaagaagggcattatccttggaaggaagaattggaatgcctagtccgtgatgggttgccaatggctctgagaggagaggtacatcgtgctcttcatattaatcttgtttagatttttttattgcattaaatcaatggcccctcttcgttttggtgacagctatggcaagcttttgttggtatcggagctcgtcgggtgaaaggctactatgagtctctccttgcagctgatgatgaaagagagaacagcaaaggttctgattctccaactatggaagggaaaccacaaggatcg

SEQ ID NO: 14166 - DNA, 1232 bp, Oryza sativa
tctgaggtttctcgtcactttttgaatggtcttgacatgtctatttgggagatgaaaattacatcaattcaggagtctgttgatatgtctacttcgactttggattcactttacacaaaactgaaaacacatgagatgaatattctctctcgtaaaattgattctaagtcaagtgctgtggttccttcctcgacttctttggatgttggcgcttcttcatcgaagtcttctgtgcttgctttatttgatgccatgtccgatgagcaactcgaacagttcgaggaggaggacttggctcctgcatctaacacatttgctcaagctgtgaataatgtcacgttcaagaaaagaggtggaccgaatcgttgctttgaatgtggttctccggatcacctttgttcgcgttgtcccaagcttgggagaggcaagaaggaatacaatggtagagtcaaggaagatgacgtggacaagaagaacacgaaggagaagaagaagaattgcatgcagtggttaatccaagaactcatagcaacttttgatgaatcggaagataaagatgagagcaaaggtaagcaagttgttgatctagcttttattgctcgtaatgcaagttctgatgttgatgaatctgatgatgataatgaagaaaagcttagttatgatcgactagaatatgctgcttacaaatttgctaagaaacttcaaacatgttatattgtgcttgatgagaaggatcatactattgagattcttaatgttgaaattgctagattaaaatctttgattcctaatgatgataattgtcaatcttgtgaagttttattttctgaaattaatgctttgcgagatgtcaattctgttaattgcaagaaattggaatttgagattgaaaaatctaaaaagttggagtcttcttttgctcttggatttgctttacatgctcgtgttgttaatgtgatttggacaaagaacatgttgaaaaatacaaagttgctttttgtgcaagttctttggtcaatgcttcatgtgcaaataatgtaaaacaaaacaatgttgttttgatttctcaagattgttcaaagtgtgttttaaatgagttgaagttgaaagatgctttagagcatgttaaacacatggaagaaattgttaacaagatgaggtgttttcctgctcaacttgtagaaaacaaaaaggtcttttggatgcttgcaaaaattgtgctattcttactt

SEQ ID NO: 14167 - DNA, 1144 bp, Oryza sativa
acttgtctagcgttctacaagacctaatgaaatggtttgccttgtcattacaggtaactaaatgccggctaatcggctaatcccaatggacagacttatgtctatactccctccgtcccctaatcccctaatataagggattttgagtttttatgtctatactcccttgagtttttatgtctatactccctccatcccctaatataagggattttgagtttttggttaaactgtttaaccactcgtcttatttaaaaatttgtgcaaatataaaaaacaaaaagttgtgcttaaaatactttagataataaagcaagtaaaaaaaaataaataataattctaaaattttttgaataagacgagtggtcaaacaattcaaacaaacactcaaaatcctttatattaagacggagggaatcctttatattaagacggagggagtaccgtttttaattggagtctattgacaagatagataacacatagcataacacagagaagcagttataaaacgctttgcttcatgtcacatgatatatagagcaaagtcaagatcgaaaacggactaaaatcatggatagtctgggcttgtttcatgccgggtaacggagaagttaccagatgtaaaaaacaaacaaaaataagtcatggatagcgcatccttacgcatgcatagagacatttgagggcaaaataaacagcacgtcaacagttactgtccaacgcaagaagcccagaagcacagcaagcaaaacaaagcagcagcagaagcagcgcatcagcagtttaccttgagtgatttcaaacagagctaatggaataaaaacagacatttaaaacacctccattgtcatctcaacataacataactagaagtagtaccttgagtgatgtttacgttattacaccacatctatgaaaaagaacagaagaaaaagaaaacccagtcattgtgtattgttctggaatttgatgcttgagcaggtgatgaccattcaggtgagccggttcatcactaaaagactgcaaactgaagctcgaaggacgtaaattaattagccctgcttgttggcataattgtcaggctcgtcatccttgaagaggtcatccatgagctcatcgttcttgcggcttccaaagctgt

SEQ ID NO: 14168 - DNA, 1333 bp, Oryza sativa
aagattcagttttttgcatgtttgggtgtacctagaactacagccagacttgagcagatgatgtttgtcacagacagaccgacaaatgcccacgcatactgcgagatcaaatgtccgatgctgagagcaatgccaccggccatcgcaaataggactgaaggccagttatcctgcattgatcaatggctgcaaatcatggaagaattcactgaagttgattatccacataaaagctgaacactctaacgacagtgacacgatgcaaccaacatacagttgggacaagtctctcatgcttgttttgcgtccacagataccatccaaattccaaagtcacactgtcaacttgaagcaattctgaatttccagttatcaaattcagctattcacttccaaattactctcattaacaggtactaactcacacagcttcttatgaaatcaccactgcattcttgatggctaagatattctagtcctagattgcatgacacaagaacaaccaactgaaccaagaaaccttaaaaaaagcactgacctgagtgagctgagtgaagaagcttggcatgcaggcctggtctctccaacctgcccaaatgtgatggaatcacagcagcagcaaggagatttgtgacagagtagtccaggtatgtgtgctgaggcagccgtcctctacgctccaggagagtcaggagagcaggccaggtgcccaggaagaggagggaggccaccatcaaggcgacggcgccgccccggtcctcgacgacgaacatgtcgacgccgggaagcggaacggagagcctggggtgtgatctccggggaggatttcaggctagatctttcatctcaagtctcaattggacgaattgctcatgtccatgtgaactagtctcactctaacccccatttccctggcatgttgtcctcatctagttcatgttttggcctgaaaaaggtaaagagataatcaaggatgtggtcatgatgagcccgctacggcgctctctactcttagtagaaatcaatatgaaccctatatcttatttgattaaagagtttaaatttatttatactatcaccttagttagcgggagtagaatatgaaggggtattattataaaaaaaatacaaaggggtataatagttatttatcagtgactaaacctttttttcttgttttagtgttttcgatgaaatatgagtgatgctagtacaatgaatgatcgatgtagccgggaaaaaaataaataataaagttactcctaatcattatattattagtaaattactgattaacagttgtattatactacagtaaaaagcaccagagcat

SEQ ID NO: 14169 - DNA, 700 bp, Oryza sativa
ctgcacccccttgatcttggactccccagcctccagaacactcagaaataagttgctgttctttataaataacatggtctgtggaactttgttacagcaacacaaacaagctgcggccacgactagagaccttaaggctttcatgacaaggcatttcgaaagacgacacaggttcaccatatgccaacgagaggggtcccaaaccaacaccagataggtcccagaccttactgtgccaggaagcccaggggtcctccccgacaccaccccggcgaatccatatgtctcttagcatcatggctcccccgataagctagttactcagccaggggtgtcccattccacccatgtggtcgtacttgtcttatgttcggatgaaattccaaggaaacggtccttatgtgcaagagcgggaaaccgtacacccggtacgttccccggtccgcggttttggaaattcatttagttcgcaagcaccgacccaggtgtcgggttttccaagtcttttgtaaaacccaagttttaccaaagatgtttctcagattttaagtttgaaggcgactgtcgatacccgtgcagagtgcacgattaccgaggcacaactaggtgggtacaagggaacatggtataacaattacaatggaagggtcaaatgcaacaaattaggtaggtccgccaatctgccttgcagacgggacaa

SEQ ID NO: 14170 - DNA, 1305 bp, Oryza sativa
ggggctaaagatcccggtgatctttagccccggttgggctaccaaccgggactaaagtcccacccctatatatatgtcttcttcctcctccagctgcccgagcaagcttcaaaattacttcaaaaaagaggggaggtcatgccaaaatttctatttaatttattttggtgattacatacaaatcggaggtgcctaaaaggtttgcaacttcatcctccaatgttttttttgtcatactacatttgcacctatgttttgcacacttttttttgtctacaaaatttagttgtaagttgatgagagagaaaatgtgtgtggggaagaaagaatatatagaaatttagttcatttgctaaacaatgttttataaaatagttgagaaggaaaactctagtgaaagttaatcttaaataatagaaaacaaactaaaatgaaaattaaaagaagtaaaacacattaaaattagtttaaaactttacaactagtttttaagaattatttggtgtaatattttatgatttttgtatgaataaagatatcttataattattgtatgactgtcattattgtaagaataattatttgtgtgcggttttttttgactcatgtagatggatcggcaatggatgtacgctgaccggcggtccaaagagtttattgacggcgtgcactattttttgagagtggccgaagctaacaggcaaaggggttttatttgttgtccatgcaataagtgtaagaatcagaaggagtattctgcatccaggactattcatttccacttgtttgagtcggggttcatgccaagctataattgttggacatcccacggagagcaaggtgttgaaatggaagaagatgaagtggaagacgacaatattccggactttgctcagtatgttggatttgaaggaaatcaaacgggcgaggaggaaatagctgctaatggtaacgacgttgcggatgatcttggtcagatgttgcaggacgccagtgaggactgcgaaagtgaaaaggaggcccataaattggacaagatgttggaggaccacagaacttcgttgtacccaggttgcgagcaggggcacaaaaagttggataccactctggagttgttgcaatggaaggcaaaaaatggggttagtgacaaggcatttggcgatttattgaaactcgtcaagaacattcttccggggggaaacaaattgcccgagacaacgtacgaggctaagaagatagtctgcccgttaggactggaagttcataagattcacgcatgtccgaacgattgtatcctatatcgcg

SEQ ID NO: 14171 - DNA, 5174 bp, Oryza sativa
cccctacacccacaaaacccatggatacccccctaagcccccccttcaattttttcatcatagttgataagataggagatgctaaaggtctcataatagcattttagtatagtttaatactgagattatgtgtttatatcggtgtattcggtatgttgagtccccccaactttttatttctggatccgcccctgcatgagtgatgataaactaagagcgcatgtgagcactgaccaacctaactgtaacggctcaaggtaacatgtgacatttcttccaaacaattatcgcatccaaacttccaacacatatacaagagggaacgaatatgttgccatgctcctggtggtcatccaccccttacagaccgatccattgccagctccaccatcatcaacatcaataattgttgtctcaccgtgtttcatccaacatgtatagttcttcaaaaaacctcttcttatcagatgagcatgtgtttcacactaactgatttatatatccctgtaacagctataggtttcaagccgttacatactgggccttaaatgatggctcaagagtgttttgcctatctgtaacggccgtctatgccacccattatagatgcgggagtctgtaacgattctgtttggtccgtcacagataagagtatttgtgtgctagtggcaagtgcaatttgagcaacctcgtgtatttgtatagtatatttgcagcaatggcaacggcagcagcggcggcgtgttttccagtgaacctccaaaacagagcacttcttccagttttccacgaattatcaagatttgtcctaataatggcaaagtgatggttctatacaaatcattttataaaaaatttgtctcagtgcacctgaacttgtttcaaggttgactaatttgttttaagggtgcaagcgggctaacccgcgagtttacttataggtcaaataaataataattcatgggttttcgtgtcgtggcgcggcttgcaacatctaaatatacaagtggatcgattcataaatccatttataaggtaaattaatagttaacccgcaagtcaaacctacgggttacgcattacttttgcctataagaggattcgcggacaaacccacttgcaccgttaatttgttttccagtagcaagcgatggcttgcactgctaatcccagagctaaaacatggacgatcatgcactcccttcgagccagcagcacctgcaaccttcagagggctcagatgccattcatcaaataacggtaagaaacgcattgttgctcttccaattttgtttcaccaattctttcctgcaaaatgaaacagatgaaagaaatggctattgtttgctccatcacgagagataaaaagggaagcagaagcagatcatagaggcaggttttcaccaccaggaacagtcgtcgttgaagtccaagacgatggcaatcgctggagcacctccaactacatctcatcagccaaagagtgggcagtatatggacatggatctactggcagctttgttttcccttactgcaacgatatttgaggtcagtcaagttcaagatttggtccaactggttgatgctattgcccctgtagatgctgcctttacctttgctgggaagctcattgagatggtaaaaaggaagatcatagaaagaatcgattttcttgtggatgaatggtcgagaattttgaagcctaccactaagatggtcatatcaatggtgagacataggagcatcagcttcgtaaaagaagatgatgaagacctggagagcttgatagattatcttatctgcatagttattccactggcatgaacaaaatagagggtgtcatgagctaccatggagcaaagcaaccgttcaagactcgtgcttcccttgttaaagaagcccaggaactttgggacaaaaagaaggaagatgctagctctgtcgaacgaaaccagatcacctaatctgtatgtgagtatatgacacgatttgaaaaattataacacacattcgatctgagaattttgccagagcagggtggatgaccgaaaccagtagatcactctgtttttgtgccattttgcctgatgttagatgtatcatatctctggagttaaatttatgtttgatgaaaataaatcagttagtgtgaattctatatgtatatcaaacttttttctcttctattgtgagcatggaagcaggaggcgcaatgccaaatagtgagctaatacttaacaagcattttactttacctaataccctcatgcattgtcacgccccgaactagtcccgaccggaactagcccgtgacgctccaaattaacctgttaatcgataccagtcacaggaaacagtgctggtatcacaggaagacagaatatcacagcaacagatgtctctttatcatagagtaggagtacagtcatgttgggctgcagacagatcccgagctcataactgcattacaaaagggaaacggaagccaagacttggaccaaacatcacaggcgcgacttgggaactaggccgaaaccctaaaactcatcgtagccggcttgctcctggaagaactcctcgtcagcgggatccgcttcatcttcttcagcaactgggggggggattatttatatagagcaagggtgagtacgggagtactcagcaagccatgggaaataagtgtttaatgcaggcttcaaggaaaggctattgtttttgcgattgattttatttaaactcttttcagaaacaactaagggagtgcttctcaaacgacacggatgagacagtgcgtctcgtccggtcggagtatgtgcaatgtatcagtcttttgaatcgatcaaggttggcacccggccaacagctttcaaacggccgcccgggcctggctgatcccatcagccgcagattttccaaacatcaaacccattccacaacagcaaatttcacaaggcagtagtcaaacaaaactatgctaggaatcacctcacatccgcccatgaccgtgggcacggctgttcgaacagttttaataacctctgcagagggggtacactttacccacacgacattactaacccggatcatccagcccgtacagaacggccacgactagagaccttaaggctttcatgacaaggcatttcgaaagacgacacaggttcaccatatgccaacgagaggggtcccaaaccaacaccagataggtcccagaccttactgtgccaggaagcccaggggtcctccccgacaccaccccggcgaatccatatgtctcttagcatcatggctcccccgataagctagttactcagccaggggtgtcccattccacccatgtggtcgtacttgtcttatgttcggatgaaattccaaggaaacggtccttatgtgcaagagcgggaaaccgtacacccggtacgttccccggtccgcggttttggaaattcatttagttcgcaagcaccgacccaggtgtcgggttttccaagtcttttgtaaaacccaagttttaccaaagatgtttctcagattttaagtttgaaggcgactgtcgatacccgtgcagagtgcacgattaccgaggcacaactaggtgggtacaagggaacatggtataacaattacaatggaagggtcaaatgcaacaaattaggtaggtccgccaatctgccttgcagacgggacaagcagattaagtgcgatcctatcaatgcataatatttttcaagcaacataagtaagttcaaatataggctcaagatgttcaaaggtggcttgcctcgctcgagatcttgagcttgatcctcgaaatcctcgcactgcgggtcttcgggctccgaaactacacgcgaaacgggacaactcagcaaacggcgaaaataaagccctattattgacctctaagcgtgccattagatagatctcgagatttgaggaattttggaagttgaacggagtcaaacggacttacggttgggaagatattgaatttctaagattattggatttttggtctaaaggaaaaggatttatttaaatcctttttgaaaaagaaaagaaaagaaaagaaagagggagggaaattagacttccctcggacggctagggcgcggcccgagagaatggggcagctcggccgagcttaatgggccaaccggcccaagagggcggcccaaagcgcgcgcgggcggggaagggagagagagagccggtgggccgggtccatcccgcgtggtcccgggtgggacccgcttgtcggcgactcggctcaccgtgagcgaggtgcatgcggggcgtgctagggtttggggagggaggcgcggcgcatacgcgcggttcgcggaggacgcggtgcggcgggcccacgcgcagcctctcggctcgcggtggaccgcgcacgtgagggggcggagggaagcggcggaccggggtctgcttgacccggtcgcggccgaggtggcgccgacatggcgcttacgtggctgccacgcgggtcggcgggagttagacgacgacgccggccggaacggacggcggacgacagcggcgagcggcggagcgaaccatggcgatacaggcgaaggcgagcacaccgggatgttgcacaggacgaggggagacgagccaacggctcggatttgccggagggagctcgacggcggcggattgcggcggcggcaaccgacggcgggagaagggggaaacggcgatgaggtcacaaggggccgattcccggcggtgagagcatctacgcggctacgggaatccgttgctagcgtcggattgggcggagctacgccgagcgaggccggcgacgagcgggcgctacggagcacgggcagcgacggcggcgagcacacagcgagcggcggcaacggtcgaggcggcgccagctagctacgggaaggctacacatgctactaccgaaaactaaggggaggagatggatcgaggagggagaacgggggaatgcactaccgagatgaggcggggcgctatgacgagaggccgacggcacgggagtgatctcttcggcctcgggccggggaagaggaagaaggcgagcgcccggagtccccttccgcgtcctaacgcgcactggctcctccggcacacgcgacggcggcggctggcgagagagacagcaatggcgcgggcgagaaacgggaaag

SEQ ID NO: 14172 - DNA, 5024 bp, Oryza sativa
ggggagagaaagagggcttgcctccttgccgctttggggaaaaggaggagggagagagggcgacgcggcagaggggggagctctgcctccgtcccttggaggcacgcgcggggagaggcggggccgagtcgatgacgacggcgatgacggcggggcggtttggagtggagcggcgacacgggcggcagacacggggcaggcgcggcaggcactgacggcggcggcgactggccggtcggccaccacggcgcgcgcgcgcgcgggcggcgcggcgatttgggcggcatcggcgggaacggcagcgagagtggagagggaggagggctcggcgcggctcacgggcagagcggggagagagagagacacagagagagacagagccggggagggagggggagatgggccgagaaggattcggcccatcgagcccgagggaggcgaatcagacttttgcggagggattgattttagaaggatttggattcgggattgaacttgacgatagatcggggatttgagatctgagatggtatggacactagacgacaagcaaagaaacggatttcgcaaataaggtttttaagagatagttttcccgctaggcgccacgacggaacgggcgctacatgcatccatgtgaagatccctcaagcgcacgagaccattgtagtgttttactacagagtgttccaaggtatcgtgtctatgatgacaatagccctgcaccaaacacacataggtaactccaacaaagaaaatacacacataggtatctccaacaaggaaaatattctagtgattgtaattcataaggaataaggataaattgatcatatagcttcacgattctagtttatagcattgaaagatatcgattcattgaaatagcgaacatttgctcctcactgtttttaccatcacatatactccctccgtttcaaaatatttgacaccgttgactttttagcacatgtttgacgtcttattcaaaaaaaattgtgaaatatgtaaaatatatgtacatgaaattatatttaacaatgaatcaaatgatataaaaataataaataattacttaaattttttgaactagttgggtgacccgcgcaattgcgcggctagcacccaaacaaaattatatattttttagtatgattttacttaaaatttattaaatagatatctcattgtcttaagactttaaaagaccaaaccttatcatcctcgtgtttctaattatatactttttaaaagtcacaccagttaccacctcttatgtcatttccttctttatttgcttgctcgatctacaactatttctattcattcttcttggaacctttaaaaattggattttatagtttttagagtttattgtcacgttgggtttcgtttttataatttatagatatcccgtcaaacgttgccattatactcctgtacggcccgtctactgtttcttctctttattgtcattaagattttaaaaatcgaacataattatcgtttggattcatttttactttctagaagtctcgccaaaccatcagcggctttgccattgtactcctctacgactcacccgctgccttccttctttattgtcattgagattttaaaatcgaacatgattattattgggtttttttttactttttggaagttccaaacctttaaaaattggacttgtagttttattttttataatttttagaagttccatcaaacgatgccactatgcccctctacagcacgtccgtcgcctactctttattgtcattgtgattctgaaaatcgaacataactatcattggaattcatttttttattttctagaagtcccgtcaaccgtcgacgggctgtgcaactatactcttatacaccccgcccattgcttctcctttttattgtcattaagattttaaaaatcgaatatgattatcagtgggtttattttttttactttctagaagtcccaacaactgccttacttgtttgcttcacgacctacctgacgtccctccttttaatcgtcatcaggattctatttggtgttttattaataatttttatatgtcgtatcaaccgccaccactctactcctttataggcctgttacttaatttatctcgtcatgtgttttagatggtcttttcttttaatagtctttatttttatcacaaattttagttatttataaattgtattcctaattgaaatcttattttattctaatttcataatttattttttaaaaaaatagttaatattgtattatgttcttttaatgtttttattttttatttgaaattttaattaatctcgtattgggttcttatatggattcttctttcaatattgcttatttttaattccaagtttcagctaattttaaattgtattcctacttgaactcttattttatttttgtttgctaattttggatttatttttatttttattctgaattttaattaatcttgtattgggttcttatatggactcttcttgtaatactctttatttttaattccgaatttcagctatttttagattgttttactacttgactctcatttccttttctaattttggattttattttatttttatttctaatttttattaatctcgtattgggttcttatatggaaacttgtttcaatattgcttatttttaatttcgaatttcagctattttcagattgcatttctacttggactctcctttccttttctaattttggattttattttatttttatttcggattttgattaatctcgtactgggtttttatatggaaacttttttcaatattgcttatttttaattccgaatttcagctatttttgattgtattcctacttggactcttctttccttttctaattttggattttattttatttctatttcgaatttcgattaatctcgtattaggttcttatatggaaacttcaatattgcttatttttaattccgaattttagccatttttggattgtattcctacttggactcttcttttcttttttttctttttctccgattaatgtgagaatttctagtctccacagtgaacgtgatgcctcctttttgagctgtcttaataatatactacctccttccctaaatgtttgacgtcgttgacttttttaaatatgtttggccgttcgtcttattcaaaaacttatgtgaaatatgtaaaactatatgtatacataaaaatatatttaacaataaatcaaatgataggaaaagaattaataattacttaaattttttgaataagacgaatggtcaaacatatttaaaaaagtcaacggcgtcaaacattttgtgatgaagggagtaatagataagacgaatggtcaaacacgtataaaaagtcaatggtgtcaaacattttaaaacgaagagagtatttatatagtcacatctggccacctcctttgctccgctactgcagtcatcactccatgctcggtgcgtgtgggaggaggcgacggagggtctgcggcgagggctagggatgacgccggccgacggcgcatcgtggactcgggaagaaggacgaggccagccgccaccgcgcgcgtcaagctgctggggaggaaggtcgaggccggccgtcgcgtcgggctgcggaggaggaggaacaccggccgccgccgcgtcgagctggatgagggaggaggtcgtggccgccgcatcgggtggctgggagcccaggaggagaggaggtcgaggcctgcgggtgcgggggcacatagggtagcggatcggactgggccttgggcctttgagaccgattgccgagaagtccgcggcccaaagccagagagaatgctttgtcagcctggcccactaacgctgtcacgtaaagcaagctagtagtagcatgttgcatcatcatccgtctcgctaatctaatcgctatacttcactgcgagagcacacttgtgtgatctgtcagccctgtgcccgcgagcgcgatttggtatgcgggagcaggagacggacgccgaactgccgcagtgaagttggcgaccgtacgtccgatgcgcgcttgcatgtcatccagggctaggcatgtccggctgtccgcaaagaaaattgctatgcataccacccatctattccactcacgtcaacagttgttaacggctacagtgcatatgaatatgctttttttcgattaatctatgattcatgtctctagttatctaagtgtatcttagatatagcagtactcatccgcaatctaaatgacgtacagatcgatacatccctctccgcttttgtcacttcttgttttctctttccttttttttccattatttgtcaatcaacattagtaaattaatcattcctaccccaaatctcttatatggtaagtattagaaatattacgacataaacttaaaatgtactcctaagtcctacaatttacactgtgcggtcctgatgacacacaacaaatgggaaattaacggtatatagccatggatcatgagtcatgacgctcccaatctttgtgtaacgactgagcccgtcagttagatggacactcatgcctcgtgccaccgtgcggccttcgttgccgccaactacacgacttcccagttcccacgttgctttgcattcgttgttcaaaactctatggcctctgttggcacttcatctttttctaagttgagcttaataattccggttactaaatgctaatgtcaattttacagtcaaaatttgataatttcggtatgtgttacaattttaatttgggactgtctatagatcatttgacagaaaacccttttataaatcttgcaaattttagaccacccgattgcttcaagattagtccagaccaccaaagcctaaaaatcatctctcttctcccgattccttcacgccgccgcgttcctcagcgcttccccccgcctccgccaccgccgctgccggcccagcgcgccgccgcccggcctcgccggctggctgaaaggtgcccccggccggcc

SEQ ID NO: 14173 - DNA, 627 bp, Oryza sativa
atgcaaagtgctgagagatcccctcataatttccccaaagcgtaaccatgtgtgaataaattttgagctagtagggttgcagccacgagtaagtcttcccttgttattgtgtagccagaatgccgcaaaacttccatgcctaagcgaactgttgagagtacgtttcgatttctgactgtgttagcctggaagtgcttgtcccaaccttgtttctgagcatgaacgcccgcaagccaacatgttagttgaagcatcagggcgattagcagcatgatatcaaaacgctctgagctgctcgttcggctatggcgtaggcctagtccgtaggcaggacttttcaagtctcggaaggtttcttcaatctgcattcgcttcgaatagatattaacaagttgtttgggtgttcgaatttcaacaggtaagttagttgctagaacccatggctcctttgccgacgctgagtagattttaggtgacgggtggtgacaatgagtccgtgtcgagcgctgattttttcggcctttagagcgagatttatacaatagaatttggcatgagattggattgcttttagtcagcctcttatagcctaaagtctttgagtgactagatgacatatcatgtaag

SEQ ID NO: 14174 - DNA, 1733 bp, Oryza sativa
ggctatgcatgaagaggaagtacataatgatgccgattattattcaaggccccaagcaacctggtaacgacatcgacgtgtacctaagaccactggtcgaagatcttaaacagttgtggaagaaggaaggtgtccccgtgtgggacgaggacaaacaggaggagtttaacctacgagcgctgctgttcgtaaccatcaacgattggcctgcacttagcaacctatccggacagtccaacaaggggtacaaggcttgcactcactgtatggatgaaacagaaagtacgtatcttaagcactgtaggaaggttgtatacatgggtcatcgtcgattccttgcagcaaaccacccggtacggaagaaaggcaagcacttcgaacataaggccgaccaccgtacgaagcctaaacatcgcagcgggaaaacagtgtttgctatggttaaagatcttaaagtagtgttcggaaaggggcctggaagccagcatatagagagcgaagatggtcacgcggtgatgtggaaaaagaactctatattttgggagttaccatattgggaattcttggacgtacgccacgcaatcgacgtgatgcacctcactaagaaactttgcgtaaaccttcttggcttcctaggtgtatacagaaagtcgaaagatacactggaagcacgtaatgatctgaagcatatggaacaacgcggcgaccttcacccggaaccaaaggagaaaggaagccattacttgagtccagccagctacactcttagcaaggcagagaaggaaagtatgtttgaatgcttggagagcataaaggtaccgtctggatactccacgaatatcaagcgaataataagcacgaaggagaagaagttcacaaacctaaagtctcatgactgtcacgtgttgatgacacaactgctaccagttgtaataaggggtagccttccagacaatgtccgggcaacaataacaaagatatgtgcattcatgaacgcaatttcgcagaaggtcatcgatccggatagattagaagcccttcagaatgaagtggtgcaatgtctcgtcagttttgagttaatatttctaccttcatttttcaatataatgacgcatctgctttgtcaccttgtgaaagagatccgtattctcgggcctatgtacctacacaacatgtttcctttcgagaggtacatgggcgttctgaagaagtatgttcgtaaccgtgctcgtccagaggcaagcatcgccaagggttatggaacagaggaggtcatcgaattttgcgtagaatttatcgaagaccttcgcccaatcggggtacctgaatcacgccatgaagggagactacggggaaagggaactctcggaaggaaagcaataacgacggtagacaacaatttattccgtaaagcccatttcactgttctgcaacactcttcattggtagctccttacatcgaggagcacttggctctagttcgcgccaggaacatcggtaagtccgatgcatggattacacggcatcacattgatactttccccgcgtggctacgacaacatctcatgggtaacgagtcgatcaaccaacaacttgccttcctggcgaggggaccgtctgggtcgatcgcgacattccagggatatgagatcaatgggtacacattctacacaagagcccaagacatgaagagcacgaaccaaaacagcgctgttcgtgtcgatgccatggga

SEQ ID NO: 14175 - DNA, 5648 bp, Oryza sativa
tctctctcggcctctctccttcgccaccactgcctagggcaaatccccgcgccgacgccgccgtatctcgccgtcgtctcgagctcgtcgtcctcgccgccgcctccgcctcctccgctgccgccgcatctctggggtgagagccgccgccaccagatctcccttcatgcatctcgatctctccgatctcgatctctctctgtcgcgccgcccgccacgagacaccgcgccacgacgacgacgcgccacgccgccgccttcgacgccgcgccacgccgccgccgcatgccaacgccacgccgccgccgccgtcgccacgccgccgccgccttcgccgccgcgcgcgcaatgccgccgccgccacgccccgccgccgccgccacgccacgccatgccaccgccgccacgccacgccgccgccgccacggccccacaacgccacgccgccgccgccgtcgccacgccgccgcgccaaccgccgccctgatgccgccacaccgccgttaacgaacgagaacgagaacgatcgaacgaacgagagcgagaacgaacacgtcaacgtacgttgccgcgacaacatgaacgagaacgagaacgatcgaacgaacgagagcgagaacgagaacgatcgaacgaagacaagcgagaacgagggaacgaacgtgaatgagaacaagcgaacgaacgtgaatgagaacgagcgaacgaacgtgaacgagctagggaacgtgaaatgcaatatatatatatatatatatatatatatatatatatttgtatatatatatatgtatatatatatatatgtatatatatatatgtatatatatatatatatatatgttacttcgcatttatcctaatacatttttttgtatcttgcagaaaagacgtgttgtcggagtcgtccgtcaagcctgagtggaagagctagccctagaaggaattggagcaggcaagtgacgtaataatataaatgattgttatatttgtaatgcaattaattaagattattagacctgtaattagacttatcatataagattgtgtagtgttctaatattatttgagttttaatataagattattttattgcaaattagacttagtttgacattattgactacagaattggtgcgactcctagcaattgactattgtagtcttaattagatttagcatatacgcacgaaacacttagcatacattactattttagtcttagcatgtaatattatttgagttttaatataatattactttatttgtaattagacttggtatgtaattattgactacggaattggtgcgacaagtagcaattgactattgtagtcttaattagacttagcatatacgcacgaaacacttagcatatacatgactattttagtcttagcatgtaatattatttgagttttaatataagattattttatttgtaattagacttagtatataattatttactagctagggttgtataatatacgtcacctagacttagcttatatcacgatttgtaattagactgagcacgtaaggttgtgtagggttctaatgtacgacatttacacttagcatacatgacttagattgttaaaacataaatgtctcgtgacttagcagatgtttcttgtatcaacagatggctgaccgcgatgaggaacagatattgtacgatacaatcgtggagggaagcagccagtactggaatgaagaagaggggaacgaggatccaaaccagtacttgaacgaaaaagggaacgtggagagggatgcggaggggaaccagcaggggcacgtggaaagggatgtggaggggaaccaggaggaggaggctagtggtagtcaaccctccgttgaacagaagagggcacgcgggcaacgaggtgcagcgaagaagcttgagggtcggcacatcataacggaagtggaagaagatggacgtcctagtgccccggccgaagccgccaagaactatgtacgtcacagcggttgggttgtgcgggataacgtgcctgtcagtacggtgtactggcgaagaacaagggcacgcggagatcatgagagctttgtcccagattcggagaaagagatgctgtggaccacaatgctcgagacattcacccttcctgcgggtacagaggacaaagtgaaaaggtggactctgaagaaaatggcagaacagtttcagagcttcaagggagatctataccagaagtatatactgaaggggcagacaccgaacttcgacacattcccaaagctaagggatcactgggacgagttcgttgcatataagacaggtgaacaagggcaggcgatgatggaaagaaacaaagaaaatgccgccaagaagaagtaccatcaccacttggggtcaggaggctatagcgtcgcgatgccgaagtgggagcagatggaggctagattgattgagaggggtatcgaaccggcaacagccaattggccggaacgatcgaagttctggtactatgctcacggtggaacgctcaacccagctgatggctcacaggtcttcggctatcagatacaagaggctgcgcgacgactaacagatgcagtggaagcctcctctcagggcacgttccgaccagacagagatagggacgagctgacactcgccctgcagactccagagcatccaggacgaactcaagggaaaggggtgattccttggaagattggttcaaggaggacatccacacgtacaggagtcggatgaggagcaagagagataccgaggcgaagattgcagacctagagttccgggtatcgagctacgaactcaacatgcaagaggaggtggcaaggaaggttgatgaacgcatggccgcacatcggtcccatgatccccagccgaccattcctcctgcaatggtgagcccgtcaggaaaccgtagcagctgcgcctcaacggggcaggtaggatcacagagcatggacgccatacaaacacaggacgaatcgacctgtcccgttgatgacatcactcagcggacaccatgtgagctgcatattcctttcaagaacttatcaataaaggtaagatttagccattccgctagttgctgcttatatatgttgattactaataaataatctctcacaacatgaaggtggcgtcgggcatggccatcccaacggacccttcaggtacttaccactgcaggccgattccagcaggatactccaaggtcgaagttgagttggtcgaaggcgcgtacgaggacctcgagctagattaccctggaggagacggtgagacgcatctacgagacacatgccatgccattattctatggcgcagggtgggcgacaagcggcgtctcgtgcaccatctcctccggctccgccatctcctcctcaggatcctgcaccgtctcctcctcatgctccgccagcaccgtctccacctcaggctccagcatcgactcctcctcaggatcctgcaccgactcctcctcgtgctcctacacctactcccccgcaagctcctcttccggcaccttcaaagtcaagggccaccccaactccaccgcttgcccacacaagggcaacaaagaaggcgaaagttgacgccgccaagaacaaggacccggggtacgattgcacgcaagaggagcttgacgcttacgttgcatcagaagtcaagagacaattcaagcctcgaagtccagaaaagaagattcctatagaccccagtgtcaggaacttcttcaggggtatatctgcatctgtcaaggaggccatcaagctatcggactatgagcgaacgctgaagaaagcatcttctggaaagtccaaaccagtccctcagcttggagagcaaccaaaccaggagatcgagccgttggtgaccggtaaagaaatgacgatagaacaatttattactgacaccggtctaactacggatcaattgctaggagtcgcaccaatcgaaaaggcagaagtgaaatacatgtacgaactcggtaaaccgcttgtcaagcctgagctgctgcagtccctacccacacaaatgtacaagttccatcagctgtacatggagatgagcgccaccggtagagagatgatcggagcgaggatcagggacacggacttcttgcaaggagatgacattctctggatcaatttcaggggaatctacgaactataccagctggacgccctcgacgtctctattataagttgctggattttgtaagtatatcgttcagttagatttcttactatacgtctcctttaattaattaggtccttgtatataagtagaccatagaaaataatatactcccttttatcgttgtagaatggagattcaaagggcccgacggcggagggttttcgatactggattcatcgaccctcggaaagtaaacgtcgcaatgctcgaccaatatccacaagaaacagaggacaatctcgtccatctcctgaaggcgcagcattacaagacgttcatactgttgccatacaacacagagttagtttaattttactgtcttcctagataccaaatttcattcccgtacgaacttgctaagtgtttcatatgtaatgcattccacgcacattgcagattccactgggtgcttttactcatcgacctggaggcctgcaccgtcaacgtatatgactcaatggataaaaaagagtctacgtttgacaaggttttcgaacttatagacaggtaccgtcataagttcctttgttaattaagaaaatcttgttatgttaattgctactacgaatcatagctttaaactccatgtagggcttggtatcggttccgtcatttggtccgcggcaaatggagagaaagacttaggcggaagttcaaatttcctatgagtacacatgctctacatttatatttctccgattcaaatacatacaagtgtatattaattagatctctcgttgtttgtcatttatttgtagtgcgcaaagcaaaagcagggaactaacttgtgcggctattacgtgtgcgagtattgccactgccttgcagaccaaatcatcaccacaagagagctcgatgtacgtacaaataaattcaaaatttcattacgtagcgatttcttgtttaattactaatcaatttcatacattcatatagtttattcgcatgagggataacctgaccacacacaaagaatttatcgcggcggttcaagaacaactcatgggattcatcaacgaagaaatccttgatcccaagggtgaattctactacgacggaaacacaattcaccggtccttagcttctgagctactacgtcgaaatcgtagctagctaggacatataatggattgtaattaatacatgactacatatgtttctatatgcatgtgtacacattttctataatgtaaatatattttgttcatatatatatctatatacatatgcatttgcataacatatatatgtataaatacatatatattatgcatgtatatacatataatataatataatatatatatatatatatacatatatatatgtatgcatatatatgtattgaaacatatatatatgcatggtttatatatatatatatatatatatatatatatatatatatatatatatatatatatatatatatatatct

SEQ ID NO: 14176 - DNA, 2384 bp, Oryza sativa
cccccagttggcccggtagcccggcccggtgtacccaaccgggactaaagatcgatctttactcccggttatttcacccgggactaaagatagcgatctttagttccggattggtactcccggtttggaaaccgggactaaaggggggttacgaaccgggactacaaagggtttctccaccagtggtacaggcacaagcacaacttctgcctgctgcttgcgtgagcccgcatggtaagaagctaagctcaacgattggtggatgtgacatagtcggacacgtaggattaattcctacttatagcattttcaaactgccgcaccggcaaggcgacatgacggtcactaaaacccagtggcactggccgccgccgtcacttcgtccatccgccgctgcagcctcgccgtcttctcctcggagagcgtcctggccatcctgacgagcgcgtcggcgttgctcccctcgtcgggcaccttctcgtacctcccggtctccacgttgaccctcgtcacctgctgccccagcatgcgctcgccgacgccgacgagcttcctcatgttctccggcgtcgcctcgtccagcgccgccgcggtgctcctgagcgagtcatcctggtcctcctggatgcggaggtagttcccctcgctgtggaacagctggaaattgacgccgacgtggatgtcgaccatgtcggagctccccgccatgaagatgtcgatgatgggcgccatccccctgtgccgcagccacccgagcgccccccaccgggagcatttctccgccgtgtacagcccctcgtcggaggtcagtccggtgccgatggacaggacgaggaaccggccgcactccttctccggcggcttcgtcaggagcagcggcgccttctcctccgctatcatctcctccgtgatcatcgtcatggctaccatcgtctgcagcacaaacacgaagcaaacgttgcaaacaaatctctggtcgaatccgacgaatcgtctatggattattggaaaatctctgatggagtgtgactgatacaggattgttggcggcgacgccgccgtcgatgaggttgtactcgcgcgtttcgccgctggcgtcgtcgtgtgtctggaagtagtgcgcggggaggtacgtcggcgccgccgacgtgccgatgcagacgtcggagagccgcgcgttcttcagagtcgagttcttcgcctgcatagacgcaggcaccaagaatttaaccacatctctcttcatgagaatatcaatggcgctcgcgcgcgcggcgcgcacgtacgtacgtcgtatgtggagaagatgacgggctggagcagccggacgtcgaaggtggggatgaccacattggtgagcgtgccgtccaccgtcgtttcgccgagcacctcccggaccatgtcgcggaggtacctgccgtcgtacttgggcccccacaccgcggcgacggtggaggcgagcttgccccacctctgggggaagatgcgcgggccgtgctcctggtagaacgggcaaatctcaccggcggcgaacatcggccgccgcggcccgtctccgtcctctttgggggtggcgagcatcgcggtgatcagcccgccggtgctcgtgccggcgatgtagtcgaagtagtcggccagcctcgcatctggcccgtccagccgctggagctcggtctccaagaactcgagcaccttgcctgggatgatcccccggatgccgccgccatcgatggtcagcaccgtcaccctctcgccggcgacactgccggcggcggcgctgccgccatggaaaaactcactatgaaacggttgagacatggcgtagcatatcctctaaatcaaaaccaccatcgaaatcatcactatcggtggaaacatcgacaaccattctttcacgcgacatgtcttcgattataaaattctctgcctcattcatctcgaaacttaactcttcatcgtcatcttccggattggcgaattccccgtgataggtccaaaccttgtagttggcggtgaatccgtactccattatgtgacccaatatttcaccaggatctaccaacaatttctgattcttgcaatgacgacacggacaaaagatctttgtcatattctccctcaaagcatgctccttagcctgatcaataaatttagatgcttccttaataaatatcggctgcgttctccgtatctcatacatccatgacgaccgatccatctaattatataaaggcaaaaaagttacagataaaaaaatagaccgcaggtatttcatacaaaagtttaaatgcatttgtctcccaaaaaaaatacaacaatacatgtaactagtatgtacgagggggtcggtaggttccaatacttatcacactgtttaaacaggt

SEQ ID NO: 14177 - DNA, 981 bp, Oryza sativa
ttatccatataaatcaattgatgtatggcatatgttaattacgcacgattattagaggtttcaacaagtttaaatcatgtatatgctagttatatgtgatacttacaatttttaaaagttttaaatcacacaggtggcaatttcatatgtatgttaattagagtttttaacatttaatttactagcattcatatgctaattataattgactagaggatttttaaaagttttaaatcacgcaagtggcaatttcatatgttaattagagtttttaacatttaatttactatcattcatatgctaattataattgactggagaatttttaaaagtattaaatttaatatatttttaaaactatcattcatatattagagtttttcacaatttaatttactatctttcatatgctacttatatatgactattcgaatttttaaaaggttaaaatcatgcatgtggcatttacatatgttaattagagtttttagcatttaatttaatataattcctatgctaagtacatatgatgattacaatttttattaattttaaatcatgcagtatgtacatacatatcttaattagagtttttaccaatataataatatcattcatatatatgctaagtatatatgattattggaatttttattaattatattttcttattacgatttatccacttaatttattacagccaaaaataatttttcgaagtaattgtcattaatctttgtactttaaataatgttaatgcattaacttctattttataaacacatatgtaagcgaaaatcatatgcagtgctataatctttagtcccggttcttaaccctaaccgggtttaaaaagaatttcgaaatagcgggaaaagatatttactcccggttgttgagaacaaccgggactaaagatatctttagtcccggttgttgagaacaaccggaaggaaatatcttttctttactcccggttga

SEQ ID NO: 14178 - DNA, 1383 bp, Oryza sativa
gagtaactaaaagcactctagcgtccatgaagcaaggaatagtttccacttatttgccataacaccatatccttaaatgcattagtacgcagatcagctcctattaacttaccttgataaggagatcacttcctgtcatgaagccctggctctgagaaaaacaaacatagcagtttcagaagaacaaatcatacagaactgacgtaatgaagatttcagaccaaaaacaatgaaaagagaaccacaccagaagcttttcagctgcttcacagatcttgtctacctttgcttcagataatcccttgattcctgtcaggctctacaagatggatccatatattgaaacaatatcagataattatattgtaagacagaaatgggacaattgaaagaatataatcgtcataaaccagaaatagaacaagtgggagatagcatgaagatttgggaacccaattttgcaaccttctttgtatgcatcatgaggccattgcaagtgtagataccagcatcctgcagcttcttcacatctccagagtttatcccttgcgagattactgtggacaagtgcacgagagatggataataatgcagagattatgctcaattgctcatagttcgaattcatggatatgaatgaataatttgcaggaagaaccatatgaagaatgaaacccagggagaagtcaggatcacaccaaaacaacttactaatattgaactcgctagaattagggagccaccagaaatcgtaaaagtacaagagggactcaagcttaaaccctaaaccctccaagtacacaactggttcaactaatatacactcaagttcaccaaaacacaactggttcaactaatgggcagaaccccacatgtttgaactagccgggggcgaattccgacgagttccaccaaacgcgggtaaaattgactgaaaatggggataaattcgaaccagccctctcacatgccacacatcgatcagcaggaaatagcccaaaacagatatcaaatgtggggaggcgaaaaatcccgaaaaaattggccacgatacgaggctaatttacgtccagaacacacgaaattgagggagaaaaactagaagcaaccgaacacgcacagcacaaaacaaccagaccccaaaaaaaaatggaaacacaaaataggctagaatccatctacttcaccgcaaatcagcatcaaattacaatgtgaagagtaaccaatcgaaacgcaaggcagaatgagcactcgcacgcgcgaacacacacgcgcacacgagcacgagccaagcaatgcagtgccgggatacgagacgggggaggaggggatggaaatgaggcggagggcgttacatacacttgtcgatggggctgcaggaat

SEQ ID NO: 14179 - DNA, 603 bp, Oryza sativa
tgtattgctgaatagtcctaacatccttctgcttgggcagtaaaataatcgtaccaaagtttaggctattaagaggcaacgatccctgctggaaatccgaaaacagagctaacaggtcgtcctttataattgtccagaaggcctgataaaactctggtgggaaaccatccggaccaggtgcagtattatgtttcatttggaatatagcacattttatctcttcttctgtaaaatctgccgttaaagactcattttcttctgcagagacttgtcgtatgtcgtcgacctgagactcatctaaaaaaatagatgaagtctgtgatgggccgaacagggtcttaaagtacttggtgatgtgctccttaagttgagcatcaccagtaatgacctcgttcccgtcctgcaattggaaaatacgagttttcctgtgacggccatttgccaaaagatgatagtattttgtgttagcatctccttccaataggtgcttgaccttaccacgttggtaccatttaaattcttcctccctcaataactcagacagtctatcatttataacatgcttaacatttaattcaaacctcattgagtatagtatgttca

SEQ ID NO: 14180 - DNA, 805 bp, Oryza sativa
tgtttgtaaattagggactaaactttagtccctctcacaaaaatataagtctctatcttagaaacttatatttttgagcccctctctcccaaacaccctcatatatatatcttgcttctaaactgttaatactccaccatccgttataaaatataaacaatttttagtatagtgtcaagtcaaatatttatatatttaactattaattgcaaaagaataaaaaaatcaatcatatcaaattgatgttactagatttatcattaaacaaactatcacaatatgcgactctttttatttaaaacatcttacttttataaatgtcattggttaaagtagtatctcgaataccgtgtcgaagatcaaaagtgtttatattttaggacggaggaagtaataaagatgtaagaattttatctataaataaattatttgtaatagctcaaccaactagacatgcactattttgggccttctggatcaatattttcccaaccactccttttgcacatcgatatttgcatgttcaagcttgaaagacatatgatggtagggatgaaaacggagcggatagtttctgtccgctccggataaaaacggatacggatacctttcggatcggataattctcggatattttggatacggatacgaatacggatattttctcccggatacgaatacgaatatggtatcagggttttcgtcggatacggataataattcggatatccggtgaacagtgctattcggatatccgcaggacccatgagacataccccatttctttctaactctataaccttca

SEQ ID NO: 14181 - DNA, 1969 bp, Oryza sativa
caaatcgtttggaacttaactgcatataccgctattgctttcaaacatttgtggtagataacatttcaataacagtgggacatgatgcaagcaataagactagcatgttatgtttaatgctatatatctaataggcattgatatgtattagaaatctgcaagagttcattcctcccccatgataaaaggccgtgtgttgtttaattgaaaaagaatccaccaagtgtgttttgcacaaatattttgcaatagtacttactggatggcgaggatcagcaagcatcggaaagagacctctaactatgagtgattgtcttgcctgaaagaaaagcatacgagaaatatgagatacaatagtcaggcataaaccagataacagaaagcatgttacatgaaaaaaatcagaaaaaagatcataaacatagaagggaaggactgattacatacttcaaatgcgccagtgaaactccacctcatatggtttgttttcagacgaggaatgacaacagatagaacaggcatggtgggcctgtacttggcaattagtctgcagacattacagataccagatgaaatatgaaattagttttgattaaactacaccattatcctgtttatattcacatctttctaccttgcagcgcgtccagatgatgtgaagcaaataatgacagaagccttcactttgatagcagctcgcacctgcaaaataggcaagaaacaatttcagactaagaaacccttgtttcatataaagactttgtgaagcaaaaaacaatggaatagtcaaaaatattttatatgtgcacaataaacgttaagaaattttgggaacaagagaagaaacacaccgcagaagaagcgatagactccaagtgggtcatgggctccccaacatatttcacagtccgcttgaagtataaatcttggttgaataccttctctgcctgtgaaacaatggacaaacaaatatgactaaatcatgttactaacagactgatatagacagaaaaacaagaagtgaattttcattgtacttgttgaaaattgtaaagaaaaaacataaaagtagaaagaaaattcacctcagcgcaaattttgcccacaattgagatagtctcaactgggtacagaccacggagagtctcagcaccaaggagaatggcatcactccctgaacaaaaaatatatggttcagatttttcagaaggcaattaacatcatcaacaactcaaacaactcaccgtcaagtacagcatttgccacatcagtagcctccgcacgagtaggcctgaggttgtcagtcatactgtccacaacacgagtaacaacagcaggctttccagccatgttgcacttgtgcagagcagacttttgaaacaaaaacacctacagtaccagaagttaaagatcagtaagcaaattacatatcaaattgaaaacagagcaattcttgctaaagaacttgaggactctgccactaaaagcttcatagccaaataaaaagaagcagagtatgtaggactattaattaatcaatgccctctgaactgctaaaataagtcaaaaataagatactaaccttttcaggtggaagatcaattccaaggtttcctcttgacagaatgataccatccgcctcttgcaggatttcatcaaaatgattcaaaccctgcaaataattaaagagttgataggtggtagaacaaatcaaagttggctaagaaatatataaagagtatgttgcaaatacctcaacattctcaattttggcaaaaatctgagtttggctaaggtcgcctaactttgagaggaactcacgtgcctgtaatgtaaggagaaattccagcactgtttagaatttcttcccaaataccaaatgaagaggtagaggagagtatatattggaatatagacatgcaatattttcactgtacagtagacttgcaaaactttcaagcacaacggg

SEQ ID NO: 14182 - DNA, 671 bp, Oryza sativa
tcctgcagcccgaatttttaaagattaaatcggattaaaacacttatattgattttaattgaattatgacgcaataaggaattatttttaaaaaggaaaagaaggattattgcgtcagcggctagggtttgcggtggaccgggtgcacggcagcggctcacggaaacgaacggccgagatcaaccctatccaaaacggacggccgagatcaaacggtccacgaccggcttacggcggacgatcccgatgacgtcagcgatgacggcagcgatgacgtcagcaccggcggcaactcgggcggctcgggcgcgcatgctcgccggcgaacgacggcacgtcggcgcgaacggagggcaccaacgggtagagggcgacgcggcgaactcaccggtgaccaaaacaacggcggaagggcaacggacggcgccggcgacgaggaagaagcggcggcggagaagcggacgaggacggcggcgacttgacgaccacgatggcggcgacggcgaccgacgacggcggctgcaacggcggcgcgacgcggctgaaccgacggcaacgacggcggcgactagggctacgcggaggcggcgctagacgcgacggcaggctaaggcaaaggtggcggcggatagaggagagctcgggggtccttttaaaggggctagcgagcg

SEQ ID NO: 14183 - DNA, 1616 bp, Oryza sativa
attcacagaactacaaaatacagcaaattctataatttagaatagcagtgagctttcacatattagagtttcatcaccaaccatgcaaatctcatataacaaacaatataatggtgagaagaaaatagtagaagctgaatgaagatttcaagtatgcattaatatttaacaacttaatttagcaatcactgatctggatatcattaggaaactgcaaggaagctaaaagtaagtcctaagatgtacaccctctctttggaagatttggaagcatagaaaaaattgtgtgtttaacagcattaatctcagtgtaactacagttatccaaacagtgaccaatgaatgttggatcatgcccagggcttcttagggagtttcctaataggtcgcttgggtgaggttgttttttagtttgtgtgtttttcatgtaaaggctaaggtttgttggtggtttggatgagggtgggcgttgctcccttccttgttcctgttttctcatgtattcaagaaaaaaagatgcactccctctgtttccttttatgaggcctaaagttttttcaatcttgttgaaaaacagaaggctttcatgtgaatttattgagccttttctttattttgccccctttatcacatactctctcttgcatataggaagcatcacacatgacactaaccatccactctcctattcctaaggtatttaattaagtatgggtagcatggtcattttaactcctcttcttagtattgtaccgccttagtcctcttgcccacccaaaataagagctatattttcaaatggaaggagtacatgaaacatcactaataaaacttctatgcatcataatttattttcgcaggaacttgtagcatgatattttcttctgcctaggaaaaaaattaatttggaagtcagaactttgctggatagtagatcaatcctattcctatcttcaccaaactcatgagactgtttagcaatgattgaaaggatgcgatggcaaaattatcaaggaacaaaatagatattatatgacgaaggcacaaggccattttaattccaaagaaaatggctgaaacacaaacggtagtcattcagttttaccctatctatattttttaaccgccctccaggcagccacaaacttatgtctccagtgtgcaaccaaccgtcctcatcaatgacctctctcttgcatgttttcaaatgtaatttctgaaactcatttaatatatttgaacttaaataggagacagaaatacatagcaagatacgttacgtttggatttcatccttatagtaaccaaaaaatatcgtagttcccctacacaaatttctccacgaggatatggttgatcctcagaggtgtaattcatttctgggacatccactagcttaatctctgaaaaatggcaacaggatttacattatgagagtgtgatagcacgcaaaaaaaaacaatattttagttgaagatgaaacctagacttatttggggttaagaaaggtaaatatgagatgtcacatgttttacatcagtgatgggttactatgcactacaactatatgaagcagacttgacttgatgggcgtcatgaacactaattcatagata

SEQ ID NO: 14184 - DNA, 1021 bp, Oryza sativa
gatcctaccctcgcggccgcggcccagcgcaaatcagacggactcccctacctcctcctccgacgagaaatttcccatcggaggccgtcgtctccgtctccccgtttgctactccggcgccggcgaggccacctcggtcgtttccctccctcctccacccactcgccttcccggccgccgcggagctctgcccccccccactctccctacgtctagctgcgctacttgttgtctcccccacctctcttcctctgccgccgcacagcttgccttcctcgtcgtctcgtctccttcagcgccggcgagaagccccccggccgccgagcttgccccgtctccggcggctaggcgctgccgcctcctgaccacgcgggttttctgcccctgccgctgaccccacccaccgccggcttgctagggcttattggataagatgtcgtccaagaagaactactacaaggagaagatgatgcggcggaagtaagtatcatttcatttgaaagatgtatttatgcatttattttgcaatatttcaactgattcgatgtagagacataatcgatatgttttggaactgtaggagaaatttattagaagttgattgttaaaaagaatatatcagaagttgcaacctgtgatgatatagttactgtttgcttgcaaaatagtttttgagatccagattctatgtagtagtgtgatttcgtgaatttttggaatgaaaacaaacgactgaagtcattgttcttgcagttaatcctatagccaccttgttagactgtgattagggtctaagggatcatacaagttgcctcactcactgaaccatcccacttaactagatgtctcgttcgctttcaacacactgacttgcattactataaaaagaaaggaattaggttcagtggtgactcctttacccatctgaaaaagttacctgcatgactgcccttatgtgtccgtattgtaggagtatatacatatcacaagctgttgatccagcagaatggcatttaagtgg

SEQ ID NO: 14185 - DNA, 1487 bp, Oryza sativa
acaccatctcctcctgcctcaaggccggcatgtcgggtaacggatcagccagcttcgatctcctcttacctccacccattgcgcactgttctaatctaatcctttcttcgtgtgtggcggaaattgcagttgccaggttcgatttctcgtggggagacgctgagtaccaccaggaaaccctcgaaaacctcaagctcgccatcaagtccaccaagaagctctgtgctgtgagttctcctgacaattcattcatgatctactagttagtcttgctgtctactaacatttgggagtcctctcgttgttgcgcaggtcatgctcgacactgtcggcccggagttgcaggtggtgaacaagagtgaggctgcaatctcccttgaagcgaatggcactgttgttctcacccctgaccaggggcaggaggcctcctccgaattgctgcccatcaacttctccgggcttgctaaggtataccttcagtagttcagtgttatttatatgaaatattatgattgtttttacttttgttgcaatcagatcggtccttgactgtttcctagagaaattttgtatgttaccattacgtcaccgcaatttgtagcatctgctatgtgaaaaaaattgactctttttgtcctttgcaggctctgaaaccaggtgctacaatttttgtggggcaatacttgttcactggcagtgagactacttcagtttggttagaggtaaaaatcttcagcatgctaaaactggtgttctgtgtttgtgatgtgtaatgtgttacgtccttgttagtaggatgtgcttgctgtctacattttctgatacctaatctccattctgcttgatataggtttctgaagttaaaggagatgatgtggtttgtgtgataaaaaattcggctactctggctggttcactgttcaccctgcattgttctcagattcatatcgacttacctacactgtctgatgaggacaaggaggtaaggatcgatcttatctcttagctaactgtagcaatatgaatatttctagtaaaactattattatttctgaagtttgattccctcactcaaaccatctgtagtagtggtattaaagcttaagagtatgcactgattccaggttatcagaagatggggagctccaaacaagattgacttcctctctctgtcttatacaagacacgcggaagatgtgcgacaggttagtgactaattacagtatggatagagatgcattttcctcatatttcctgtttgcccgttgtgcttgaaagttttgcaagtctactgtacagtgaaaatattgcatgtctatattccaatatatactctcctctacctcttcatttggtatttgggaagaaattctaaacagtgctggaatttctccttacattacaggcacgtgagttcctctcaaagttaggcgaccttagccaaactcagatttttgccaaaattgagaatgttgaggtatttgcaa

SEQ ID NO: 14186 - DNA, 506 bp, Oryza sativa
ttgtttactgtttcatatttgtactttgatcataactaactaatgatcaaaattatgatattcaggagaaaaacgaagttttgcatgcacgggttttttttattgaatggaacgagtgtgccactattctgacttcagcgaacttacttagagatcctcgtgatgcagacaagattatcgaaaacttgagggttggtgcttctaaatattctatgatccctgttcatttgattaactgctaagagtctcaattgtgttgtttgcagattaaagtgttgcttccaaacaatcggcgcaccaaagggacagtacaacattataatttacgttacaacgttgctctagttagtgtgaaggattaccgtgttctccaaccagtaaaaattcaaccttataggcattacgctagtgaattactagctgtagggtgtatcttcaaatctggcagattaatggcctcaagagggcgacaacttcccatcggtgtcacacatgaccgcaaattt

SEQ ID NO: 14187 - DNA, 1777 bp, Oryza sativa
acatgtttgtggtgtttaaattcacatgattccactcaataggggtttaaatcctggtgtggtgtatgccaatattacatatatgagtgtgcataagaatatcttaggaagaacatgtaactgtttttctatttcataacaaattaatagagtgcacaacataacccttaataatcaaagaattttagtgacagtgtaaaaattacattagttgatggtttgaatattataacaacgaggctgtgttcgggaggcgaggttgggaaccttgcctcctgacacggaaaacgaagcacgtgattatagtgagactaattaagtattagcctaaaaaacttgaaaaatggatcaatatgatttttttaaagcaactttcatatagaaaactttttaaaaaaatgcaccgtttagcagtttgaaaagcgtgcatgcggaaaacgagagaagtgagctgggaaagaggggtaaagaacacagcctaagtgatttcgcgtacatagcaatgctattgtaaatgattggagaattggagaggcgtattctcgttgcatgactggtttgattacactcatgcatgtttgtatataatcataacaagtcatcagatttagtagctgtacttcttttgataaatctttttggtaaattttcatatgatcctactcccattgttcctagcttattagcccaaagctttcacatctgaaaaaggcacaccgagtcaggggcgaaggcaggcctggaacaatttgagcttgggtcctaggtttgcctctacaatgatgattaaattctcttaattcactatgtaattttttttaggaaattaatactctattagttaaaccctacttagccctaggttaataatttctagctccatcattgcaccgaatggaacttcgcatatctgagtgagagccatgccccgagtgctgctttcttcggtaaatagttcgttaagtgtcaattataaaggaaggaatggagtattaactcgcactaatccttatcgtcatcattctcttcttcatcatcatcaccaccacgagaaacgtctaagggtattttggctagctcaccgaggtgataagctagtcggtatgggtttatagcctcaccccttctaattatttgatattaggtcattccctaatattcatgtttttatcatcatcaccatcgccagttcgccaccatcttcattgtgcctcattgacagtgagctcgaattacggctgtgttcttttggaggggttgggaactcctcccctccgcacggaaaacggaacgatagattaacacgtgattaattaagtattagctataaaaaattttaataaaaagattaatatgatttttaaagcaactttcctatataaatttttcacaaaacgcgtaccgtctagcagtttgaaaatcgtgcatgcggaaaacgagggaaagaacatagcccttctcgacgaactggaggagcaccccctccttgtactccatccttatgtcctgcattgatcgagcgatcgattgatgaagcgcgcgtggatgattattagagcagccgtaatggtaaagtaagctgctctctataaaacttgtccacctcatctatagactattttatagtaaaccatcttaatggtgtgtctacaaggatatctatagctgtttttaatacttgcatgtacatatgaaagacaatgatcattcgtgaataccatccctgtaactacacatgtggctacatgaaaaaaaaacacagaaacatgattcactt

SEQ ID NO: 14188 - DNA, 2767 bp, Oryza sativa
tatcttaaaggtgatctggaacatacacatttggtcaaaggcttggactatgctctacttcacaaagtacgaagtgaaatagaaaagaagcctgaagcagaagatggaaaggatacacagtcaaggtacttcccaccatactgcagctttagtttcacgccatttaattatactttctcttgatagttttgtaataatgagaagtattgtagacaagctatcagatccatgtttcatttcaaatgctgtaatatattgaaaacagtggctatcacttgcataatttttatgaaagcgcagagttgattccattaattattttgtgatacaacaaattgtcaaccttttttaggcctagtcctatttcttgtaatgggaggtgaagttaagagagagatccatttttctcttgttggaattttagtaggtgttttcctgttttgttgtggatgaatactgtcaagcagaattgttctgcgcatttcaattattcataattttactatgctttatagtggctgctggatcattctcagtgaaacatgatgttctgtacagcattctcattggaataatacaacaattgcttataggcatttctcttgatttgggatgtagcactatgaaaatatggtctcatgtccttcgtccttgtctggacgcacttcgtgagtttgtatttaactaggatacatatatttagcctgtgaatttgtgttgtacaggtctacaaaagaagatcaagcagtctcattccgcactgcagctgcaaaggtaggtttccttttaatttacaatagaattgatgttggctgcttatattattgaccatgtaatgtaatgtaacatggacactaaaagcagttcttggttcattgcagtctgtctatcaatggatcataaagccacaaagcatcataaagtcgaatgaaatgtttcttcctggtcggatggcatttatttacaacatggtacctccttcaaagttcccccttatgttaattacattttttttgtaattggtggtggccattttccttcataatatgatactacaatatattattttattttcatctctcatcaggattcatctgtacgaaacatgatgctgctatgttgcaaataaacgttattgctatttcaatttcgaatttttcaattctgtgctagcatgtaaatgataacatgcttatgttttgtcagcttttatagtatacatgatgcatgactatgtttcatgatgtattattgtttgtttctctgctcatcacctggaatgcagtacaatcaacatgctcaaactctcacttcactccacaatatgcaaacaagagaagaaataaaggaaggatgaaagaactcttcaaatatcatacttatagactatagtatagtattgcggttacatgtgtctggtgcaatgatttttatgtcatgcacatttaaattgtgattgcgatgcatcatggcttcaatgattactaatatacagtatgttcactatgaccatgatccatcttacaagtcagaaatcatcactagatcatattttgtatgcataatgttttcatttaatggatttaaccttccaaatgattttctgataataagagtaaaggtgttcgcattgcctattattgtggcatgtccagtactattgatttatgctatttgcaaataatttttttcatcattccctgctttgatttgaactacgggttttagctggagagtgattaatttcattaatgaaaccaggaggatggacttaccaatgatattccgacaacacttcacaggagcaaagctgattgctctgttccagaggtattatggcaatacatcatatgccacattgaagtttcctgaaatttattattttcctcagtattcttcttgcttatgcaggagatggtaactgtcagtgtggatggttctgtacttgataggattgctaaaatcatgtcataccttcgacttggatcatctgggaaagtcttgaagaaaaagaaaaaggagagggacacaaaaggtatgttacttgaaaattaaaatggattttgtgcagtggaagttgactgaaaaactaagtgacattaggaaaatgttcttggttaagataatatgtgaaatacgctgaaatgatttgtttggaagctgatacttgcattgtgaaaaaaagaaaagaaaagtatgattggtacttttttccacaatggttgagtcttgtttcaattgttttatagtctcacgtcaataatttaagtttgggtattttaagttatgaccatatgttacacgtttgttttacattatgaacgaattaattagttcacttaatgtatttgcaatgtatgtactttctcatccatatcttcacttgctttgctcgatgaagttagatatcttgattcttgttacgcagggaagaacagtttagcaagtggtgactacgatgaggtagctagacctggccaaactaatgggtctgctctgaaacatcaatttgaaaaggatatgccaccgccgccaccccctcgaaataataatttaagcaaaaatgagaaaccgtctgctccagttgctagagcagatgaagatgacatttttgttggagatggggtttactattctgttcctaacaaggaaatgagccagagccctgtctctgaagatatggatgagtccccacataaccatcagaagcagtcctatttcactgaagagaaacctatctatgggcccatcccaccatctgaccctg

SEQ ID NO: 14189 - DNA, 626 bp, Oryza sativa
ttttaagccataaagtgacttctgcaacttaacacaatacatgttacgatttaccttctgattcgggatgtcgattccatcaggaaccttcatgtaaatatcagaatcaagtgacccataaagatatgctgtcactacgtccatcaattgcataaatagacgattttgtactgccaatgatattaaatatcggaaagttataccactcataactggagagtaagtttcgttgaaatcaacgccaggtttttgcgtaaaaccttgtgctacaaaccttgctttatatctcaccacctcgttgttttcgttccgtttccgaacgaaaacccatttgtatcccacaggaaagataccacgaggagtaggcattacagccgagaatacatctcttttgtaaagcgaggctaattctgcgtcaattgagtccttccatttgttccagtcagagcgcttttggcactcttttatagacctaggttctggatcaacttggaggcactcagcaatttgttcagaaaaattagtgtcgacaattgtagctcttctatcaaaagattctccagtttcagagtaattgatggcaatttcatcaacccttatagactcattgtgatctcccgaaacaa

SEQ ID NO: 14190 - DNA, 23344 bp, Oryza sativa
tttttagcttcatgtaaggttgtaaatggatataaaagaatggcatgaaataaatatcatttcttgttttcattcacaatactaaagttttaatcctaaaagtggtaatagataaatttgagcagtcaacattaaactcgcatagtatgagctcctctcatcctaggtgacttggtgccatctgattaaaaaaaaaaagacatgcctagctccaaaatagatttgctccacctcctacctccttgattcaggacttctctgtttccccccacatcaatgtcttcttctatcacaaatagtagtcaacatagcacctgacggtgtatgatgaatcttcatagccaaaaaatgatattccagcacaaatgatcttccatctctttacaaccagcaaattgcaagcaatgacaggttgatgattagccatggcatgagaaagttcataactggtactgaccggccagggttgacggagctctagatcggcgtcgctgttgaaggtgggaaatgggattgttgcagtgatctatagccaccgcagtgggggataggcagctaaggatcatgcaggaaacaccatatctgatctaaaaagaaagagccatgctcagtgccaccaactgattagtacatgcttgcttactgatcacaaacaacggaaaatctcataaaatagcagcactgaagtcaccaaaactgaaagaaaaattgcatccacggtagttctcgttgagcaggacatccgctcctcatccagggtcaagcgccatccttcgttctgcaaaaatgagtaaaaaaaatcaacataatatagcacaaaactaaatatgactcaagtcaatagtacatatcagttccgcaaccaggatctcaagcacaaaactgaatactaccctagttagttcccttcctattcaatcaccattcctattcaatcaccattggaggcactgagttcagctaatccaattatatgaattcagggtaagagctgcctacatgtgcatcaaagggaagtgctatcaataacatgtttaacataaatgtaccaagtttcacccacgatgactcaaaatgatgtaattaattaagcattgactaatcacaagtttggataaggttatgttatccttattgtaacattatataatgagctttgaaggagaattttatctcctgacctagtagtaataaataaataaattatgacaagattaaaccaaaatatacatccatacatgccaaaaggaaaatcgaactttaaagattcctagactcgtagcattcgatcagtgatgaccttgaaaaagaatctcccaagaaatacaaggaagcagatgtaaaatcaaaggtgtttttgattattattctgtgatgaacaattgggcattggagattattgattttgtatttggaatttattcacgaagtggttttggagatgattggatttacaggtgaatttacaggatactgctgtgattttatgtggaccggtcagaccggctgaacagcctcggtcagaccgggcaccggtcagaccggtggtacagaggcggtcagaccggcccccggtcagaccggccactgtacctcggtcagaccggcctcggaggaatttttctaaaaattctaaaattgattttgcacgtggatatatgtctattggatcttctggtcgtgtgtctcagtactggattcctaaatttttattatcatctaatcccagtactgaggcttcgacttctgcttgtgtgtaggctttggtggcaagaaaggagaacgtgtggatcgtgaattccggttgttcgcggcacatgaccgtagagggggagcgtgaggcttcccggtattgctttcgagagcaatagagttgagtttcgagttagggtttcgagtttagtcgaaatttttgtaaggagtgctgttggtgcactttgtaaaaacagagagaatcaataaagtcgtcatccactttaagagttcttcgatttgtgtttaccaggtttcggcggtcagaccggcgggagcacagcggtcagaccggcggcggtgacaagcgcggcgagcagcttcggcggtcagaccggttgatctataccggtcagaccgacgacatccgagcggtcagaccggcaaggcaacttcggtcagaccgatctccatcgatttcgagggtaacttttatttccgctaaaagttttcggttttttgggtataccaaccattcaccccctccctctggttggcttagttcttgtgattcgatcctacagcagcagtatattatgtttccattttatatattttttgtcatgttctccacacaattaaacaatatcatagtgattctaagccattagactcaattaaaggaagtacattttcgtaatacatagggcactgcattttaaagcaaataaataacattttgttccaacccaaccaaatctccaggaagcaaacacacaagcatatctaaaaggtcacatatccggcgatgtttattagtgattccactaagagcataagcatatctaattaagcaacatcagacataccatgaacactgcacaattggatctaagttacagcagagtaaatacagcagagaaaagtttagctattccgctccataatccatgaagatttcaaaatacatctatcagtaaaaatagtacctatgcctatgtcaattctcctgaactaccattgtataattccacgtctccgctcgccaaactgctcgatcaaaatagacataaaccactttaccactctgcgcctaacatatggacttcaaagtttagctataagggttaaaatatctggggttggtgattgcaaatcacctgcatatacccacatatctggggttttgaaattgtatgttgaagtctagcagatttgaagggaaaaaaatagatggatatgtattacttgcagattatagtattagtagtttagtacaatgcctatctatggtgaattaccgaaagatgcatcacttgcaatgtttatataagtagaactctgtcaatagagtgcagatgcagaattcctcctcgatttccatccacaccatggcatatatttgtgtatatgtatgtatatgtgcctgcaattgtagtattcatgagatcgtgctaatcagttagtatactgcataaattaattgcaggaaagacagggtaattcaaaagaacatgcctataaaatcacatgatattttaatcaagtagctaaatgcataacacaataatgtgtacccatctgcaaaagaaagtacatgcctgcttgaatgatcaagagcagtggaggacaattgtgatcatctccaacattggtgttttcttgagcagaagattagcatgttccaatctattctgataccatgaaaaacaagggaaatttgtagtacaaatcattcaagcttaaacaaagattgctaattacttagaaataaattcagcaagcagaccatcagtggattaatgctgggctagctgtttgtgaacaaccaactatcacatgtcctattttgacccctaaagcacgaaatatttttttccttttgtccccagactatcatgaatgcatagaatagtatgttagcatttcaggcagcaacccaaaaattagttggcactaacacattggcgtaatacattccaaccatcgataacaaaattgcttgacgaacagggtggcggactgtttctgcagcattcaatagaaaacataatgtgcatgttcaaaaacataccttgctggtacatcacagccaaaatcaaattggccggtttgtaaaaaaaatcaaccaggccaaagaaaaataatgaactggaagggagaagatattgaaactggacaacggaagaaaaaacaaaccgtgcggaggagaccggtggcggcacgaaggtgggcgacagtgcgacatgagccaccgagggcgacgacccaacgctgctccggtggcggatttcgaggtggagatcaggtgagacgtggaggaaactggcgagtggggaggggagcggcgcgcgacggcgtgcagggcggattcgtggagagagaggaggttagggttagggtttggagagagttcctccggcgagtggggagaggagcggcgtgtggcgacggcgacctggcggctcatgacggggagtccgggagagaggaggggggcgatgcgtgagttgggggttgaagatgcggcagggaggggtgaggccgtgagggcgtgatgtgtgtggggggttagcaggggaggcgcggaaatggagccgtgatgagcgatcggcacgcggaagagaggcggagctgatcttgatcgttcgatcggggtagagaaatatgagccgttggatttgatgaatgagtaatgtaggtgtaaaagtgagttggtgaattatagggtagataataaatgtaagtgacactgttagagtgcgcagcccgggccaccaactgtggatcacccaggtcacattgggcctgctccaccacaggcccaactttaggttctgggcctacacaacccaaaagacaagtctgatgagtgaggaccgcccctaccttttaagtcgtgctctcccatcatcaattaccgatgtgggactaaacccaacaatctcccccatcacacatcgggcccaacaatctccctcgtcacatcaacccatgtgacctgaagacttgttacctgggcctcgggcctaacaatctcccccgtcacatcaacccatgtgaccccgaagacttgttacctggcctctccatcatgtgacccatggaaattgttacaggttccaaaccttgggctctaataccacttgttatccaactggccccgaaattaccatcggaaaccaaacacagaagaaacaccatagtagatccaaacataatgacgacaccgaggcacgatatttgataatggagttcagccgaggcctacatctccagggcactgattacgggcgctcctccccgatccagcatatacagcgtatcagagttacaacgactcacagccggtcaccgccggcagccgttccctctcgctatgctaagtcgtcatgcggttacaacaggcatgcccctctatttatgagagatcctaagacagagttcgactcttattctagttctaatacctcttacagctccaagtcctaaactgtaaccgactaagtacacatattcgacacaaactctaacagacactgtgctccaagtttaggttccgaccgtgcattttactctatatttaaaacagtgtaattgtttagcatcaaagttgcactactagaaatgtaatctcaagtactttattagcatcttatatttcaaactatcctatttaatttgatgttgcttgaaaaataatggtcaaacttgatccattgctagtcaaaaccaaaaggtatgtgtgaacggagggagtacatggcatagtcgaaactagaatgttcgcaaccacacttgcttgattaattgaagaatgaacagacaccataagccacagatgaaaatcatgggtaaaccagtaatttaaaagacacatactaaggacaaccaaaaatccagtcgtggaaaaattgaagaagaaacacatcaccgagttgaaatttggaaaccaaccggaagaatcaatgaaaattttgcaaatattgtttttttataaaaaaaaacaatcagaggctaatggttaatgcataatttcttaccattacgtaagcaagcaagattgtgcatcaatcctaatcctggaaatttgcgaagatatggcattcaatttgcctcacatacgttgtcagtcgtatttgtagtgatgtgtgttgcaatcagactttgatctatcagaaaataattgagttgtttcatgtaaactgtattctcctaggtaggtcgtcccttgggaaatatccaacgacatgattccactttaatactgatctagaaagcatgtgaaaattagccatgaccgtagtggcatttcgacatgactcggagagagagacgtcacttaaagagatatatcaaccattaatcatgaatgcacctctaatacattatttcgttattattataagcacctctaaaatatctaaactatgaatgttatcacaaggaaaatacattttcaagccccatgtgacccttcaaggtataacttttggttaaaaaagaagaagaagaagaagtggtgcctcctggtacctctcaagaacaatagaataaaatcactcattttgagaagttacagtgaagctcttccataccctttcaaggatcataaaatttctccagcaaaatagtgaatacacctccatgccctaaatagtgaatacacctccatgccctgatggtttttcgagcttttttttttattaaatccgtatcctttgcctctttacaaaatagtagcatgtttaacaaggggaatttagcttgaatctacctaaaccaaaacttggacgaattatatggtttgtgaggcctacattccctgtatccacaggtcaccccatgaacacttccaaggagtgacctgtgaaatgaggtgatgggcagtgtcatgtcactggtcttgattagttgtggcaactatcaaggggtactaatcaatctcaggcgtaagaatggcagctaatttcgctgataggccaagtgggcgatggtgagggcgcctcatctgtctacatatactatgatccatccccatgctagcactcaagtgacatagctaacttagctagctagatcatcttagcttggagaagacagaagagcgttatcttggaaggacaacatggcaactgcagggaaagtgatcaagtgcaaaggtctgagtcttggtttacactggttttttcatgtttgcagaactcttccaagatgaaattctcctgggaaaataaactcagaaatgcactgatgccgcttttggtcattatcataacacggacacaaatttcaggacactaaactgcatagattgcagaggaaaaacagaaaaatgtacactcatatgtcatgcagatttgaggtctgaaatattttttttttatggagagttggatttgggtttgcagcggcggtggcttgggaggccgggaagccgctgtcaatcgaggaggtggaggttgcgccgccgcaagccatggaggttcgcctcaagatcctctacacggcgctctgccacaccgacgtctacttctgggaagccaaggtattctgaaccaaccaattccatcactattatattcactttggtgtatggccaagaactacagactgaagttcagtgttgccagtgtctgaattatgcttgattttttgaccatctcttggtttggatgtgaagcagagtgtgaacaattcccaaaatatacagtttttgttattcagatgtttactagcttgaattttgttaatctttttggtccttggttgaacataagtctgaaaactgaatgattcttgtcaggggcaaactccggtgttccctcggatcttcggccacgaagctggagggtaagaactactacaaaccaagaacaccctcagcaagaaccattaatcttcagtggcacaaacaattaatacctccgtcccaaaatacttgtcgctttgagtttttgtttgtaacttttgatcgtttgtcttattaaaaaagtatggaattattatttattttgtttgtaacttgctttattatcaaaaagtactttaagtatgatttattcgcttttatatttgcactaattttttaaataagacgaatggtcaaatattgcaagagaaaagtcaaaacgaccactaatttgggacggaggtagtatcatcttggcaaaatagtttgcaattcatcgacgtgtaattctgtacaatgaaattcaggcttaaatagttgagtgatttttacaatcttaaaggaagtaccagaagtaccatattttccaatgtaaaatttggtacatcttatttcttatactaggaggtaccgaatttgtactaaaaattttggtacctcgaagtactgaaaaatttctctaaataattttgtttgtacgtgtgcataggattgtggagagtgtgggcgagggggtgacggagctttcccccggcgaccacgtgctgccggtgttcaccggcgagtgcggcgactgccggcactgcctgtcggaggagagcaacctgtgcgacctcctccgcatcaacaccgaccgtggcgccatgatcggcgacggccagaccaggttcaccgccaggggagggcagccggtgtaccacttcctcggcacctccacgttcagcgagtacaccgtcgtccatgtcggctgcgtcgccaagatccacccagcggcgccgctcgacaaggtctgcgtcctcagctgtggcatctccaccggtatgctaaaactttgtgttttttttcttttttcattggtgaggtttaagtaggatgatccatacaacatccacacacacaacaatcatggagaaatactgtactccctcccgatttttaatgtatgacgttattagcttttgatgtgacgtttgatcattcattttattaaaaaaaaaagctaagtatacaaataacattcattttattgtgaattgttttatctaaaaaacaataatcttaacttatacttttagatacttatacttaatttttaaataagaagaatggttaaacattataagaactggagggagtgctttctttctttggttataaatattgtatttgctgaaaaaatatgtttatgatataattaaaattattttcaaggtaaaacttttgccattgtaagagtagggatatatataatacaacctgaacctagtgacctacatacaccacaattatgggagaaatattgtacttctccgataacaaatatatgacgtttaaggcaaaattcgctcaaacttttgaaactccgaccatcaacttttttattatatttatagaatatagtacatttctgtaggatttggcgcgactgtgaacgtcgccaagccaccgaaggggtgcacagtagccatattcggcctgggtgcagttggtcttgctgtaagtgactgtcacttctgctcttctcagacagagtacgagtagcccttaatcatcttttttctcaaacagagtagtatttttgaaagaagatttctgatttggtgaggggatcatgtataggccatggaaggtgcaaggatctctggtgcttcacggattattggcgtcgatttgaacccggccaaattcgaactaggtaactacggctcttttttggaacctggaaaatgtcatttttctactgaatttaaactgtatgctgcaagaaccctatctccataatttctcataaggatattgctactgtttttattgacaaaaatatataagataaatccacgcaaattcagatgccttttttttttctaaaattaagacaaagggaaggtcagcatcagaatgtcacattgggtttcttttttcctctgcatttgcagctaagaagtttgggtgcacagactttgtgaacccaaaagattacgacaagcccgttcagcaggtacactctcttcatgctctcacacaagacttcaaattgtagtaatccttttgtttcatattatgggtgtgtttagttaacgctaaaattgaaaatttggttgaaattggaacgatatgacggaaaagttggaagtttgtgtgtgttggaaagttttgatttgatgtaaaagttgaaagtttgaagaaaaagttaggaactaaaccatgcctatatataagtcgtttgaacttttttttaagtaaaaaagtttaattaaatttatattaaaaatagcaatatttttaagaaaataagcatattattaaaatatattaaaagtgagttttaataaaactaatttaatattataaatgtgttgataaaatttttctataaacttaatcaaactttaaaaagtttaactgagaaaaaaatcaaaactacttgtaatatgaaactgatgagtggtacctttggttgagctaaatcctatggccgacgcgataactatttcaggtgatcatcgagatgaccaacggcggcgtggaccgcagcgtggagtgcaccggcaacgccgccgccatgatctccgccttcgagtgcgtccacgacgtacgcacgccgtctcatccactcatccatcatatatattttcagtgatcagctgtgtcaatgatctgaaccctctgcacgacgatgtcgccgtcgacgacgacgacgatgcaggggtggggagtggccgtgctggtgggcgtcgccggcaaggacgcggcgttcaagacgcacccgaccaacttcctcaacgagaggacgctcaggggcacgttcttcggcaactacaagcctcgcaccgacctgcccggcgtcgtcgagatgtacatgaacaaggtccaaattattaattaatccatacccttttccagctcgagattagtgatgatgatcaatgcctgcaaaaatgcgtcatcatcttggactgatcataacaattctgcctgatggattggttaattaattaggagctggagctggagaagttcatcacgcacagcgtgcccttctccgagatcaacacggcgttcgacctgatgctcagtggggagagcctccgctgcatcatcaggatggaggactagccatccagatcgatgtcgccgccggcgatcgacggcggcggcgactgtataaacggagaaaataagaggctaaaactacctatgctacagcaataagctagccacggttgcaggaatgcggtttcaggtttgttcatggagaacatgggtggacacaaattatatatactgtgaattttctgaaaatttacaagacaaatatgaaattgcgcaaattacgatagcggatagcctttggctcgatcaatttgagcctatatatgctggctccaccgctacactgtttgccgcctttctgtattgcgcatctgctctctctaatgtaatgtgcaatctatatataactaaattatgaaacataatgtgcaatctgtcaatctacattctggtatgaatttttgcagatcataatattcacctaagttgggtgaagacatgtttatcaacaggacggattataagagataaaaagttgacctgtgttgtgtcacagactgaacaccatccaaaatggcatcatttgaggcatcttcctgtgtgtcaaaacgacaggaaaggaatctggttagcgcatgattaaatcctatcatccccaaagtaatcacagagaacacaacaaatcctatcctctctgcacatgcaagcacagcattatacacagagctccccactctcagaaattcagaggatgcatgcatctactccctgtcatggtagcatacaagtgcagaatctttgggttttggggctccataattggtgagctctagctatctagttggctaatctgttcttaatttcttgtagccaggttgcaggatgcaacttgcagagacaggctgccccataaacccagtatcggctttaaatgagattaaacttgtgtgttagccacgctactttggtagtacatacaaacaaactcaactatgactactgaatatagttataaattttaataacaacttaatttatttgctatagaattcaagttagaactgcataggctgtgttcgggagtgagggcctcactctccagcacgcaaaacgaaacagcatttagagcgtgattaattaagttttagcaaaaaaaaaattttaaaaatagatcaatatgattttttaagcaactttcgtatataaactaaactttttacaaaaaaaaaagtaccgttcagcggtttaaaaagcgtgcgcgcggaaaacgaggagaaggggttgggaacctgcacaaacgaactgagccttaattggcagagtgagtataactcaattgattaagttacttgtggcggaactaacctacaagtcaataatgagatgtctgtgatgaattcgtcaatctcaaatatgataacgagatgtttatgttggcttcattaatatcaagttatgttgggccctctctcggaggtgaaaaagaagaaaagaactacctctaattatactctagatttctatcagatggagaattcatgcttggtggagtaatttgaggataaggtctgaacaatgtacagtacttctccttctgataaagttaaatggatgccttttggaaagtgaagccaacaaaatatattagattgcaaattgcaccacttgtcaaattatatatgttgctagttggatctacggcgtcgctatcagagacctttctaacacaagtgttttggcttcatgttaccagttctaccagtagacagattacatcttgtaagcagtatggatcactgacttactagtcaccataataaggtcacataatatcatagtggccactacactactagtattgaaagagaacgaacaatggggcaagacctaagtttaagagtttattaataaagaagtttatttacaaagccgagcaaagaaggaaaaatgacttaaaagaagaaaaccaaaaggataaaagatcttccgaggatacactagacgctgatatctaaaggggtgaaaacggtcgggaaattcctgaccgaccgacactcgcttctgattttattaaccaagctatatgaaaatggtaatcggtgaaaatagaaatagtaaacaaaatatagaaagtggaacaattttattgatatatcgattgtttctgtattttttttattcttgtgaaaatcaatgtttttataatgtggtaattagcaactttctaaatataccaatatccatagtccatatctctatttaatacattgttgagaggcctaaatcacttattctcgtgcgctaacttttcattctagcttgcaagtttcgctttaattttttttctagtttgatattttaatgtgtcaattccaattccattcatcacacatgtacagactccagagatcatgttgatatttgtaaacgagtaaattctaccggcggttcttaaacttataaaagtaagtttcacctaaatccacaaacttgtaaaacacgcatcaagatccctaacacatggtttattgtatcatcctggtccaaagtcccatttactcataggcttgactaacatgccacatggatgatgacatggccaaattcctccttttccacctttttttctaccattcttcttcacttcttcctccaccactagatgcactagcggtgacggtacaggcagccgcaacaccaaagtacaggcagccgcaacaccaaaggcaggtggagagagagagagggaggcagtgagagcgacaacgctagtaatcgggggcagaggcgctggtggcggggtagacccaacagcagagcgaatatcagagcccttagctattgttcttgagaaatggccgggtctggcccattcctcaaaagatgtttttactagatccctatccacaacaatttatacttctggttctggcgaacaaatcagcattaagtctgggggcaacgatgacctcagaccggttgtggtttgctctgatgggatttgagctgggaggagtagagggcctgagccaacggaggaggtcgcgaccagagaagatgggtgtcggcaaaagcttgcaccgatgggtacggtggaagcagaggggaaaaaaaggagaaaaagaaaaaaaatttcatgccatcatccacatggcatgccacgtaagaccatggtcaaaccagactttggataaggatgatacaataaaataagtttaaaaatctcgatgcatgctttggaagttcataggtctaggtgaaatctacttacaaatttaagaaccgttggtgcaatttactgtctttgtgaattgtggtgcccaccttttcctttacatataaataaactacataccagttaaagtccaatttgtcacacgcccgttgcccttcatgaagtaaaacagttggaaaagggccctaatctatatcaatattgagttgataaagaaaatatgttagaaattactctaaaacgatgtttctatgccggagatatttctttctttttattttgaatagaataataccactgcttctgttatgaagcaaacaacaaagcacaacgactacaaaactaaatttggtgaacttaataaaataacatgtctgaacgatgaagaaaatattggccatacaaattactccctccattccctccattccaaaatataagacacaaccacttttaacccaaaaaccaaaaactaattattataactctctagtttggattaccctaataaatataatacgtgcacttaataaaattaaagatcttgagggcctaagctagcggaggaactcgtggccggaatgaagatgtactagcaatgctttatattatggaataaaaggagtagaaaaaattcattatgtagtaagatatgtatatatactccctccggtatcaaatatattgacgtttgagggttgtgttttttggatgcaaattattgacgttttggtatttgattgtcactttggactgctatacccttgcatgcatgtagcgcttgtcttcagtagctcatcaactatagcaggctcccaacgtcccaagcaacgacgcattaactccaactttgaaactaaaggccatagccacacaggtcgcatgagagtttttgataaaagagctacactaaagtttttaataggggtaaaacaggaaataggcaacctaattaatcacttcttggtaagtgagattctgtccaaaacgtcaattaatatagaaccggagggagtagcttccaacattgaaaagaaggaccaatctgtacgtcacaccatcccgttgtattctgttaatccatttggcacatgcccaccaaaatgttagtacgatgatctccatgcaaaattcgaatccacatccatgcaagctcattaaactctaaaagtacagaattcaaatccaattgtgactgatgggcggctctgcatgaaccaactaatcaatacacatattttttgtgcagtgatcagtgggcaagagtccaaatccagccagccaatttgacattatttttcaggtcaactaatcctatgcatgttactaccagatgcagcatgatcatatcccaaggcagggcgccatacggattgcaaattcctgcaccaggattgcatggtttttgcaaccctgcaactgcaactgcaagcacgagacgaacctagctagcttgctctgctttgttggttaattagtcagttagtgtttgcattaaactaattaagcgagagaaactttgctagttaatcaagtgattagccgctcatggttatcctccaaaccgtggctaattgcacggtttggcacctaaacccatcaaaagcatcaaacccttcccacatgctacagccgccaaaagcccagaggtagcaggtgcagagaacccaatggacgtgattcttttttttttttaaacatcttttgtttttaattttaaaaacattctatctataaacttattttcaaatttaaacatttttagcggggtaatgttatttcgtcacgccaaccaaacttaacaagggttttgttgtttaaccatgctagacgggatggagtgactaataggtttacggagccatcgtttagcgaaacggcatatttacaagtgaaaagtaatttgtaaataaaacttttacatacgtgttattaacgatctaaaagcaaatgctgaaaaataaactttgatgaaaaaacttaaaatcagctccaaatgttaaggttgaaaattcaaattttaactgataagtataagtataagcgaaaaaaagaggccattagatttaaaaatgagtttcttgaggttttatttcccaaaataaaaaatatgtaaaaaataataataattcaacgaactcagtacaactgcacaagaggtttatacgccatgtgtcaggtccagattcgcgggcagaaagcgacaaggcgtatatacattggcgcggccgctgttgttttgatattttcagctttcctccggcgccgcggcgtccgcgctggcgctgccccggttttggactcgcgagaagtcaacgccacatcgccacgtcacccccgttgacgcctatgggggggtcacagccgatgacgtgtcggtctagctagctactggtgcttctgcaagtggggctttggaagattcagaaaaggaggaatatactgttactgagtttgcgtcagtttgagttttcagacaaaataaaaatatcagtaggaagaacagtgagctagcagggcatccagaatatgcgtactgtgaacaattggccggacctggattataatggtaggattgatgtagaatttgatcttttgaatattttttatacatttgtttttcttctctggtataccaaatattttaacctcattgaaattaggaaatagtatgtattttcaattttaggtagtgcgaaagaaaacgacagtctatatattgattatatgagaaatatcatcattttgaggagatagaaaacgataattttcagggttaagcttgcgtgtgcgagcaattgtttttataagttggtagaataaagtatagttgcatgaaaaatttgacaatgatctggtggaaagtttctagattgcaaaaaaatgctaagaatataagtataaattgagatccttgtaccattcaatgggagcctacagctcaaatttaaaatcgtgtagggtttgaccataccaaagataatgtatattttaaatatatataggtagaaaacttttctaacagtgaaaacacttaattttgtacataagtttagtgccatgcaaagataacaaaacttatattccctgtaatcataaatatttaatgttataagataagattcggacagacattttagaaattttaccatcattttatattataaaaatttataaaatctagtttgtgatattatgatagtagcattacttttttggacaactttgcacgtacaataagtgtttgtttttgaattaaacatttgataaatatagattataaggaagttttaaaagtttaattaaattttgtcctaaacctcaaatattaataaatgaagagagtatgtaggataccctattttgtgccaatcaaaaaattataataccaaatattgaaaacataagcaaagaataaacataaaaagcaattcatcttctatttatttatcattattactaaaataaaagctaaaataaaccaccacatttactctaagggaacttgcccacccggattcaaactctagacttggcaagacgtaccagttgacagcaaggcggctatggtggcttcattaatctcaagatatgtcaacccagtttttaggatgtgctcataaatgcgataggtttaaattaaaaaaaaaactgtagaaaaccatagttattatgacacgtgacatttaaccctagttattacggttttaaagtttcataaaatcccattattgtgggttttatgcgtgaatttactcaaaaatctaagatatagtttgtataaaaaataattattaagttttttactaaagttgatagcttaattcttcaccacttttaaaaaaattgtttgagatatgctgaaattcatcaagattttaataaagatggggtttataaaacattgagaccataaaacatgtgtttgtgtgcaacatgtcttagtacatgtgattttctgtaaatttaactatagatcatgtggttttctaaaatttactatataaattataaacacatagataatcattataaaccaacagatatcttagaaaaaaaggtaatatctcaatccacaaaagttgcacattatttttatcaccaagatcaaggagaaattaaattatcttggatatttcaaaatcaaggactaaatgtaaacatgcaatcaatgagtatttaaattactccttggattctcatcaaatatttaatttatctcttcatttaagttttaaatgcataaagtctataaataggaacaacttatgtggaaaaaactaaaatatgaaatatgtctaacttttgtggatggaggaagtattattcctcatcacaagaaaaaaaaagtcaatgcattatgcttttctaaataatctagattaattcatagttggacagatatgaccgcatatcaacgttaattactgccgatttgactgttgattaggcatatcttagcactaaaccttactgaaaattcggagaattactattggagagaagaaaaggcatccatcctccttgtcttcactctgcaatgcatcatcatccgccggaaaccggaaaaccaccgaagctcgaaaaccggcggaggcaagcagcagcagcatgcagcagacgcagagccttcctcttcttccaagcaaaaaatattcagatgacgcctcctcctctttcccccctcctccacttgcttgtcttcaggcgtacttgcccgcgagactcctaccactctctgatccctatatatacaccccctcctcccctctcgtctcctcaccagaattccaagcaacgaactgcgagtgattcaagaaaaaagaaaacctgagctttcgatctcttcggagtggtttcttgttctttgaaaaagagggggattaatggcgacagccgggaaggtgatcaagtgcaaaggtccgttcttgctgttcttggagcggttcgtgagaaaattagtttgatgttttgtggggaggagaagctgattagatcgggttttggggtttttgcagcggcggtggcatgggaggccgggaagccgctgtcgatcgaggaggtggaggttgcgccgccgcaggccatggaggtccgcgtcaagatcctctacaccgccctctgccacaccgacgtctacttctgggaggccaaggtaattaatcagcatctgccatggctgagctttctcaccttctcaagcttgcaagaatgatcagtgactaactaacttggtgtgtgtgtggtttctgctttgatcttcgcaggggcaaacacctgttttccctaggatcttgggccatgaagctggagggtatgtgtaatctgaaccaaccctgtccaattcttgttcttctactacactgtttagtggttcagtctattctgttcttgtattgttttttttttgttttaaaatggcttttggtgtttagtggaatttagtgtgtacttgtacgtcataggttgtttggtttatggtattcggttactaactatagttagtgtgcacgttggggagtcctgattagtcagtggcattttcattaagttcagtaaagaaatctaccaagtgtccaattgtgcatgatattttactggtttggtataaaatcatatgaagaatcaaagaacagcgtcattgatgacatatacaacgacaattggattcctaggataatatacttttcttcatgtgctcctctatgctagtgctttattactttctctcctttgatgttttgaggtactcaaaggaaaaagacacactgaatcattatccatcttatgaactgtttaaacttgacttacttatcacttctctgctcaaatggaccccttttttttttccatttccatggaagatatatgtgtaatcctaacaatcaaattgatctaacaaaacaatttttttgctcacagcattgtggagagtgtgggagagggtgtgaccgaactcgcgccgggcgaccatgtcctcccggtgttcaccggcgagtgcaaggagtgtgatcactgcaaatcggaggagagcaacatgtgtgacctcctcaggatcaacgtcgaccgcggcgtcatgatcggcgacggcaagtcccgattcaccatcaaggggaagcccatcttccactttgttggcacatccaccttcagcgagtacaccgtcatccatgtcggctgcctcgcgaagatcaacccggaggcgcctctcgacaaggtctgcattctcagctgcggtttctctaccggtaagatgatggatggcttcatgattatgatagtagtagttttcacagtgaaatttgaaaggtctttttttttttgatgcattaagttgatgggattttgctgttcttgcaggttttggtgcaacagtgaatgtcgcgaaaccgaaaaagggccagaccgtggctattttcggtcttggagctgttggtcttgctgtaagtgacacgcacaaagatatatcatttccatttgatttgcagattgttgagatcttgaaactcaaactgatgaatgtttgtaaaattacatgattataggctatggaaggtgccaggctgtctggagcatcgaggatcattggtgtggacctgaaccctgcgaaattcgaacaaggtacaatcttttatcatctttgagtgaaaattacatgtttggtatatgttctggattgaacactgaactctgcaacttgttttcatctcttcagctaagaagtttggctgcactgacttcgtaaaccccaaggaccacagcaagccagtgcacgaggtacatcacattgcctcactaatttctcttattatcacacactgttcatgacatgaagtgtacaagcttaaacatcaactctgcaatggtgattctcaggtgctgattgagatgaccaacggtggactcgacaagggccgttgaatgcacgggcaacatcaacgccatgatatcctgcttcgaatgtgtccatgatgtcagtctctttcttacaaacatgaaacatgatagtaacaaattgaagatgatcatttcagcaatgcctccagttctgctgtaaactgtatcctgaaaactaagagtggcaatctgaaacctgaatccagggatggggcgttgcggtgctggtcggcgtgccgaccaaggatgatgtgttcaagacccacccgatgaacttcctcaacgagaagacgctcaaggggacgttcttcggtaactacaagccgcgcaccgacctgcccaacgtcgtcgagctgtacatgaagaaggtaaaaataattgcagaacagaatcagatttgcaacctgaatgtgcattgttcagaaatctatggtcagtgattccaatgagccactgattgatcactattttatgctaatgatttctggtgtttgatgtctgaaggagctggagctggagaagttcatcacgcacagcgtgccgttctcggagatcaacacggcgttcgatctcatgctcaagggggagagtctccgctgcgtcatgaggatggatgagtagagatgatgatgatctatctctctctctctctctcttgcagtttcagtgcatacaagaaaccaaaaatgaaagcaaaaaatggatgagaagtttgaggttttccatttaagtttaataatggtcgtgagacagggcttgtgtggagtcagctctgtttactccctcctttcatggcttgatcttgtttattgtcagcattgtggcttagcagattttcaccagttttaccctgtaaattagtaccattctgaaatcgtaataaactactagcagtgtgaggtactattgctggaactgaattgattgtgcagtaaagaggtgaatagcagccagtatgaaggttttacaatttgaacatcgaaacgaaatccacacgaaattcataaatttcatcgcatcttgctgaagcttaccagattctatcgattcgatctagctccaataggtcgatgggagcatctattgattttttcgacagacgaaaattttgcaagggactagctagggagttgtcgacagtttttgaggtccaaaactttcaaattttttgactacaggatttgtcatcaatggttataggggaacaatccacactagtacaaaccatgaattttagtgtccaagctgattgaacaacaagaaattggcctacatgtagaagggaaaaaaactttcaaattcaaaagtaatatgcgctcctaaaaaaattgcaaatcataattttatacaatgtaactaccctataactatcatgtaactactctgtaattagggtgtaagtgctatgtaactagggtgtaagtgttatgtaactactctataactaagatgtaagtgatatataactagggtgtaagtgatatataataaaaaagagttattgctaataagaaggtgcatggcttagcttaacgtgtgcatcatgttcgatgactgccttgcccatgcgaacttttttttaattctggccgtatatgttgcacgaatcctagagcgcatccaatggctagaaaatcgaaagttttccaaacaaaaaactgtcaacagttttttagcaaaaccgattttgcaaacatgtaaaagaatcacaaatatagataataaacagttctaaaatcatttttttcttccccgcaaaaaaaatcaattttttctatataactaagtgcaaatgcattataatcgagtgtaactacaagttaaatatacaagaataaaaatataaattttgaattaagattctgctgaaaaaattactccctccatccacaagagttagatatatttcacatttgagtatttccaaataagttattcctatttgtaatctttatacaaccaaagacttaaactgttgtgaatagaattgattgagcgagagagattgagtgagagagagaattgcacacaagaatgtagagaataaatgagcgatcctttattgataacaatggtcaacagaagacgcgatggtttgggaaccatctcgtccgttgttagaatcgccgtgaggcgagaagaggtgtggggcacaaccaaccatcgtgtcccagatttattgctgctctatccatatagatggatgagatcacccaaatatttcataacactcccccttgatcgaatccagctttgatcattgctcatttagtgttccagatatctgtaaagataatcttagaaataattatagttaaatacatcacgtaaaactcctcgaaaacccagtgggaaaaataaggagagaaccgtgatatatattattgactattttagatctatgagtaaagctcatagtttgatccaaaatagtataatgtctacagttatcatttagtaaaaaccccagtggggaaaagccaaatgacaggacatataagcttatgttgatattacctcgttaaaaactttggatgagaaaacctaaagggtaa

SEQ ID NO: 14191 - DNA, 10635 bp, Oryza sativa
ggactaaagttaagtccctggatctaaacaccacctaatactcttcaaagctggtcgattctgtccaggctacagttggtgagaacaattaaccaagagagcaaagaggaggagtagccatggccgccgcagcgattggagggatgcttgcctcggccgccatcaaggagacgacgagaaagctgggttccgccatcggaggtgagatcaagctgcacagggacttcaggagggacctggagtgcttcaggaacaccctggaatcaatcgaagcggtgatggaggacgcggagaagaggtccatcaaggagaaaacggtgcagctgtggctgaatcggctcaagaacgcctcctatgacatctgcgacatgctcgaggagtttgaggccaaaactgctacaccagctgcacgaatggtaaactgtcccttcctcctagtcctaggctagctacatctccaataagtcttcatactttctttttgtttggctttaatgctaatagagccctggatccatctaggtgtgtcgattatcatgtcttgattttcttccaacatagttgtggttctggattaatgttccactttttaaagagtatcctctgaattctccatatgagatatattaacctctcttgatttggggactgtttgggaactccacaattctttgcacggctaaaaaatttgcaggcacatgaaaccaaatctagttaatggaaagtaatttcacaacatccctatgtttgtatcaattctgagcgcattctactgaaagcattatgcatatgtactccaaagaagcaaatctgaagcaaatcttaccttgctcgtccatcggtccaacccctccgctcatccacctatcatcgatgttctcccctttattgccatcatcaccttaaaaaatactccctccgtttcaaaatgtttgacaccgttgactttttagtacgtgtttgaccattcgtcttattcaaaaaatttaaataattattaatttttttcatatcatttgattcattgttaaatatactttcatgcacacgtatagttttacatattttacaaaagtttttgaataagacgaacggtcaaacatgtgctaaaaagtcaacggtgtcaaataaaacgaaacggagggagtagaattctctccatcatcccaccgagcatgcatgaaaccaccaaaactcaaacaggtgagtcactacttaaatctcagcaagacaaccatatcgatgtgaatccattcctcccaacccagaccaagtcatttggtcttagaaaccaacacaagcaacagcggtagtagtaccatctgccttcaagacatgaagatcggcagcggtagcagtagtaggttcccaacaacagcaagcagcctcggctagaaataagtggagattgaggagaaagagagataaccaaccaaaagttctacacctcaaacacaccacacacaccacagctcaaccatagcatccatggtcaggcaaccagagagagagaaagagagagagagagaaagagagagagagaggtcagaggagtagaaggagaagcaggagatagatacctgagttataagtggagcaaggagcttcagatcaggaaggtgattcagttccaggaagggctgatactccaggtgccaaccaagctccaagaggagaagaaacactttaaccaatttcaggagaagctacctgtagcagctcaagcaagatggcagaaatcagaacaaacagagcaaagaaaataaattgacaggagaaaaaataatggaggagaagaactaatacaagggaagcacaaaagagctcaccagatcaaaaaaatctcaccactaacaccagaacaaatcaaatgcaagattgtcaagcagataaatcaagaaagaaataaattcgaagcatgtcatcaagtacatggtttactatgattaggagttgtgtggatgcatctatatgaacttaaactgaacaagaatatctcagattcagcaaaaaggattatattaataatctaaactgtagaatagcctatgtaacagataggatatattttggtctaaatgacaagtagaagatattttttgtttcatcactaagatgggttgaggattactggtgtatgtagttcccctgatattaggttcagtaaggtttaattctataggataaatcttgaacacataattagttagaattagtataaccttaacaaattagcctctagtttcaacaataccatatcttagggacatcagtagtttagattagtatccagtaaaacatgtagcagtatgcttcagtacaagaattattctgaatatatagagtaatagacagggtagatatatttacttatgacatgatatctcgactaaattatagtagtatgcataacagcagaaaactaaattttaacctgtagctccaatcagtcagtagtttaatctttgccataattagcagcacagaacatcattaatcagtaccatatttaatcaataatctaagtccttcaattataaacaattctagcatgactacctccgtcccaaaataagtgcagccatggttttcagcgctcaactttgaccattcgtcttatttgaaatttttttgaaaaaaattaaagacataagtcacgagtaaagtactatccatgttttatcatcttataacaacaaaaatgctaattataaaaaaattttaaataaaagaaacgatcaaagttgggcgcggaaactcatggctgcacttattttgggacggatgtagtattttataggttgaatttcttttcagtagaaaatctagagcaatctgttaactgatcaagttttggggagtagtatagatgtttttcttttcctgattgacaaaaggatccagccatgcgaattgatgcaatgctaaagtgaagctccataaggagctgatgtgtacagtgtgtttactagttccaatagccaatcacttatacatgccgcaagtaagataaggacagaatcatgttagggtgctttcaatttcagtagtgcatttcataggattactactagctatgtgagcattcattcattcgtccataagaccataacatatagccatcatccaaccatacatagcaagtctcaattgaactagaaacttagaactacaaacagataataaccattagcagagcacatcaagttgaacaacaggagcagtctatagtcatcacggttggttcatagaaacatcaacccataagaagagaacacaaatcgtagcacatgagaggaagggggaagaagttcacctctggaatagataaccaaccgtacgccacaggagttgcgcggtgctcagcaccggccatctcggcggcggtagggagtcgcagcagcagcagcagcagaggaggaggccagcggctagggttagcttgggaccggattcgcggggagctgcgggaccaattctgggtggcggcgactgcggggtggttgttgggggggggggggtcgccggagtggggcgcggcagccggcgcttgggagagcggcggcgttgtcggcgctgccggaaagcggcggcgctggagtctggacagaaggatgggcttttcgagttggaataagttcactataggtaccttcccctatttgtcccttatttgtcgggtcttttaactatttgccactcttacgatcggtgcttaacgatttaccactaggcccacatgttatagacacatgagggcccatatgtcatagatacagtgtggcaaatcgttaattgtcatgtcacaaaagtggcaaataactgcaaaaccgggtatgacatgtcccccaacttataaaaaccaggcaaacgtggtccctcagcagttttgaagtctgttttggctgacatggctcatacgtggcttgtttgactaggtctccgtcccacgtggcattgacggggcgcttacgtgacaattatatctcagcaaaataataaaaagtgtggccccacatgtcagctgcaaaaagaaataattttaaaatggtggggccatgtgggccccacatgtcagcctcactcctctcttcttccctctcccttctatctcttcttccctttcacccctctctcttcttccccggcagaggacggcgcgggtgggcagcggagcaggcgagcttcggcggcggtggcggcgggcgtggtcggagccgccccccgaccggagcgccaccggtcagcgtgaaggcgagcagcgcggtagcgccctggaaggcgccatcgacgctgccatccgtgtcaccgccgccgaccaccggaccatccgtgtcgccgccgccgacctccgcgcgcgccgggacctccgctgccgacctccgctgaccaccggaccatccgtgccgccgccacgtcgggacggcatcgccgagcgcctctacaccgcgctcgttgtcctcccgccgcctacgccgcgctcgaaccatgtcaagctccctcctctcccgccggcgagctagaagggcggcggacggctaggcgagctccctggcacaaccaatcgactaaacaaattcttatcccttcctctttgatctcttctccctgctcaatctcaagaacgtacattttgtgttcgacaaattttcatcaagaaatctcaagaacacgtcgtgttcaggcaaaagaaagacaagaggcgatcgatggcaatggccatggcgaagctgttcatcaccgggctgagcacgacgatgacctgctcctccgcggtggtgttcaagggcgccgccatggccgtcgtgctcctgctcaggctggtccagctcctgggctacctcggctacctcctcctccgcgccatcagagctgccgtcgagggggccgtggcagccgccttcgccgccgccggggacgccgtcgcggcggcggcggacgccgcggcggggtggagggatgccgcgtcgtcgaacagcaccgcggcggtggcattcgtgcaggccgccatggggaggcccgaggcgctgctcgccaagatgctcgccatcttcggcctcgtcgccttgcttcgtgcagaccatcatcccggcacgtgcggagggtgtctgggtggtcggcggcggcgacacggatagcggcgtcgaagaaggcggcgacgcaacggaggagaaggaaggagagaggatagagagagagaaaaaagaatagcgaaagaggggcagtgaggattcagcctgcaagtggggcgggtcgacccattaggtccgtggcccgaacctaaatttgtggcaccaataggttttcgggccggcccatattttcttaggtgacaatgggtccaggagtcagttgaccctaggggtttttgggtcagccttgttcgagcgctccgcttgctcgcgttcgcatggcggcggcggcggctttacgggtcccggcctgaggcggtgcggcttcaccacggatcgagccggcggcggtggctcccggcggaggcggcagcggtggcggcgcagctccatcacggatcgaggtggcggcagcggctcccgacggaggcggaggcggcggcagcagcggtggcagcttcgacttcgcggtgtgctccaccgtgttttgaggcggcggcggctgggcgtgctctttcagtcctcctcccgtctccaactccccccaagacgtactgtggttcccatcgtagcaactagcaacggattctttggttcttgattttctctttcttttctttggttcttgattttctctttcttttctttggttcttgattctttggttcctcttctatgcagttccttctttcggcggcggatggaggcaccggcgggtggcggctacctgcttggtggccaaccggcgaggtgctacggaggacactccaccggcagcaacggcgagggtttcggaggacacccggccacatcgccaccttcgtccagctgggtttctctccctcgtgagcacaggtatgatttcctccatgaaccctgtcttgttcatctgtcttgctcggttttggtttgatttgtatgtacagagacaaagtaaaagaccatctatttaacacaaggcagtaggaaactttaaattagcagtaattgaaactttctgctagataaatgaagaaaattagtaaaatctgcaaatttgtgtagcacctgttagatgattcttgtattccttaatctctgattgtgaatactattgggtgactgcagattacttctgtttttcaagcatgttttatatgtcaaatactcaaatgcttagaacacctactgccttgattcctctgtctgtctgcatatgctcatgtcttgattcagttgttgcccataaaacataaatgcaccatttctttttctgagagatattgcaggttattacctttttaaaacaattattgtatattttcttcctgtcattataccatgatcattcgatctctccatcatgttaacctgcagaatctggacctgggtgattcaacgaacagtgcaagctagggaatgccaaatgatgcccactttgatcttggaaggcttcattttgtttgatctcaatctaatgaaccggatatttgggttgttcagatcgatttttgtgaatgatataagtatatgcatgtacttagttttaattgaactaggtgctagtacccagtgattgatgtttgtacttttgaatgcaaaagattaagtcatttcggaatgtttgcattgggtatacagtgtgttctggtatcgtttttgattatttatttattttgctgtagtgatgttgatttgcttcgcacaatcgaaatttctagtatgttagtatgtgttcagatataatgccagtgtatgtgttttttttcctaatttcacttgatatctgacttatataaaattagtatagtaaagaaatgatatcagtgtaatatccaatgattgttcattttttaatcttgtataattgaattgagtgtatagctacttgctttaatggttcaatgataacacattaacacagccagtcaaccattcactggacacggtggctcagacgctcagtgcatccagcccgcggctatggtgggtcggccacgaacctaacgggccggctccacttccaccagagacggggcgagtccaggcaccaagatagatagggtcagagggtataggggatgggtcggcccgatctgccccctttgcaggctgagtgaggatgacaggtggggtccacgtgggccccaccattttttaaattattgtgtgtgtgaaactaacatgtgggtcccataatttttattatttttcggatcgaattgccacgtaagcgtcacgtcaatgccacgtcagatgaagaccgagtcaattagccacgtaggcgccacctcagccaaaaccggagtcaaatactgccgagggaccttatttaaacggtttcgtaagttgggggacctgttgtacccggttttacgatcaagggacggaaatcagactaggcgacaaatagagggacccaaagtgaacttattcctttcgagttttggagactttgctagatgggctagcccaagaaattaaatgcagaattatttagaataggaataagttcactttgactcccttctagtagccaaatatgattcgtatccctaagccacaataccggatatcttggcccctcaactattaaaatcagtgcaatttgacttcctcgacagttttgaaggacggtttcgctgacgtggcacctacatagcggtgttgacctagtctttgttccacgtggcattatatatatatgacccatttatcattcacccaaaaatatttgtgggacccattgacatgggacaaataccaggtcaacaccgccatgtaggcaccacatcagcaaaaccgccctccaaaaccaccgaaggagttaaattgcaccggttttaatagttgaggggtcgagatatccggtattatggttcagggtatgaatcagattcggccactaattaaaggagtcaaagtgaacttattcctttataatacaaaagaacgtatgagaattgggacatatgtaaattagtttaaactcttcaaaactatttcttgcaaattctgatgtactggtgtagttacttagtattattcagtccatctgatttttaaaattaatttgaagtgtacattttctttaggtcaatacaaatacaacttaactttttatatcataattgaaataaaaatattccttcaaaatataccttataaattatttttttcaaacaaaccaaaatgtatattctattgaaagcaatacatttagaggctattgaataattttttttctaagtaaataattactctttcttaaaataagagtgtaatatgtgttttggaaacctatttttatagtttacaattaaaatttacttacacagacaaatcaaaaatacatctgacttcacctatacaaaggtaataaaaacaagttcacaaccctgcatatgcatcatattcatatagccattatcatatttagtagtattttattatttctttcagttggtcatttatcttggatttttttggagttctccgttgatgtattcgttcttcgattgcgggtatctcaagcaagtacaacacttttgaccatctattgttatattttcgtaatttcaatttatatgtataaccttgcattaaattgtactttaggaaattaaaataaatatgttgatggatttgattgactagtggagcagccggttatattatgggtgcattccgaactttccattgtcatggggtttcagttgcatatattgatcatcataaggttttgttatacggtatgcaagcattgtagcgatcgtgtcgaccacatgacctggtatgggacggactagcctagtaatactttcttattggcttatatctgtggtttatggacttccatgaacctcgtgagcttgggctagcgatgaggattatgttgttgcggaattcgagtagaggatgtggattgctattgttgccggatccaatgatctgctgttgttgcagggatcgctgcaaaggtatgacatattggattgatgaaaagtttgtgttcttgttggcatacaccatgaagtgtgcttcaagcgcggacgggcgtgagcattaaaatgtttaaggcgtgtgtgggtacagcgacacatctttacagggtgtatgaattatgatatgtcactccttgtttcgtgtacaaattgcgaagtcattaggaaaggaacctatcggaggatctaatacctatgatgccttatatgcaatagattttataattacttaatatgatcttttataacactattttataaacatgcataaaattccttgttgggttatggggctttggagatatattattatgcaggtgggttatgggcatatatttgttggattgctacagttagacttgttgagtccctttcatactcatcccttatgtgtattcttcatttgtaagatgattgaggtaactcttaggcgacaagaaagttctacacaattgatttgatcaagtgccttagatctatacatcaactagaagttgaaagtcatgaagaaatagaagaaagtcttcaaggtgttaatagtgattattttgacaaaagctattttcttatggtttttatttcatgggctcctctacaattgtttattttatgctactctagtgtggccatttcactgtaagttggttcttaatgagaaataagacatagatcggtattctacctcagaagtgaaatgcgaaggtcactatacaggtccaaagtgccacaaaggaaaaaatacctggtccaaagtgaaaacattggttggtcaaagtaaaatttactcatacatggtcactccttaaattaacttagatcagggtgtcacgtaggtccataatctcgcaaattgcttatctaggtctgtaatattggtttaatgtatcactcgaagtccaaagtgcctttgaccagtctcaagtgccgacgtggctgtccacaatggaaaacatcttgtatctaggcccctccaaaagtacggtacccccaatctgactcccaccaccactcctaccgcgcccctagagggaaaaaaaagagatgattagggtcggcaatcagagataaatagcacaatagggagaggatggtcttggaagtctggtgcatccccatcatcatcgtgaagatgaacgatggaccttaggctacttgaaaatgatgagtagcttggaggagccatggcagtgacgatgaaaagatgccacactttgcctcctccctcgcctcctagacaccctacccttaccgcactttgcgctgccaccattttccccacccaaatttaaaagaggggagatagagaagagaggagtcagatcggagacaaattgagagagaagggctaagtgcaaatttatcaccatggtgggttttaaaggaggctaaaattcaagatgctggttaccgtggacagccatgtcagcaccctagacctcaggtgatatgttatcaaagcaagattacagatataaatgagcaattacaagactagtaatatgcccgtgctaaacgctacg

SEQ ID NO: 14192 - DNA, 14090 bp, Oryza sativa
cttcgcatttgctctgagtggtagcatcttctactcttttatgatttgtgggcaatacgccacgacctattgcgaggaacatgtctatcgagctcctattactagagcaatctaatggtgtatttctgaagcaacccgcagttcgatccatgagctcccaatcttgtggtgacttcggagagaagccctccatacaatcacaaaatggttttctactgccatcgcagacgccaaaaggtccgcaagtagcaatgcagaaactgaatggtccgcaggcagcaaataaagcgcagggatcagtgggatgggcatatacttcttgccaatattgattaacttgcgaccaaatgctcaacttgagctggccagacatgtctattgagacaaatgaggaagctaattcgtctgatgagtggtacatgaagtattcctcttcatcattattaacataagatggcataaggaaacctttggtctgtgaattcatctctagttgcgaattatgtaacggtatgagcatgttcgtcaattgtaccgatgaccaggtcaaatactctatgtaaggatctcgacgccacaggataaaacccctctcgttcagttggacgaaatatgagccgagacctggatcaataaggtttttctttgatataccggtacgatgcaacccggtgaccttattccacccaaactttgcaccaggaagcacaagatctgtcgcgtcatcaaagctctgccacagataaacatcagataggctttctatgacaaggtttccactatccaagagaattgcactagtattcatgctggttttggcttgtgctgtcctattggcaatttgtctggaccatactgtggattcagtggcacggtttatgatgatggcaaggctactgccatcttgtgagaatttcagctgtgctagattaagctcgtgatcagttattggcctctccctgtttgcaacccacacggtggtacaaactggaatctcgttgaaccatatggcgaggtaccagccaggagatgcaatgtttttatacttacttccagcgtcttcagggagtgtaggcttgaagaagccgagcgcgaacttgccatttctcgagatgagcttttcgccaacggcgagcaactggcccgccgcaagagtgtcatttgtggcatagcatgatggagtgtgcattgagaggaggaggaggaggagcccgagataggcgtggaggggaggcatggaaatattggagaagcatatagtagcagagaatatattgggagtacgtatgtatagcagaaagtcgattcaagtttgactgttgattgttgagcggcgacgctagctgccgggaaactgaactgtcagattaagtgttgatttggacatgagtggcaagcatgtacgaaccatggaattaattaggcaggaggtagactaattagtctccgttgacgccatcggcgtttaattactttggtcaatcaccaagaccaagcctctccagactggcagatttggatgcatatatgcagctgcagctccagttgctgtacgcctgtatattggtggagaataaaatgaacaggaagctactgttaatctgcacatatgtgtgttgctttgatacctgttttaattgatggggaaacagaacaaatatttgattgtgcaagtctgtgactttggcaggcacacggcaacttgagattattgtctattacgacgatacaggagtacgggaccatatatagccactttgtaccggcctactgagtaggaagaagagatgatataaataacctctagtaagtgacaatactacgcgttatgttcttagcacatcactaaaactagggttgaaagtgattaggatagtttctaccaccggacattttttcggattcggatagtttcagttggatatatccaaaaatttttgaattcggatatttttttttcggaaatgtaaacgaatatgatataggtgatctgtcggaatcggataacggtaagatactatccggtatttttcatcggatatccagtactcttatgcaaaaacatgtttttttctctacttaggtagaacaaaacaaaccatataaaaaaacaaggaatagcaattaacatacaaacaaatggaaaaattcaattctgaaaaataaccactcaaattttcaaaaacattcaattcaattctgaaaattttaaaaacttttaattcaaaaattgaaaagtttcagttcgaattcaaaactctcaactcagatttaaaaaattctactcaaattctagaacgtttaattcaatttcgaaattctcaactccaattgaaatgttcaacccaaaatttaaaatattcaaccaattttcaaatatttcaatgtgcctacgaaaatttcagtgatacacattaatttatttgtttcatgataacataaatttgtatggaaagtaaacacaacattttctatctccccatttttaaaatattgatgttttgtttctgaaaactaatggctatatctcttcctcgatttaagaagcttactttgaggggccttgatatttcgataattattcgtcaccatattcgtttcgattcgtattcgctccgtatctgtattcaatatatattcgattccgttttcgtatctgggtttccgatttcgattccgagaaaaaaatatgaaaacgaatatgatagagctagtttccgaccatattcgatccgttttcatccctaactgcaactagtaagcgtgcacgtggattccacgtgactaaaaatttaataaatagatcaggggttgaggttagaagatatcgatattttgggatagaaaagttaaggtttgcttcgaggtttcaatcctagttcgtgagttgagagagaagtgctttagatgcactttgtacacacatattgatcaaacaaaattgatctactttcaagagtttcgtcaatacatgtttttttttgggatcccaacggtttgattggagtacattgtgtggtctaaccggtgggtggtcacattggtggaagggagatggttcaaccggcagtcagaccggtggtgtgcaggcggtcagaccagcagcaatccagcaatgtaaccggtgcaacttcgtcaagttgagggtaacaacttttattttcactaaaagcttttggttttttggtgttcatgacattcatccccgtctgataggcttggttctggtattcaatcctatagagctcagcgatgccagatctggcatgggggaacacggcaatggcgggtatggcagtggggagctcaacgacgacgagtgtggagctaggagctcagcaactgtgactgtggcgctgggagctcaatgacagtaggtgcagcggccgggagtggtgatggcaaatccggtgttgggaagctcgtgatgccgaatctaacactcgagagctcgatgtcggcggtccggcggtgccaaccttgagaggtgcagatccaccgtcgctggcctcaggagctgtaaggcctcggcggcgacggacagtagtgatgaggacgatggcagcggcaattgatgtgggctagttagggtctcgaattttggaatttttattctttttcacaagcagacggcttaactttacggtttacaaaaatcacttctcacgcacgggtgtactgtctgcttgaaaaaatgctgatttttacatacacctaggaggaggcaagtgttatagcacataaaaggaaaacctaaaaaattgaaaatttcccaccagatttcaacagcatgccactcagccatttgcaaaaatgggttttagccgtttgcaaagattatctttcttagtgttaaccgtcataaattttggattatgttcctgctatttgaagaatatgcttatgcttcttgaccaaatctgcatataaattaatgtcctttggatggatgaattatctgtatacttaatatatgggaaaacctcaaagacatatcacatatgaatacacaccggcctacgtatagtatatctatgcctatacgagaaggattcttctgaacaggaatagagagttccgaacagataagcaataagacagcagctttggcaagatcttgaagaccacttggattcaaccagcatttcgtcaaaagacttccaactttccaagattatgtctagaagtccctgacgaatactagtcagggctaggacagggtcagagtattgaatcaaccaactggccatcaacccattgagccaagctgccaagaagatccagaagatcaatctcgacaagatcattagctcactaattagtctaaaatagatccgtatacatccttgtaaacataaattttccctcgtttgtcaatgccaacaggacataagtttattaatctgagaacagcctaaacctatataaaaatcttcttgcatcttactgggatatataccacagaggagacccgagtatacattttactgacaatactattctatgacaaatatatactcacattttgcatggtttagtgcttttaattttcgaagtagaaaataccacagccaaaattttcaaaaaaaaaagaaagaagctgcggtctgaaaaatccattaaattttaactaaaaccatcaaaatgtgagaatttgtcgaaaccaaatgaattcaaccaaatatgatcaagatttcaatcatctggggtactgaaacttttgaaattttggtctgaattttctttttaaccctgagcatgttcagcttgcacttgccgtctatctccaaaacaactagttggataaactttggatactcgtggcatgcttttcaaactattaaacagtacgtttcgtgtgaaaactttatatatgaaagttgttctaaaatataagattaatttatttttcaagtttctaataattaaaactcaattagtcacacattattgccatctcgttttacgtgaaacacttaatctttatcttcatcttcaggatgttcaaacaccacctaagtaatggtaccagcttcttcaattttagggtatatgtcatccgtccgatcaatgaatagcaaaacatacacaatggcaggtaattttagttctatcatatttggatataatgcgtgcatagtataatcagtcattaggaaaagtaataagaaatgagattactcaccagcaccacacagtaaaactaagcaattgccagattattacattggaactttcaatttgctcaaacaaaagactgattacattgaatacaaagtatttatgaaatattacaacactgaaactatatatgagacctttcggttatggctgcaagtagtcttggcatggggggcatgtcaacctcctgtagaccctcaagaaagcgaaccacttcacccattgttggcctatcaatttcatcttcttgaatgcaccaacatgcaactttacaaactctttcagcctcttccaaattgaaatcaccatgtaattctggatcaagcaaattctgcacacttccctcatgaagtttgctgatggcttgcacgggaaaataatcaaaatgataatggttgcttgtgtatgcttcagataaattccttcttcctgatatgatttctagcagtaccataccaaaactgtaaacatcaacttttggagtaatagcgactccgctaagccactctggggcaagataccctttagttcccctgaaagtagttagaacccgactaaaatcccttcccacaaatgccgccatcccaaagtctgcaattttaggagcaaatgatgcttcaagaagtatattttctggcttaatatcgcagtgtatgatgcattcacggcaactctcatgcaagtaggacaatcctctagcaactcctatggctatttgatgcctagtgttccagtctaggacagcaccattgctatgaaaaaggtgggcatcaagagaaccatttaccatgtgttcatacacaagtaacctcttatcaccttcacagcagaaaccaatcaatttgacaagatttatatgttgaatcaatccaagtgaactcacctcagccctgaattgcttttctccctgatgtgaaccatcgagccttttcaccgcaatagtagttgagtctcttaatactcccttgaacacagaaccaaaaccacctgaccccaacttttctgagaaatttttggtagcatgacttaaatcagtgtatctgaaggctattattccactgttgccttggttgtggtgtaatgttacaccacaacacttgaatttgttccgccaaatcaagaagaatagcatgagcattagtaacccaaaaccggcaatgcttgcagcggtaacagccacaacaactggtttttgtttgtttttggtcgtagctggcatatctttggcagctaggcgaaggtaaagagtatcttcagaaagactttcaatgctgtcatgtagctttacattaaggagttcactatgccagacaaagcatgtgctatctttgtaggcataagcattgcaggagcagttactgagacaagattcggcacatttgctttgagtggtagcatcttctattttttcggggttagctggcaatgcgacccgagttattgtgtggaacatgtctgtcgagctcttgttactagggcaatctaatggcgtatttctgaagcaacctgcggttcgatccttgagctcccaatcttgaggtgacttctgagagaagctctccatacaatcacaaaataaatctgaattgccattgcatacgctaaaaggtccgcaggttgcaaatggagtgcatggatcaggaggctgtgcatatacttcttgccaagactgattagcttgtgaccaaatgctcaacttgagctggccagacatgtctattgagacaaatgaggaagaggattcatctgatgaatggtacatgaagtattcctcttcgttgttgttagtataatttggggtaaggaaacctttggtctgtgcattcatttctagtagcgaattgagtaatggtatgagcatatttgtcaattggacagatgaccaggtccaatactccatgtaaggatctcgacgccacaggataatgcccctctcgttcagttgaacggaatatgggccgagacccggatcaataaggtttttctttgatataccagtacgatgcaacctggtgaccttattccacccaaactttgcgccaggaagcgcaagatccgtcggttcatcaaagctctgccacagataaacatcagggatgctttctatgacaagatttccactgtccaagagaattgcactagtgttcatgctggttttagcttgtgctgtcctattggcaatttgtctggaccatactgtgtattcagtagcacggtttatgatgatggcaaggctactgccattttgtgagaatttcagctgtgttagcttgatctctagatcagtgattggcctctccctattagcaacccacacggtggtacaaaccgggatcttgttgaaccatatggcaaggtaccatccaggagaggtgatgttgccatacttacttgcaatgccttcagggagtgccggcttgtagaagccgagcgcgaacttgccgttcctcgagacgagcttctccccgacggcgagcacctgccccaccgcgagggtatcattcgccgcggcggagcatgatggattgtgcaaggagaagaggaggaggaggaggaagaacccgagatgggtgtggagtggagacatggaaatgttggagaaagtagcagaggatggattggagaggcagaagcatggatgtgtgagaagtaggtgttgttgggacttgggagtgtgtggtgatatatacaggaaaattgatgcaagtttgactgttgatattgagcagcgacactagatgccgggaaactgaactgtcagattaagtgttgatatggacatgactggagcagttgtagactagtctctattggagtttactttggtcaatgaccaaagaccaagtaaagctgtagctacatgcctctccaggctggaagatttggatgcttgcagctgcagctcccagttgctgtactcctgtgagctggtggagaagaaaatgaacaggaagcttagtgtgaacctgcacaaatgtgtgttgctttgttagctgttttaattgacggggaagaagagaatggatttgtagaaacagaacacaaattgtttgactgttcaacttcagcaggcacatggcaacttgagattattgtcgattacgacgacacaggactgcacatggccccacttgtaccggcctaacgaacaaatatataatctcaagtagcaagtgacagcactacgcgttatgttcttatattagcacattagcgaaaagaacaggactgcagaaaaaccagctacagattaaccgctaaacaactcattccaaaacacagttgttcttcctagtgaaactaacctagcaatctcattgacaagacagagagttcttgttactgcgaactttaagccttgcattactaaataactaagaggtgcttcatctagctgatctattgttacttctttctcattttttctttttttaaaaaataactgaaccggcagaagaactgccaattgtattataataagtcggagaaaaaacatagccaggttacaagaaaaggaaaaggtaacacctcggcgagaaaatcctcgccaagcacctcagggaaaaaaaaagcgccactactaggattcactgcgtcttctttcttttttttgaccaggcatcaacaaatatttccttcctccagacagaagactgcatcagtatccaaaatacaataagtttgaggcagagatgtgcgattcaatcaacaatacgtgcaatactgaatgccctttcaaagataaggaacaataatttcaaagatgaaggtaaataagaagccagataatgtatcaatgtcagataacaggtactaagatctattccactagtcaacaaattgtgttcctgtccagaattactcatgcggaaactgtgttaacaagactaacatgaaatgaaagatattcaacaagtaaacagttcaaattgtagaagtcaagttattctgtttctatttatattttcatggatcgtacttgacaacaaaacacaatggatcatgttttccttttatcccttctaaatacagttttcttttttcagttttcctttccttgttttctaaatctctatttccagttctagttatttatttctatcatttgcaataaaaaaaaaatcagaaatactggaagaatgaaaaaatgtcaacagtaagcttacgttttggttgttgtttcctctgcttgataataacttttttgtccaatgtactcaaccacttcccaattttgtaaaccccctcatcaacttctttacagtggactttcactaccttaaggtgttctgatattgcagctggtttccacaatggattgtcattctcttctgtttccaattccaccatagatttatattcctgtagcagggaaataaatttcaccttcaattaatcatgcacaacaactttaacaatgcagcagttgtaaaaacatataccttggaaattttaagagtgagcttccgtagaactggtgagtgttcaagaatacaagctagtgccgagaaattagaagcaagacaccactcattgagtaacaaacacttcatcttgctaaacaaagggcaccatcttaaatcacttctgaaaataaactggataaagtgcaagcgagaaagtcaaccgaattttgttgtgaatacaataatttaagagccaagacatagtaatgcatgaaacatattcttaagaagttaaaatggtgaatcagatacaggaaataacataaattaaggagatatctgataagatgttaacgtaagcttactatgttaggtccagctatcaacttcaaattctcagcttctgttagacctcctaggagcacgctttcagaatcgtcgctaacctcatatctacaatgacagccatcacagtattcatcttcacaattaccagagtaactattactgcacgagtcatcgcaatcctggtggggtctgacagatgcttcaactaatgagggcattcttccgagaaaaggagttctgccacaaaaaccttcaagtaagagcgtaacgaggctcggtgcataaatgtccgtgcggtgatactcaccgaattgacaatggaagatatgaagacattgtatcgaccgggacaaaatctcgtaaacggaatcaaagccgcaattcttggtgaaatatagctccttcagcgcaggacagctcgagaagttaaggaagcaattcttcaactctataccagagagttctatcttggtcaagtgtggcgagacaagaggcatgcccttgtacacttcaatgtctatctgatcgaggttatggatcttgagcacctgaactcggcacattacggcatacatgacccacagcatgacgcattggtatggatcactgccgccatcatgcaccacgtcctcgtatcggcgtgcattgaacctcaaatcaagctcgcgcaaaggcgagatgccacggaggagcaccagatggttgacgaacttcttgaactcgtcggagctcttccatctatcagtactgtaagcgacgcgcaggatgtccgtggatttccagaggtggcgccatcgccgggacaggacgcaggtcttcacggcctcgtcggcggacagcagggacaggatctgctggaggagctcgtcggggaggtcgtcgatcccgcactcttcgctgggagacattccgtcgaacaggtggcgggcgtagccggggcactgtgctacgcaaagacacgaagagatcggatgatcccccggcttcaccaggcgctgtgtcgccgcttcgacttcgcggcggtcctctgcgcggcgcggggcggcgctagaacgaagcgcctcgacggggctcttctgaggaggcgtcgccggcggtggagtcggaagccggggcgccgcgtcctctagaagtccagcccttataggatagactggtaatatattataaaaaggtaatagaaactccatgcattacggtttttatttattaatctggagaataaactccagatatattatcatccaaatcacttaaaaggaaacatctcaccatgagctctataggatatgaaacatgtccaaatactttgccagatgtgttatatgcagagcaatgttgacatccaaatatccaattcagagcactctcaggatatgccactcaattcgtagcacttttatattatgccactaggagtgtgaattccttttttcccatgccactttttgtcgttcaatgtcaactctccaccctcgacacgccggcgagtttctccgtccaccacatgccaacgcctgtgggatggacaacgagttcgtccgtcctccacaccgctattgagggggtcttcttcttatcttcctggccatcaaagaggcgaggattgcctccacatcttgttggccatcctttttaacggatgctccgacgaggaatgggttggcaaaagtcgagaaagtcattcttgaaggcggaaacaggaagcaggggtcagctcgaccttgatggcgcaaccctccttgttatctcgggctactccgggcataggatgggtgggcgagcagaagttgagaaggccatccttggcaacgaagacaagaagtggtggataatatagtgacgttgatgacgtttgcagtgtacaaataaacaaggtagatacatacacataatgtttttttttttgaaggaaacccatacatatataataagctagagcgatttactgagccagattctatgtcgcagatatccattcggtgtatgccaccttgatcttcttcagtctgacgaccacatcactcattgtcatcctttcatttggcaaatcactagagcagatcaaacccagctcaaatattggcacaagaaagctctcatccaagttgcagctggaagacgaggagccttgcagtagatgcctatccaccacatggacaagttttgtaggaaatacctgatgaacccactctctaaggcttattaggtctccaagaaacatagcatccattggtctccttccagtgaaaacttcaagaagcatgatcccatagctgaacacatcactcttacgtgatgcttttcccatagagccatattctacacaggaaaaacattaaagaagttatacttaggacgacgtgatatctatcttctatctatctatctatctatctatctattatatactaaaagtccattaaacttcctacaaaaactttcaagccgctatgtgggattcctataaatgctcctaaactgctacgtggctctctaataaatcggtaggcccacaattttcatctattagatttatttttagaaaaaaaaaacaccacaatccatctccctcccctctccccaccagcccaccctcctcccctacgtgagtacgtatcctcccccctcctatcaaatcttctcgtctctttatttcttttcaagtttattataattaaaaatattttttaaataattttcgtatagagaaataatcataacctttaaattgcacataaatcttttttatcgttcttcattgtcgtattcatagtgcttaatcaatcattcaaataccaataaaagctactatattatttaccaataaaagctactatattatttaactcataaggaatatttaattttcatcatatcctaaccttaggatgcaattgaaactgctaaaaaaaatagaaaaaacaacaatgtatattatatgatcaagtatcactttataaaatattcataaaaaaattaaatatgatagatatgacaaaaataaaaacacttaaatcgttagtaacattcaaaaataattcctctattattttaaatcatatcagtacctttcgcatgccatcccaataataaaaaaaattatgtagaaatagataatgtagatcatatcatcatatatcacttcacaatcatgtataattagattagatctataatatcataaaataaaatactataattagttctgcttagcactcaaaaaaaataccactgttctaatattgatatgttaaaataatattatttttcacaaaacgaagtaatgttacttaaatatttcatgaaaaattgacgtcatcataactttcatatttaaagcaatctacaatatcccaaactaaaatactctaattgtgattagcattaaaaatattatctccactttaaaatatgaattatcacaataatgtaaatctagatatgtctagataaatattttgatataattatatctttagtatttaaaggactataaaaaatagttaaatgaactagaccaatgtgtcttaattaagagtaataggaggtgtatatgtttatccgttcatcttcaatctttcgagtttaaacttaagttaatctgagtatatagtatataaggtccaatgtactcgtctcacacatatcttgccttatgtgtcaattctatgttacacttagcccttgtatcaattctatgtatgtactgctatccaccaatcattgaggcagaatattattatatactctttccatattttaatgtatgacacggttgactttttaagatacatttgaccatttgtcttattcaaaaatttatgtaattattatttattttattgtgatttgatttatgatcaaatgttcttaaaacatgacataaatacctttttgcacaaaaaatttgaataagacgaatagtcaaacgttggtccaaaagtcaacgttgtcatatattaaaatatggagggagtactaaaaggccattgaacatcatacatacgctactaggccaccacgtgatccatctatctatctatctatctatctatctatctatctatctatctatctattatatactaaaagtccattaaactttctagaaacgctcctaaaccgttgtgtggtgttaccataagggggatc

SEQ ID NO: 14193 - DNA, 6491 bp, Oryza sativa
ggtggcgggcggtcgcggccgcagggcaagaaacaaccactggactgcacgggcggatgaagctggagcaaagcgagtgagaatcagaggcagagacagacggagacctcgccgccggcagcctcgcccgccggagctgaggaagatggtagtgtactccagccctcgagtcggagagtgtccgaatgaggaagaaaaggccaggaaataaagaataaatgggctggaccagaaaggcccatttaacagggcacattgaaaagtccaacttcgagcagtacagtacaactttaggcctatgtggaaggcccaaccttatgggtaaacaggcctaatctcatccagctcaaaattaatacattgtgctatacatttgtagattaattttctctcaaaaaattgtagaatgtaaatatattataaattacattgtaacttgcatgtaattggtatgtaactttcatatgattattatgaatagttagatttgctttaaaattcgtgcgagtgacaaagggaaaaaaaatcccaatgcacgtaaggggtgaggagatttaatcccacgacctccacttcataaaatagcatgttaccgcaggatttttttaaaagttccatacaacttatattctataaacatataagttatatctctacgtttcttttcgtttgacaccggttagttcaaaattgcactaatcaatatcattcatttggaaacaaaagtagtattatggattcttttttttaaaacacagtacaaatgtggtgtccacaacgcatgcacactcactcttataaacacatacgcacatcgtacccctatgagcacatctgaaaagactgggccggcatattttactgtcgatggatacgtcacctactactgaaaaaataattagccgtaaataagagcacccgtgttaaacttaggatttgatcccgagtggatataaggcccaatgtaattattctatgattatatcatacttacatttaatttttttagaaagtttattaataaatatacaatatatacatagcccgagattaattcctcgggtatgacagaaagcacatccatcaatttgcatgtgccaaaattttagttcactttggtggcctattacactttgatgggccaaaatttggtccatccaaactaggtctaattgaccaataactctgagaggaattgagcctcacaaatggggcaacgaagagcactggaaccttcgtttcataccataggtcattttaattttttcctaagtcaatttttttaggtttgatcaaattaataaaaaaatattgtaatattttcaacacaaaacaaagaaactaccaaaatatataacatgttcaatattagatgtaatgaaacatataaatgttattatatttttttataaatttggtcagacttttaagtagtttggtttaaaaaagtcaaaaaaaattataatatgcaacgaagggagtaataaatttcaaaaggttggtatagaaattcaatgtttcatggtttgatctgcataaaactataggtagattctcatccataaccaaaagaaacatctatcacaaatcaaaacgacatgagctctatggatcgacaaacttgcccaaaatacattaccagatggagcaatatttacagaactaacagatcatcatcccagagagaatgaatccgagttaaccaaggggccaaaagagatcaaagcatatggttggtatattaggtccaactagattacctgcacttctaaatccattatttgggcactacagttacaaattctgtctagatcatttcgtcagttctaaaccgcccctatgaggctgagactgcaagaatagggcatgcttgtcacagcagattaagcaccaacgctctgagtagcagtagatcctggagagcccaactttaaaacgctactcgaaactgaaacctgtcaaagaaaatgtagggtaagttcacaatctgaggcagtaagcatcatctgcagatattacaatgttcagttgcttgacagtaaatttaaataccggaacagattgtgaactatgaagagaggggatgatctaatcttatctaaatatatgtctgggacttaaccgatcagatgtgggggagaaatatttactccggttaatgacttaaccgatcagatgtgggggagaaatatttactcccggttaataacaccaaccgatactaaagatctaaatgatcatttaaccgggagtaaatgataatctttatcccagttggtagtatcaacctgaactaaagatcctcggccccctgacatgcctctgacagaggatgaaccgggactaaagatgatcctttaagatcaaaatttttttaaccggcatttttagtcccggtttttaatgtgaaatttgatcgacctacgaaaaatggtttctccacccatgaacacacgcccaaatagtcaaatacattaccagatgtgtgtactattaaacattactggcggagaaatgttgattaaagcaagatagcagattcatcatccccgagagaatggatccgaattaactagcatagttccaactagattacctgcccttcttaattccgtctactacagattcttactaggtcattgtcagttctaaaccgttcgtgtggctaagaactgacataggatatactaactccatcccataatacagcaaccatctcagttgtcacagcactgaacagtaaatagactagtagattcatgtacagcccaatttttgaaccctactcgaaactgaaacctgcaagagaaaatgcagtcagttcatagtcagagcatcaactgagcaattaaaatgtgcaattccaagaaactcataataaggtaacagactacaaaaatagtttttttttaataaaaacatggttagcaatttgtttcatataaccctacttaaggaaaaatgtttcataaacaagcatctatatgcaaaacaattatgccactaaaatatataattatatagtatttcaagtatatactcacagagtaggcctaaaacacattcctaggctacgctatctctcccactgcacgatggcagaaaaaaaagatgataatgtgataatgtgaaccccagcagtaaagatacgttaactagttaagtaaacccacaaatggtcatgctatcagcaatcaacggttgaggagaaggtagctaattgtctatgtaaacccacatacgatctttgtataagcattatacacaaaaataatgggccatacacaaatcgatgatagacatgtaactaaggttttatgaaaagtgttgctccgaaaacctgggtttccttgaaataaatagtgaaacctagggggttttatgaacctccaaaaccaagattttgtgaaatgtactaaaagaaaggtgaaattcacttgatcagcatgcagctcaattaataacagtaatacgttctagtagtaagtagtaacataaagatgacacaaaaatatgattaatgatcatgaaccatttcccattttccacctgctctcaacaaaaaagttcatcagcctaaattaccccctcacaaacacagaccaaccatgttttctcacaagtcataacatccgagctacaatcaaaacataaatcagtcgaaggcgtttcattcacaaggaactattgaagccatcaatcggataaaggaaatagctggacatggacatggcaagaatggttttcttcataaatgtgcaaccagtacaaagaagaaaaataactcaaattattgagcatgtgagactacaggtttataaactgatgaaaacaaggcccatgtaagaaagtattttcacagtattataaaagaaaacgaaggtggaaaataaaatgtgttattgcttacaattactgattgttaagttataaaaaaaaatacaatcgtgctgcttcggaactagtaatcagcaagccaataaattatcagcacaagtcaaatattgaaaactattcaacacatcaccctactgtttatgcgttgtacttgacaataaaatgaccgtacatagctttatgcatacaatctgccaacacaacagattagattgagctccacgttcccaccaaatgcagtgcaggatttttcattttcttttcaatttcgtacagctatctcttgattttctaacaaagtaggagtttctacattatttgctttctttcataaatatgaacctggaggaaaattttagaaatatagaaacaatgaacagtgttgctagttatcttacgaatattaaatgtagacaggaacttcaaaactttggtaactctctcatcaatcactccacatttgactacgactgacttaagatgctctggtattgcagatgacctctccgtttgattatagcttcctttcatttccaatatatgttcagattcctgcaaacaataacagtgacaaaaaataacaataaaacagttggccaagatcaatcaatgtaatgtaataaatgtaaatatgtagcggttttctatttagaatatatgtacctgacaaaaaagctcaagagtgagtttctctagaactggtgagtgtcgaaggatgcaagttattccatgcaagtcgaaggccacgtagaaggagtcaatgagtaacaaagtcttcaagttactaaatgtagggcaccgcatcatgtctcttttgaaaacaaactggacaaaatagacacagaagagatccataaaaactcgatgttaacaatgatttaagaactcccttgtggtggccttgcatgcaaaaaaggttattgcaattgttaattacgaatatccagtggtgggtacacatagattctgcataggaaagatagaagtgtaagcatagcgatacctcttgattctgagctaccaacatcaaactcctagcctgtgataaagcttgcagaagcattctgttggtgttactataacaaagctcacaatcgtcatgagggcattcctcggagtcagcattaccacttgtacaagttaaccaatccccagagtcaccggttacactgacaaatgctttcactaatagcggcataacctcaaacacaggagtccggcagcgataatcttgtagccacagggaaagtagattcggcacatcaatacgaattcggacattttcgctgaaagtgcaatgagtaaggttgaggtgtttcagggactgggaagagatcctcttggcatctgacaactcggaggagacaatctctaaattttctagcaccggacagctagagaaatcaaggaaactgtgcatcaatatcacaaaacgaagctctagcttcaccaagtgccgggagacgaaaggcaggtcgtgtagctcgaggccgaagacattcagccggagcacccggacttggcacagcagggcatgccggaaccagaggttcatgctgcggttgtctccctcggccaaatcgatggaacctagctcaaacgtgtcgaggggcgcgcccccgcggaggagcagcaggtggtgcacgaaatcatggagcttttccacaccgtagccttcggagatgcgcaggcccgtggcggacttccagaggtggcgccagcgccgtgcgagcaggcacgtccgcacggcgtccggcgccggcaggaacccgaggatgtggtggaggaccccatccggaaggcatccaatccgatcctcgtcggcgccgccgcttcgagatggggatcccttaacccttttccccgtctcccctggacgcattccgtcgaacaggtggcgggcgtcgcgttcgcagagcaagaaacgtccacaacgcaagggacgatgcaacggggggagagagcgggtgaggatgagagacggtacaaatgcctcgccgccggcagcctccctcgccggagctgaggcagaaggtaaatccagctatgacctatgagtgaggcattgagtcctcgccgcctcggctggacggaagaaaaggcggagacacgaagtcaagaaaggataaacgggatgggccagatttccgacccattacctctctttgggctgtcaagtcccacatttggcccatgcaaggggcccaacctttgagaatgtcggcccaatcccatccggcatgatccataattttgaggaataagttcacttcatgaccctcaaatgtgatcgaaatctaatccatgaccctaaactacaaaaccggatatctcaacccccaaactcctaaaaccggtgcaatttaactcccttggcggttttaggaggctgttttgctgacgtggcgccacgtggcgcctacgtggcaatattgaccgagtttttcttacacatggtgttgacgtgacacttacgtagcggtagaaataaaaaatatgcatggggcccattagtcattcacacaaaaaaatgtaggcccactgacatgtgggccgacatgtggggcccacatgtcagtccttcttcctcctcc

SEQ ID NO: 14194 - DNA, 23358 bp, Oryza sativa
gtctcgcaatttacaggcgaactgtgcaattggtttttttcgttcatatttaatactccatgcatgtgtttaaacattcgatgtgacgtttttggaagaaattttttgggatctaattaaacacaccctgatatatatactgctccctccgtttcacaatgtaagactttctagcattacccacataaatatagatgtcagtggcggatccatgatttatgtgatggttattcggaattctaaaataacagatatatcgataccgattgacatatattgactgtacgatacatcattttgatgcataatctttactacgaattgtgcgcatatataataaaatatatagaaacatttataatttcctataatcagcatcaaacaattttctattgatctaatcatctaagtatgagtgaagagtaccaaagaatttggaatttttggagattgtatagcataggtcgatagctttatgtagcaaagatattctgatttattgctaatgaaggaaaacactcataaaccacgaagaaactagtagctagcaaaggaatataacttatttcggtaggacaattgatatcaattagacaacaacatgtagagaaaaataactgagtgggcaatatatatatgtatatacaatttgcaaagataactattccctccgtttcataatgtaaaactttttaacattgtccacatttatatagatgttaacgaatctagacacaaaatcttacattatgaaacggaggaagtaggcattaaagtaattgcttattaattgccacaaccaaaatgtaaataagaaaatcaaattagcatgaatatattacaaaagaaagggagggactaggaagactattgatcttgttgggctgaggagagctagaaaagggtggaattgaattgttagggtataaatatcacaaatcaagatagactatgggggtacatataaattatggtcaatatatattagatttgtgtccaaaaataaattatgtgggatccgcccttgatagatgttaatgaatctaaacacatacatatgtctagattcattaacatctaaatgaatgtgggcaatgctagaaagttttacattgtgaaacggagaaagtagtagaattattgtcaagaagaactggtatttttagttgttagttgtatgcaggagatgctcgctacgctagtaacaccaactacattcttttgcagaacaagcggggccatcggagccacaacttccagaggggtatggttcaggctatatgcaacctgggtaccgtggtgcctataccggaggtggtggcaacggtcaaaacggtggtggtggcagtggttattatcataatccttgatgtggatcagtattgctataggtggtggtatgcaatagacaacgctatgtgtgtctatctagctatgaaataaggcatcgttcatcagcttgaaaacactttctatctctatgtgtttttttttttggcgaacctatctatctatgtgtatcgatctagctaccgaatttgacatcgttcgtcagcttgaaacgcttggataaaaactggattgttttgctgacagaattgaagataaagatccataagttttatagataatggaaggtttcccacaatgaaacatgtagccaagatatcaaaaactctgataagaaaaacaacaaagtaaaagaaaagaaagaaatagaaaaacaacaaagtaagagaaaagaaagaaattcaaaatcttgaaattgcggccggagtaatccttcttttcacagcttgttctgtaatgttaacacaaaccaaatccaacataggggaagagaaataatttcatcttgcttgaagttctgaccaccaaaccaagaccacttatagaagcatatccttagggcattaatagtgcaagctatggggcccatatagggctgtcaacgagccgagctcgagcgagtttggctatgtaggcttgagcttgacatgaactcgagccgagctcgagccgagcctggatattgatcgagcttgggagtgagctcgagttcgagctcgagcgagcttcgagcctactcgagcttggctgcttgacttggtgaaactccaaagaacttacttttgtataagagatattaatgcaaattatcggtagtcaaaattaatgggtgctacttgtcttgaatgaagcctctgcagcttttctcatgaattcatggctttgaaacattgcaattaacaaaagctagctactacatctaatatgaatagtagtactattactagcagccagataattgctttattgagaagcattgatgaggtcttgagacttgagcatgtcaagcacgatgacaaatatacattgacccatcaagaatatcttcctacatgcaatacattttatactaatcaagccctgccgagctattcgagctcgagcttgctaggcttgcgagcctcagcctagtcttgagcttggcttgtctagtattcgagccgagctcgaatcaagcctataacgaatcaagctcgagcagcttgcgagctccgagcttttttgacagccctaggcccatacccttagcctcaaaacttggcccaaagacacccaccccacagtacaagcacccacccatagttgtctagattaattggatggagacactaagtcagggtaccaagcccatagtggggtgtgaccctagcgcccaacccggtggaccccacgaaaatttatttcctccgctttccgttccaaccctcgcctcctctcctcgatggcatcaatcgagtactacttctcctctccatcctcgagttgagtactactccaccactcctccttctcctccctttgccgcgacgccgacgggaaaatccgacgaggaggcgtccccagcggcggtggctggcgcggtggcgggaggcgtcctcggcagcagtggctggcgcggcgaggaggaagcgagcgcaggagaaggatggaagcgggcggcgtcctcggtggtcggcgccggatctcctccctccagcgccggcagccgcggttgccggcccgcgcggtgttggtggctggcccggcgacgggagtcgtccctggcgggagcggctggcgcggcggcttgatatgatgatagattggctccaactccgattattgattgttgtttttgtgcatgtgagatgtgttgttcattggttaatatgagatctagggcctgggttcctcttgtgttcttgggacggatcaagatttctttgtttcttttgcttcttggtgattcctcttgtgttcttgggacggatcgagttcttgcttgggaagttcttggggtgtttcggtggcgggaagaaggaaataggtgcggcgggagaggattttggagggcaaatcgaagatttcgccaggaggtatgggcgcgaggtcacgagagagcgaggcgacgctgcccacagcgcgcgtgcccgtgactttcggcgtcgcgcgctccctcacttggaccaggttcctcgcggctttgcttggggccgaggggctctgctagggcgcgcgaccttgctccacgcaagcacaaatcctcgctggcgcggtgtagcaccgggtccacgtcattgcaccgtgagaggccttacttatgtctgctatacttaaggaatgcgtcagcttatgttgcagggtaacggctagcacggtgattccctctgtagtttgaaatgctagctccgctcccaccgcctcccgtcggcgtcgcctacgcccctccgctttctccgcgggtaccaggaagtctccgcagcagcctggccatcccccgtcgctcgtggtcgtggccccaggccttcgtcgtggtcgaagctccccctgccaccgccgccagctacatccacatctacgcgctttgccccgcaaggtgcctcgttccttcgtcgatgtcgtcagaggatctgcacggatggattcggccccaactcctccacagctgactccacggagatttttttttcatatataccaaaaaaaacttgtttcgctataataccatccttaaaataggattcgaccaaatgccactcttaagtcacatgcattcgctataatgcaactttcggcctttcttccatttccaaaatatttttccacaattttagcatttcccggacgcttttgccccagagtcaactggttgaatcggagcagtggattcaactaggagcaacgcttgagacggccgagctcctcgtcgtcggcaccccgtccgggttgccagaggggaatccccatttggacatgctggagctcaccggcgagccgaccaggagcgaggcggcggcgccgaggtctcgagagctcatgcttcgcagcgtctgctgctgcatcttctcctgctgcgccagagcggcgaggaggcgggagttcatcggggagactggctccggggtcaacgcggccgcccgcggcgagagcaagctctgctgctgctgctggaactggttgagcacggcggccttgcgggtcggggagaacgccgcgccgccttggtcggcgtaacgtggcgagcgcgacgccgcggcggcgagctcaggctcagccgagaagagctcgtcgagatttgacggcacgagcgccttccccctcgcggaccggatggaggcgggcgagccgacgaggccatcgtagtccgcctccgccgccgccgccgcggcgagcagctcgtcgacggccatgtcgcgggcgctcagcaacgtgcgcagccgactcagatgcaggttcccggcgctcccgggcaggcagagcgccggcatgctcggctgatgcgaccaagcgccgccgcccatcccgctccccccgccgccggccgacggcgacagcggcggcgtgaacgacgaccccggcgacgacagccccatccccatcgccgccaccgccatctccaacgccctgcgcggcgacggcacggccgaccccgtggacatgtacagcgggcagagctccgattcaattgactcaggggcaaaagcgtctgggaaaagctaaaattgtggaaaaatattttaaaaatggaagaaaggtcgaaagtggcattatagcgaatgcatgtggcttaagagtggcatttggtcaaatcccattttaaaagtagcattatagcgaagccagtctttttgggtggcatatatgcaaaaatatcagctcgacgcccccaattgaaatccacatttactctccctatccgaagcagctaccatccggccaacaatgccaatggctagcggcgaagtacctcctacgactctattctaccccggcgtcacgacgctggtctagaccagggagacagcacggccaacaaggagacagccggggaaaccgcttggatcccgatcaaaaggcggcattggtggcgggtccagctcaacagcgacaaccgacaacgagttgggttggcccgatggtggcagcgttgaggagtgagcgagaggcactgacggaagagcagctggatagacaggagtgacgtggaaggaaacaattcgcattcctagtagcaaattacagaaagtggtgccggattgggtggcaaattctaaaagtgttaccaattggatggtatataatgaaaattctcaaaaatcgacatgctaatcgaattgaggaagcagaattcatcatcccacatagaataaatccgaattaaccaaaaatttcaaaagaaatagcaaatcacagtatactaggtccgtccaactagattacaagcacttctaaactctccctaggccatagtaaggcagttacaaatacagacaaggttattttgtcagttttaaacagttactatgactagaacatcaatatgataccaacagacataataccgcaaccttctcaattgtcacagcaaattaagcaccaagccaccaatgctctgaacagtaacatagtagtagatccatggaacagcccaacttttaaagcctactcgaaactgaaacctgccagagaaaatgcagtcagtttatagcctgagaattatctgcagcaattgaactgttcagatacttgacaagaaacttaaaaatatgggaacagacttatacaaaaaaaagtagttttaataaaaaccaatgttccgaaatttctttcatacaaccctattttttaagaaaaatgtttcataaaattagcatctttatgcaaaatactcaaagccattataatatatcttatctcaagtatatactcacataataggaccgaaatacacattcctaggctacactatctctgtcctcactctcccactgcatgacggcaaaaaagatgaaaatgtgaaccccaatagtagagatgtattaactagttgtataaacccacaaagggtcatgctaccggcaaccaatagaggagaaggtagctaatatgtctatttactcaactataacacattcaatctttgttcaagtactacagataaatataataggttagagtcatagccaaatcaatgatatatggctatatgcatatacctgaggttttatgtaaagttttgctccacaaccagggtttgtgaaatttaccaaaaagaaaggtggaattcaattgaccaggatacaatttaatcatagtaagatgttctagtaaattgtatgcaaaaacatggttaatggtattgaaccatttccacctgctcttaacaagagttcatcagcctaaactacccctacatatagaacacagaccaaccatgttttctctttaacatcagaaagtaagcatcagtcaaaggaatttcattcacagggggccaggtaaggaagtatcataagcaattgcagagcataataaaacaaaaaaaaaagtggaaaataaaagtaaatcatagcaggttgaaaggtagaaaaacaaagagagtatctaagaataagctacagtctaaaggcaccaccgcaccatgctaatgtatgtgtgctactactcagataattcaagaagggtgttaaacgcacaattaatagacatatagagagaagcattgcttcattagctgttcacatgcatgcagttagcctgtacgaagaacagaatgatgggtaatatagtcaacaagggtatggaatcgagcataaataagagtggagacacaagacatttcactacagtgcgttattccatggaactataaattattaaatgcagaaagacagacaatcttgctgctgttcagaaatcagaactaatatgtgaactgataaattatcagcagaagacaaatattcaaaactattcaacaatttaagcaatgtacttcacaataaaatagatattatatagctttatgcaaactatctgctaacatgatggattagattgagctccacactctcaccaaaagcaggacaggatttttcattttcttttcaattaggtattcctatatcttgattttctaacaaagtaggagattctagattatttgctttctttcacacaaatgaagatgaaggaaaaattcagaagtatagaaagaacgaatggtgttgctagttatcttacaaatattaaatgtagataagaacttcagaattttggtaattctcccatcaatcgcgttacatttgactatgactaacttaagatgttttgatattgcagatgatctctccatttgactacaacttcctttcatttccacctcatcatcatgttcagtaacctgcaaataataacagtaacaaaaacaacaataaaatacttggccaagatatatcaatgttatctaagaaatgtaaccacaaaacggttttccatttagaatatatacctcgaaaaaaaactcaagaatgagtttctctataactggtgtgtgtctaagaatggaagtgattccatgcaaatcgaaggccacacagaagcagttaatgagtaacaacgtcttcaagttactaaatgtagggcaccgcatcaattcctttttgaaaataaactggacaaaatgggcagaaaagagatcaactaaaacttgatgttagcagattatttaagaactcccttgtggtggcagtgtatgtgaaaaggtcattctagttgttatttacgaatgtccagtgatggacagtctttctgcatatgaaaaagtgggataatataaggggggttaaagataaaagtggaagcatagcatacctcttgttcatgagctgacaacaccaaattcttagcctgtgataaagcttgcataatcacacaattggtgttgctatgacaaaagtcacaatcctcacaaaggcattcctcaaaatcagcattaccacttgtacaactataccaatccccagatcgatcgtgtactctgacaaatgcatccactattaacggcataacctcaaagacaggagtccggtgccaataattttctagccgcaatgaaatgagattaggggcagaaatacgagtgcgggatatttggctgaaagtgcaatgtctgatattgaggcatttcatggactgtgaagtgatcttcttggcatctgacaagtcacagaagaagatatctagatgttccagcaccggacagcatgagaaatcgggaaaactgtgcatcaaatggacaccagaaaggtttagcttcgccaagcaccgggaggctagaggcaggtcgtctagcttgagctgaaagccattaagaatgagatccagccggagcacttggacctcgcacagaaccgcatgccggaaccagaggttcacacggcgggcgtcgccgtcggacgacagccgggtcaagttgagccagcacgtctcgagcggcgcgcgcccgcggaggagcagcaggtggtccacgaaatcctggagcttttccatgggcgccggctcccgcatttcgcggtcggtgatgcgcaggcccgtggcgaacttccagaggtggcgccaccgccgcgcgagcacgcacgtccgcgcggcgtcccgcgccggcagggacccgaggatgtggtggaggatcccatccggcaggtctcctgtccggtcttcgtcgccgtcgctgctccgaggtagggctctcttgcccatttccaacgtcttcccttgtggacgcattccgtcgaacaggcggcgggcgtcggggccacggtgcaagaaacaaccagtgtgactgtacggacgcaggggcagagcaaaagtgagagtgaaatagagaaggatacagcggcctcgccgccggtagcctcacccgccggccgccgcgtccatcctgccctagtggctagtgcttacggggaggcgatagaaggacgcaccttgccggggctccgtggtacgaggcgacgcggctgcagtagcgcgattctatcttcggaggagtcgccagcgagctcgtcggagatgtccgccggcggcggtgtcggtggccgtggcgccgccgtgcccgcgtctactgctatggtattcccaggctggccacctgaccgaggtaaaggcccaattactggataggattaacgggccggaccatacaggcccacaagcgtgggccatgaacatttcagtgctgggcccatttaaaggtccaacacgtaggcccgagtagatttttataaagaagcctcgtttggacatacgattcaattaccttcctgtgcaactcaactcctgtactctgtacaatttattgttcaaaactactctgaatgaaaaattcagcatgttcttacggtttaatctgcggaaaactccatatacactctcatctataacgaaaaggaagcatctctcaattcgacatgacctccacagattgacaaacatgctcaaacacattaccagatgtgcatactatcaaacatttcagacggagcaatgttcacagagctagacatgttaaaggtagcagatttatcaaaccagaaacccatagattacctgcacttccaaatccttttttttagggccctacaattacaaattctgacttatatttccaactgtcaatatgactggaactgacatatgacacctacagacagaaaatggcaaccttctcagttgtcacagcaaattaagcagtaagcaccaacgcggtgaaaccattttagacctgtagatccatggacaatccagtttttagaccttacttgaacagaaacctgtcagtaaaaatgcaaggtaagttcacagtctggtaataatcggcagcaattaaaatgttcagttacttgacaagaaacttgaaatcccaggacatactacaaaacgagttaatttcaaagagtctgaggtttagcaatttgtttcatataaccctagtttctaaggcaaagtgctccataaactagcatatttatgcaaaataagtttacagggcacagatgggtgattcagtcaacaatgtctgcaacactcaatgacctctcgaaggtaaatttcaaagatgaaggtaaataatagccatatgatgtcagaaaacatgtatatttaagagctattcgacaagtcaacatattgtgttgctgtccagaactactcaatcagaatgaatgttaacaacattaacaggaaatgaaagctattcaacaagtaaacagttcaaattgtagaagccaacatactttgtgtctatttatattattactcagtgcaacagggaaaactctgtacaatttcatggatcatacttgacaacaaaatatactggatgatgtttcctttttatcccttctagatagtttttttcattctttttttttacttttccttttcttttgttaaatctgtatttgcatttttagtaatttatttctttcattaacaaataaataatgcaaatttcagaaaaagtggaagaatgaaaaatgtcaatagcaagcttacgttttggtgattgattcctccgtttgataagaacttttatgtccaatgtactcaaccacttcccaattttgtaaaccacctcatcaacttctttacagtggactttcactaccttaaggtgttcagatattgcagctggtttccgcaatggattgtcattctcttctgtttgcatcatagatttagcttcctgtagcacgaaaataaatatcacatttaattaatcatgcacaacaactttaacagtgcagcagttgtaaaaacaaataccttggaaatttgaagagtgagcttccgtagaactggtgagtgttcaagaatacaggctagtgcccagaaattagacagaagacaccactcattgagtaacaaattcttcagcttgctaaacatagggcaccatctcaaatcacttccaaaaataatctggataaagtgcaagcgacaaagtcaaccaatttttgttgtgaatacaataatttaagagccaagacagtagcaatgcatgaattttgttaaggtgacaaaatggtgcatataggtaaggcaagtaggcaacaaaggtaagttacagcaattaacataaaggagataagatgtcaatgtaagcttactatttcaggtccagctatcaacttcaaactcttagcttctgatagacctccaaggagcacacaattggaactgttgccgatcttatctatcataccatgacaaccatcacagtcttcatcttcacaattaccagtgtaagtattactacaccagtcatcacaatcctggtggggtctgacagatgcttcaactaatgagggcattctttccagaaaaggagttctgccccaaaaaccttcaagaaagagcctaatgaggcttggtgcataaatgagtgtgcggtgatattcactgaattgacaacagaagatccgaaggcattgcattgactgggagaagatcttcttgacagagtcaaagcagcaattcttggtgaaatatagctctttcaatgcgggacagcttgagaagttaagaaaacaatcctttaacactataccagaaagttctatcttagtcaagtgctgtgagacgagaggcatgccgccatctatttcaatgtatctttcattgaagttgtggattttgagcacctgaacttggcatattagagcatacatgacccacatcatgacacattggaatggattactgtcttcgtcctcgtcactgtcgtcatctgattcaccgtcgtcactgtgttcatctgattcatcgccatcactgtcttcatctgattcatcctcacctctgtcatcgtctgattcatcctcgtcactgtcttcacccttttcatccttctctcgacatgaactgaattccaaatcaaactcgcgtagaggcgagcagccccggaagagcactagatggttgacaaacttcttgaaccgcttggagctcttccatctctccttatcagcatcaaggcgcaggacgtccgtggatctccagaggtggcgccatcgccgggacaggacgcaggtcttgacggcctcatcggctgacagcaaggacaggacgtgctggaggagctcgtcggggagggcgttgatcccgccctccttgctggcctccgccatctcctcgcctctcgagccccttcgcctaggaggcattccgtcgaacaggtggcgggcgaagggcaccgcgcggcaagaaacgaagagccgactcaccgatcacccaggcgctggtggattagccgccggtcgacgacgacggcgaggaggagccctagcctggcgccgcaagctcgccggatccggccgccgccggcggagtcggtggctctggcgccgcgtgccccccgcttctagggcctagtgcttcggggagtcggggtcgcggctctatgacctaaccgtcggcctttgaacatttccgctactgtgggggctctttcacgacccatggacggttcaatttcctgaatggaagaggtttattttggaggaaataaaaatctcacaaatattatgaccaaactattaaaaaactatagatttaacattaaatttataaaaaaactacacgttaaagatagagtgtcataaaattatatatttattggtaacaaaattatcataaaactaccgatttagaattgatttagtcacaaaactacgatgcattgtttgaaaattgcttttaaaaacttatattaatctatttttaagctaatctattgctctgttttatgagtcaggggaagattcccaacccctctaaaagaacacagtctaagggtgtgtttggttgagctgtggcttttggaaaagctgttgtgagctatgggctgtggaaaagcggctgtgaaaaatcagttgtgggaaaagcagaagcccgtttggttagagtagcggtgaaactgtagcttctagaagaaatacctataatgcccctaaaagccattaggagtgtaggactatttatatgcaaattactcgtaaaaacctaatatgtccaatatctcatatttaaaaggccgatttggaaagaaaacatttataagtttttcatccatcaaagtttttcatcaaaatatattagcttttcatccatcaaagtgatatggtccacataaacagagcaaaagataaacagttcatacaatgataccatatctcaaaataactatcctcctcttgttctaatcaaagcatcagctatcctagtgcgaatagtattcatggtattatcattctctgtatcttcactctcatcgtccgccgtgtcacttgtatcttctagtaagtagtcctcatcagcatcacatctcttaaactccttatcacgtaaattgctatcacggataaagttatgcaaagcaagacaaaccatgatgatatgcttctgagtagtaggtgagtaacttgggatgcccttcaaaatacgccgctttcaataacatttcgacgtcggggcagtggcggcgtcagactgcagctccctcacctgataggtgaacgacgggcgcttctttctggatgcacctcctgcattagctttgttgttcagttcaaacatcaatatatatgtagaaatgtgtatatattgatacattctggacacattactgttctggacagcaatatatatgggcatcagtatatattggtgttctggacacattgctcggtggcaatatatatgtacatagcagagcacacctttgaactaaactaaacagcaatatattattgaaattataagcacataatgatttaatttattccataaataaatcatgacattgcagatgtaaactagattgaacgcatcattagatctacacatgtaaactaagtagtaaaacatgaacagatcaaatatgcgcaacatgtcgaacacgtaccgaggtgacggaaagaccggttgctcggcaagaactactcgtggttgcgagcgtcgacgaaggcgcgaagcacgcgagcggagaggaaggcgagccatcgcggacgaacagggagcagtcacgcgaagcgcttcccaaaaaccgtattgccgccttctcccggtgcaggacgtcgaaggcagaggttccggagacctactctcccgatcgccgattcacgccgacgagcgggatggagtagtctacgagcgacagcgcagcacagagtaggaggcaaaccctagattgatttcgcgtgtgttgcgtgaaggcggtgacccggtttatatagagataggtcgcctgatcagggcgcccgcttaaccgaaccagataagtcgcgcgtaacctatccggactccacgccgttttcacgcaccgaatttttcggaatgtttccaaaacaaaacaaatccgaatttcccgcagcaaaacaaaactgcaaaaggaggctgcatctgcgcaagggtgaggagccaattttgcggaccattcgacgcgtacgtcgtgcacgcgcgccgcctgccctgccctgccaggcgagcgatcgcgcgcgtgtgtttcccctcttctctccaccacacatgcttcaagtggctaggagggcatcctcccttttaaggaggtccccctctcctagaataagcaaggtggtactaaactccacatgcatgccatctcatgaggtgggcttttgtgattttccaaagaattaatcttcgaatgggccttagcccatctattaattccaacaatcccccaccaaatctcaaaatcccactagagatttgtcttttccaatgtactgtttatataccagcgattcgatggagaccgattaaggttgaacatccacctagaactctaagctacacttactcacaacttgaacaatggactacgccttgaattgcaagtcttgtgcaagcaagtttcactcagagtcttatctggtactagaccgtctgtagactacccctcgggtggagcgtataagtcatactcctaggtctttagtaagcttcctagaagattcacccaaaatctccatagactgcgaccaacagtcaagcttacaaaggtgagttctttcaagaatgcatcttcactaattaaagccaacagaactcattaaggcatagccaacctgccttgcagctcacgagagtacatgcatcttcacttagagagggtatagattggtactctcctctagtttactaatggtttgttcttcccaggttctaattcacgggatcttcgatcacatagactgggttaccaccatagtataactcacatgggtctcaaacccatctccttcgatgcattgtctatcacatttcgtgatagtccctttgtgaagggttctgccaggtttctagctgtttggatgtaatccaacgttataactccggagtttctcaatttcctgacagacttcaatcgtcttttcacatgtctagactatttcatattatccttagaactattcactttgacaattaccgtttgattgtcacagttcataaggatagccggcaccggtttttcaacaataggcagatccattaatagatcacgcagccattttgcctcaacagtagcagtatccagtgccgtcagctctgcttccatggttgacctcgtcaaaatggtatgtttgcaagacctccacgaaacagcaccaccacccagtgtgaagacatatccactagtggctttgatctcatccacatcagagatccagttagaatcactatatccctccagtaccgcaggatacccagaatagtgaagccccaattccatagtacctttcagataatgcattactcgctcaagcgcacgccagtgatcatctcccggattagaggtaaaccggctcaacttgctcacagcaaaggagatatcaggcctagttgcactagccaggtacatcagcgagccaatgatttgggagtattccagttaattcctagcaattctcttgttcttgcgaagcaacaagctaggatcataaggtgttggagaaggcttactatcaatgtagccaaagcgattcaagatcttctccacataatgggactgcaagagtgtaatcccattatcacctctaattagcttaatgcttaagataacatcagctactcccaaatccttcatatcaaaattttgagacaagaatgatttaatctcatttatcacctcaaggtttgtcccaaatatcagtatgtcgtcaacatagaagcacagaataactccctcacccccaccatggcgatagtacacacatttatctgcctcattgactgcaaagcctacagatgtcaatgttttgtcaaatttctcatgccattgcttaggatcttgtttcagaccatacaaagacttcaacaatttgcacactttgccttcttgaccttcaactacaaacccatcaggttgatccatatagatctactcatctagctctccattaagaaaagctgtcttaacgtccatttgatgaacgagaagaccaagtgaggctgctagggaaagtagcacgcgaattgtggtcaatctagcaacaggtgagtaagtgtcaaagaaatcttcgccttctttctgagtatagcccttagcaacaagccgagccttgtactttttaatagtaccgtcaggcctaagcttcttcttgaacacccacttgcaccccacaggtttacatccatagggtcgctctgtcacctcccaagtccagttagcgataatggaatccatttcactacggacagcctccttccagtagtctgcatcaggagatgcctatgcttctgaaattgacttaggagtgtcatccacgaggtacacagtgaaatcatcaccaaaggatttagccgtcctttgtctcttactccttcgaagagcttcactgacatcctcctcagtgacatgttcatgtgtatgttcagtttgttatggtggtgtgattgaactgggaattatttcagagggttggctcgaaccactatgtgtatcttcattgggaaaaagctctcgaaaaaggtagcatcacgagactccataattgtaccaacatgcatgtcaggtacctcgaatttaactattaaaaatctataggcaatgttgtaatgagcatatcctagaaagacacagtccacagtcttaggtccaagtttgcgcttcttcgttattggtacattgactttcgccaagcacccccatgtgcgcaaataagaaagtgatggttttctcccaatccatatctcatatgaagttattcaaagcaagacaagccatgatgatatgcttatgagtagtaggtgagtaacttgggatgcccttcaaaatacgccgctttcaataacatttcgacgtcggggcagtggcggcgtcagactgcagctccctcacctgataggtgaacgacaggcgcttctttctggatgcacctcctgcattagctttgttgttcagttcaaacatcaatatatatgtagaaatgtgtatatattgatacattctggacacattgctgttctggacagcaatatatatgggcatcagtatatattggtgctctggacacattgctcggcggcaatatatatgtacatagcagagcacacctttgaactgaactaaacaacaatatattgttgaaattataagcacataatgatttaatttattccataaataaatcatgacattgcagatgtaaactagattgaacgcatcattaaatctacacatgtaaactaagtagtaaagcatgaagatcaaatatgcgcaacatgtcgaacacgtaccgaggtagcggaaagaccggttgctcggcaggaactactcgcgattgcgagcgtcgacgaaggcgcgaagcacgcgagcggagaggaagacgagccatcgcggacgaacagggagcagtcgcgcgaagcgcttcccaaaaaccttattgccgccttctcccggtgcaggacgtcgaaggcagaggttccggagacctgctctcccgatcgccagtgcacgccgacgagcgggatggagtagtctacgagcgacggcgcagcacagagtaggaggcaaaccctagattgattttgcgtgtgttgcgtgaaggcagcggcccggtttatataaatgtttccaaaacaaaacaaatccgaatttcctgcagcaaaacaaaactgcaaaaggaggctgcatttgcgcaagggtgaggagccaattttgcggaccattcgacgcgtacgtcgtgcacgcgcgccgcctgccctgccctgcccatctatgaggtgggtttttgtgattttccaaagaactaatcttcgaatgtgccttagcccatctattaattccaacatatatatgtacacatatttgaactgaacaggaatggtaatatatatatcgctgaacagcaatatatatcgtccctcaacttttaaaactggtgcaactaacattactcgatagtatttttgatgtttttaagttgacgttgcacatatttgttttcttttgacttagtctttatccctcgtaacacttacgtgacacaaggaaacaataaaaagcatcaataagacccacatgccagcaagtgaggggaaaaactaatttgtgtgtcccacgtgtcatcacctctctttcttcctcttcatctccctctcttcatgctcttccccatcttctctcccttgctggcctcccctccttcccctcggtgtttcctcccatcaatgtgtcagccctaagaaggacgagcacggcgtaaagggcccatcaagaaggaaaacatattcattaacatgtagtccattaaataccatcatcttcgtcattttacttttagagtaaattttattttgtgctatgttttattacgatgtatcattttggactatcctttaaccaatatttgcattttcaatccaatatttgcactttcgatcaggtaatcttatatttacctttgtttcactttttactacccgactttttatcaatgaagtccaacagctatacttaaaagaatcttatactttgtctagagtcgtagtcataggataggtctaatcccatcctaggttgtaatatattgggacggaggttgtaatatattgggacggaagaagtactactgttttaacatatgacaatttgatgtaaatgggcaaaattgtgagagtgatctaaagtggcacaaacataaatttacccggtttaaagtgaaacatttattaaaggatagttcaaagcgaaataatagtaataaggcggcctaaaatgaaatttactccttaagcaaatgcttatccatgtcttttatttaaaaaattacagataaaacttttatatacatttttttagcaatttaaaaccaaataatgtaaaaataaattatgctaagaaaatcataaaaccaacttcagaattaagttttaaaatttaaatcttagcctataagcgtgctatggggctttatgtgtggcgtgtggtttgcctcgttaattcagaggggggaggagaggatggatgtgtagaaacagaacaaactattgaccgtgcaacttcagccggcacacggcaacttgagataatcacataatctcctgacaggagaagagagaacacacatatataatctcaagtagtaagtgacagcactgggcgaaattagtgaaatgcagacgactgcagtaaaaccagctcagatacactgctagaagatctaaacaactcaatatatgattatgtatccggatcccagatgttcctcgtcctgtgaactactagcatattactcagttcaacatagtggagctagcatagcaatctcatagacaaaagacagggttcttgtcactgtgaaattaagccttgcgttcctggaataatcaagaggttcttcatctagaagatccatcgtcgagacatcaacccttttctactttgtttttcgaccaggcatcaacccatacttccttccttgaaactgaagactgcgcatacccaatgatattttgaagataagacacagtttatcatttttcaaagatgaaggtaaatacgtggccatacaaatgatacaatgtcacataatatgtacaataattaagagctattttatggccaagaacttcaagcctgagttaatacttaatagcaggaaatgaaagctattcaacgagtaaacagtccaaagtgtagaggtcaaaacatattgcaacttcctatttatattactcagctcattatataaaaagaaaattatattactcagttcaacatggaaaaactctgtaaattttcaagtatcatacttgacaacaaaataaattggattatgttttctttatatcccttccaaatgctgttttacctattttcccttttcttcactaaatctgtatttgcacttttagttttcttctttcattcacgaatattttttttcaaaattcagaaatattgaaagaacgaaaaggagctaacttcagaaacctcgtgttcagcaatttgtttcatataacgttatgtttaaggcaaaatgcttcatcaagcctcacatgtatgcaaaatactcatgtcattatacatttatactatctagcatttcgagtatatacctacattagtaggcctgaaatacacattcttaagctactatatctccttccgcactctctcactgtgcaatggcagagatgataatgtgaaccccagtagcagagacacattaacaaacatttatgctaccggcaaccaacggttgtggaaaaggtagctgatgtgtttatgtaccaaaaagaattccattttgtataagtattgcacataaatatcatagataaatgggttacatatgcatgtgcctgaggtattatgaaacattttgctctaaaacctataggtttccttgaaacaaaatgcagatctgggttttgcattacagcattaccgacgcccctcaaacctgcgttatgtgaaatttattaaaggaaaagtggtattcactcgaccagcatgcagtaatatcttcaactaacattaagatgatccaaaaatatgattaatgatatttaacagcttccacctgcccttaaaaagaatttatcagcctatactgcccctacactaagaacacagaccaactatttttccccataacatcagattttatacaattacaaaagaagaaatcagtcaaggtttttcatccacaaggaactatagaagtcatcattagggcaaatgcagcaaaaataactagacatgaagatgggcactgaaaggcactgaaagttatgtacaacctacagactcaaaggaacaatgaaaatattcaagaaaacagttaattctacagattcaaagtattgctcagtttagccattcacaagggcatgaaactgagcatatatagtgagccatttgtaagagtgaagtaaacaacagttcaatgtgttgttgcttaaaactattactcctacttgttaagtaaaagcataaagacagagaaagcttgctactgttcagaactaatcagtgaggcaataaattatcaaaaagtttaatattcaaaactattcaacagaaatgtttagattgggtttccgactcccacgaaatgtcatgcagcatttccattttcttttcaattaatctggtgattggtactcctacctctagatttctaacaaagtaggagtttctgcattatttgcaatcaagtggaaggcaaatttcagaaatacagaaagagcgaataatgttgctagttagcttaccgatattaaatgtagataggaacttcaaaattttgataactctctcatcaaccactccacatttgactacgactatcttaaggtgttctgatattgcagacgatctctccattcgactataggcagaagtttccaatttagaatataaatacatatgtaccgggtagaaaaactgaagagtgagattctctagaactgggagtgtcgaaggatgcaagtaatttcatgcaagtcgaaggccacaatccagctgtcactgagcaacaaagtcttcaacttgctaaatgtagggcaccgtatcaattcccttttgaaaataaactggacaaaatgcaaacaataaagatcaactaacagatgatttgagaaggaaaagctggttctgtaaaaggcagttcatgtgaaaaaaaggcataacaaaaacaaaccttttgtgagtcagcgaccaacgccaaattcttagcctgtgaaaaagcttgcagaaccttgcaattgttgtcactgggacaattgtcacaatcgtcataaggacattcctcaaggtcatcattaactcctggacaacacctgatatctccagaagcaaaggtgacaccgaaaaaggcatccactaataacggcatgccctcgaacacaggagtccggtgattatataattatccaggcgcagcgaaaggagattggggacatcaatacgagtgcggaagatttcgctgaaatcgcatgcagtgatgttgaggcgtttcagggattgggaagagatcctctcggcatctgacaagctgcagaggacaatctccagatgttccagcaccggacagctcgagaaatcgaggaaattgtgcaccaaattcagatgagcaagctctagcttcgccaagcgcccggacacaagaggcaggccatctagcacgaggcgtgaggcacttcgaggggcattcaaccggagagcttggacctcgcacagcacggcatgccggaaccagagatccacgaggcgggcgtcgccgccgccgccgtcggacgacagcccggcgaagctgagctcgcaggtgtccagcggcgcgcgcccgcggaggagcagcagatggtccacgaaatcgcggagctcctccatgggcaccagccccaccccgtcgtcgtcggcgatgcgcaggcccgtggcggacttccagaggtggcgccaccgccgcgccagcacgcacgtcgcacgggtcggcgccg

SEQ ID NO: 14195 - DNA, 2824 bp, Oryza sativa
ggatctgcccactcaaggagttcccttctagagaaatcacctgaagattgtgcagatgcagcaacaactctggaggtatctgaccggagagttggttgctgcctaattcaagaacctcgagccttgctaggtttcccaggtcaggaggaatcctaccagagaggctgttttcacctagacagagatgtctaagacggcgtagcttgccaagatcagctgggatggaggccgtgaggttggtgtcggtgagcctgaggaaggagagaaacgagaggttaccgaggagaggagtgatgggtccatggaggggcgtgtgtggcagcgacagtccagtgacacgacgatgtcggcggcggcggctgcaggtgacaccaagccagtggcagaaagaggtgctggtgctccagttgcttgtcagaacgccgagggggtcggtaagctgggacttgaaagccagcagggcggcgagatcggtgtcgctgctgccattggcggtggtcgtcggacttggagaagaatagcatgaggtggacgatagcactactactagtacagcaatggaaacgcatgctgatgatgtagtagccatttgagctctgctcgatcgtgtggctgtacatgttctcgtgcaagcagatactacaccagaaaaaatagtgctcatcaatttatatggggaacgagctagcgcatgtggttgtgcacacaattttttctgtttatttcaacatgtggaccgtacttgcccggcaggctgcagtagccgcatggcaagggatagccaattttaatgctagagcctagagctatcagttaatcctagacctgagtgccactgaaaaagaaaatgagaaaaacaatgcccacaactaggggtgaaaacgggaaacggacggaaatcatctttatcgctttcgttttcatatatatttttttaatcagaatcggaaaccccagatacgaaaacggaatcgaatattatcgaaatcgaaaacggagcgaaaacgaaccggcgcgaatatggtaacgaaaatttatcggaataaaaaaacccctcaaactgataaatccaattctcaagtctcaacggtcaataattcaacataaaacataatcatataagtcaaattgttaagtattaatagtacatcacaaaacacaatatatgaagcaaattagtaatgctgttgataaatcccaatgcaggtaaaaaaatattcttatataattttagatttgcataacaaatattttttaaaaaaataatagccaaatatcatggtattcactattcagtgcttaaaaaaataattcaggatattttgtgattctggaaattccgagaaaatttctggaaagttttcgacagattccgagttccgacgaaaactacccttatcattttcgattctgtttccgaggaaatatttacgaatccgtttccgtttctaaaaaattccgatcgacagattcgttttcgaaaataggtccggaatccggaaagtttatgtaccgttttcacccgtggcccacaacgagaccaaaattgagggtgttgacgctgattcaggtcacatttttactatcaacggagggcatgcatttacaacacgaattgatataaaccatctacaagagatgccaactactccctccggtttcattttaattgacactttggacaatgacacgctctacaagatatacctttgaccttatttttctattataatatatacaataaataaatgcatgtttacttttattatagtgttttgaaagacaaatctatatatgtttttctagtttctttaaactaaatatttttaaagttattgatggtctatatttaaagttattgatggtcaaagctataaaagtttaacctcaactttgtccaaaacgtcaattaatatagaaccagagggagtagacaatttgatgatatgtgggtgtgtttagatccaaactttggatccaaagtttgcaaaattccatcacatcaacctgtcatacacacacaacttttcagtcacatcatctccaatttcaaccaaaatccaaactttggatggaactaaacgcagccatactaggaggttctgatgcttcttcatcaccggctgcttccatgttagttgttgacttgttgtggacctattaaccttacagggtcccctccttcatatgcataaccatatgatcacaccagcggtgcaagctggaatgttcattcttgcaggaagccaggaaccctggaggccaactccagagttgatgtaggagtactattgattactggcatgctgccctatagccaccgtcacaggtaaatgcgcacggataaatggcacagaacgtacccagctgtacagggaagtaatcaataatgttgacaacgaggtgctctccaatgccctgttggaccgaacttccaagaaattctaagaaccaaccgtatcagtccaaccactgagagtaagtataatactgagctataaacctactatagcttaggtggaggagagagatagtaaataagagctagcttatcacaaactccaaaacaaatacattaaatatataagtgagagataaagagaatagaagaaaattataaccaactttatggctaatctattatatatgttgattttagataagctaatagtaggaattgagctatactattattcttgctctggcatggaaacttgattgagttcagtcgcctcatccatggtccaaccattcaggaggttctacgcatgcgacgcctcttctataaatagagcagaggtcgcacagctgtcttcgcagacaa

SEQ ID NO: 14196 - DNA, 4523 bp, Oryza sativa
cagccggtttttctgccccttttcttgtatccctaaggttttccacaaattatgcatatatgtagcgaccactctttgcgaggttgatgaagaagccacgttgccatggcgctgcttcacgccaccctcgccaatttccttcaaaatatttttttaactaacaatgtaaaaggcaatcatagacgatcatataaacatgtacacacccaccctatgaatgcacatacacataccctatctcctatgagagaaaaatatttgtcaacaaaacatgaaaaagtatgtagatatgagagactaccattcgcaagaaaaaaacttacatacatacgtacaatccaaaatgtcatatggaactatattttatcttttttaattatgttgttctcatataaattgtgctaaaaattagtacaaataattttgacaatatagattattcctttgtatattacccatgatcatgtataggtaaattagatgtataatataagaaaaaaaatcaacactcatattatgtttacaaaggatgataataggtaagtttacatataactgaaataaagcgatttttgtttgaatatgatagacattatcatttagtatatcaaaatctatggtctattttacggtataaatattttcttcttttacggtaaggttatgaggtaatctatggttttttatgatgatatatgacttttttagtagttttttttaaaagaataataaattgcccgcgcatctgtgcgggcttccttcttggttatttttaaacattagattagatgtatgaaagtaatccctccatattaatctcccgtgtacataccacagaaaaataagtactattcatccataataagatcctttaacatttttctaataaaaagaataaataaattgcgcagatgcgcgggcttcctccctagtctatctatctatctatctattatctatctatctatctattatatactaaaagtccattaaacttcctacaaacgctcccaagccgccacgtggcgctcaaataaattagagaaatccaaaaaattctaagaaaaaaagcaaaacatccgaccgttaatttttacttaagatggtggaccattattcttcaccattagatcttatcttaaaaaaaatatcctaaaacccaatccataatctcctcccacccctaacccaccacctctcaggtggccctcaagtacgtacgagacctcctctcccctgacgtacgtacgtacatacgtctcttcctctcctgtacttccttttccttttgtcttgccattttccattcaatctaccaattttctacctagcaaaattcaatatgtaaataaaagtaaattctctaaatgattataatttttacattatattttatttatctacattggccatgtttggatatacaagaatatatcttttggaaaaaaaatcctatcttttacatgaaaaataaaaagtaattaaatattaaattaataacatatatatgatcttcgctcctctctccttgctcactttctcctccctattttgtagctagcaactcattatataaataaaaagagtaaatttcataatactatatctatctatctatctatcatatactctttccgtcacagaatataggatgggtctcatcctatcctaggttgttacattctaggacagaggcagtactaaaagtctattaaacttcctacaaatgctcctaagacacaacatggcgctctaataaattagaaaaatccaagaaattctgagagaaaagcaaaacatccgagatgaaccaccacacctaagacagctaaggtgatttaccaaggtcatcacgagtgtcgcagcaatactgatttgccaaggtgaagatgaatcaaatcatcagtgtataatgtttgttttgttaataacacttcaattttaatttgaatttaatttattaaacatgatttcttaacaaaataagtctactttctttctcgataactggatggataattactcatagggatgaattaaatattttgttgtataaaactaacaaatagcttataaaaattatcaaagaatatcgttgaaaaacaatcgtagagaaatacttttttgaaatttgaagcgtagcatatactgtctggttaatattccaatcttataaatttcttgaacacaacttacgatacatgcccgcgtatacgcgcgggctaccttcctacttcctagttatatataacaaagtgcatatgctatatatagtgatgtacctggtgccatgtaaccaaccgttccagacatgctagcaacaatcatcgagttgtcatcgcctaatagcaacttcgcaatgccaaaatccgccacatgtgctgtcatgtcattgtcaaatagcacattactaggcttcaaatcacagtgcaaaaccacctcgtagtgctcatggtgcagataatgaactgccatggacacatcgagcatgatattcagcctctcgaggaatcccaggtgcattgtgccctcggagcagtgtagcagtttctctaagctgccatttggcatgaactcaagaaccaatgctttgaagtccatgttcgaacaggtatttagtatctttatcaggttgcggtgtcgcaccatgcgtagtatatgacactcagcatcaaagattctgatcgaatgctccagcttcatgtctagaacttttatagcaacaaccaaaccactgccaagttggcctttaaatacttttccaaatcctccagatcccaacaggttatcatcactgaaattctcagtggcaaggacgagatcatgataggtgagtaactgagggcctatgacatctgccatatcaccataagctttggccttcttgtgtttcttttcaaacattaagtataagaaaacagcaaggatgccagaagctaccaagatggctgggagtagaagttttagaagaggtctgctataagggtgagactttttaagacagggtgaaaatccaagacgtggagaaccacataacccagcattcccaatcaaagattgtctcgtaaggttattagagaaaattcctccctctggtattgggccttcgagcctattgaaggagaggttcagcatagtcaagtcggtaagattttcaaggaacatgggaatggaaccagagaggttgtttgaggaaaggtctaaccatgttaagctagttagactttggagagtgctaggaattgaaccttccaaggagttgtgtgagagaatcagataggttagcatattgagctgtcccaatgattctgggatgcttccattcaagaagttactagaaacatcaatttggtcgatttgtcttaggccagcaatgtcggctggcagagcaccgacaatggaattacaggaaagatttatttggataaggttatgaagttggaataagcttgctggtatctttccacttaactggttgttggacaagtcaatgtaatctaacctgctaagattgccaatgctatctggtatggagccagagattttgttcctttcaagaaatagtcgttgtatactcaaaagcgtgccaatctgtgttggcaaagggcctaaaatgtgattgttagagacatcaagcaacccgagatttcccatcgtagcgattgattctggaattgccccagtgagttggttgtaaccaagatctatcagttcaaggctgcttaagttggacattttttctggaagactacctgccaacttattatgatctgcaatgaaactaattaaccgtgccgagagattacccaaatggtctggaagggcacctacgaaagaattatggtccaagataaggtcttccagctgcctacattctgaaagagatgacaagaagcccatattcccctctaggttgttgtggggtagaacgagcttctgtaaagcagcaatgttccccagtgtccgcggtaccgagccagacaactgattagctgaaagaagcaagtacacaagtttctgaagtaatcctatctctggtggaatatttcctgtaaggttgccaaaagagagctctagtactgtgaggcgggtgaggttgctaagaacagctgggattgtaccaacaagcttatttccacccagtgaaactacttcaagtcgtgacaatttagctaaccatgttgggagaacatccacgaaagaattgctatataaatagatttcccttaagtactggcatgatgcaagccccgcaggaaaccgaccggcgattctgttccgggcgagggaaataaatcgtagcatagggagcctgaatgtctgattattgtttggtattggtccggtcaggttcccgttgcctgccagcgccatgactcgaagccaggacatgttgtacagggcttgtggcactaggctggagagctgattgtactgcatgtctagaatctcgagttgagacagggaggcaacaccatccggtataggacctgataggctgttgtttccgaaagataggtacc

SEQ ID NO: 14197 - DNA, 2065 bp, Oryza sativa
gtctatatttaatactctaaattagtgtctaaagacagggactaaagttaagtccctggatttaaacaccacctaagtaaagctggtccagattaaccggaatgtgaagcacccggaagtgacctgcaaagaagcgatcaatttccaagaagctgcctgcagcttcacgcgcggtcccttctaccaaccacccaaagcgaagataacaactatttcttctctctatccgataaaaaactactccctccgtcccataatataagagattttgagtttttctcacaatgtttgaccacttgtcttattcaaatttttttaaaattattaattattttatttgtgacttactttattatctacaataatttaagcataacttttcgttttttatatttacaaaaaaaaattaaataagacgagtggtcaaacgttgcaaacaaaaactcaaaatcccttatattgtgggacggagggagtaatatagtattggatatatgttgacatatcgcagtactacgaatctgaatgtctactaggttgagtttttttggaggattaattaattattatattttaagatgaaggtaacaataataatagtacaatagtcagaaattgccgtgctgggtgaccaagaaagtccaacaaaacaaataaaataaaataaactgagaatgtgaggattgaataaacaggcgaacgttcaactcgaggcgaggatagcagcacaatgggacggatctagcgcttggtgagtggcgcgcagtgggaaaggatcggaggagtgaggggtaggatgttggtgacggcgacgatagatgtcggagaatgaactcctccatcaaagaatcgtgaggcccccctttgtgagttcggccggaggcagcgggtgagattcgagggcttggtgagcgaagctgtgtgatcttgagggggtttaatcccccaaagacgatgagacaaaaggggtttatacaggttcgggccgctgagaagcgtaataccctactcctgtgtttgggattatggttgagtgttacaagggttcctaaactccggagagcactctcgctcttcttctcctagagttcaggttttctgtcagttgtcctctttcccggcgggtaaggtcatccttttatatatcaaggggttaccacataggcccaaaaacataacttagtggagaaggattacaatctttgcattaaatgcatgtcttgtctcttaatttgggaagcaagcgcacgtcatcttgatgatgaggcctgtcaaatcttgccgcctgacacggggagtgcccctgtcagtcaccatttaatgggtgaagacttctgggctcctattacaccggaaaacgggagccttgctttgaccagagcaggaggaccgactccttctgagataagaggatgaggacctctcaccatcattatttgatgagacatgtcagactgcacgttgcctgacacacgagcagcgcacaggcgcactaccccagtcctatcggtcattcgaccggtcacagaccggttgagtgcattgcacaccgcattaatgtggcgtggcgtgactactcgggccgccataaatgcgggtaggtgggcacctgaggcggacacttaacccaacgtacatggtgaccaggagagggggtcgggggagcccgaccccaagtcacgggagcgggcggccgccgcccgacctcgggcccgatcccccctcgggggagggccacgtggcgcctggggcagccttctccctctagtctcggccagggagtggccgccgccccacctcgggcctgactcccctcgggggagggccacgtggcatcggggggcagcctcctccatccagtctctgggaaggagtggccgccaccctacctcgggcctgactccccccctcgggggagggccacgtggcatcaggggcagcctcctccgactagtctttgggaaagagtggccgccaccccacctcgggcctgactccccttgggggagtgccacgaggcattgggggacagcctcctccgactaatctttgggaaagagtgacc

SEQ ID NO: 14198 - DNA, 775 bp, Oryza sativa
catacagaagttgccagattccattggtcacttgaagcaattgagatatcttaaagctcttgggatcaaggataaaatgatccctaattgtataactaagctctcaaaattaattttcctcagcatttctgggtcttcggcaatcttgacactgccaaagtcaattggagaaatggagagtctgatgtacattgacttgtcaggttgttctggattgaaagaactgccagagtcatttggcaaactaaaaaaattgattcatctggatttatcaaattgttctaatgttactggtgtatcagaatccttggagagtctcatcaatctcaaatatttgaatttatcatactgccggaatattggacaactacctgaagttatgggtaacctctcgaaactggtatatttgaacttatcaagttgctcctatatgaaagggaggttagaaacagaagttttgggtaccctcaccaaacttgaatacttgaatctgtctacagaacacttttatacggaaaggctagctcaaggtttgaacagcttaatcaatctcaagtatttgaacttgtcaggctcgctgaattacttgggttcttcaatagatatcagtttcctcggttgtctgaacaacctagagcatttggtcttgtcgaagaacatatatcttaatggcgtcgtcttacctgactgttttgatacactcaaaaagctacatacacttgacctctcggattgcccacttttgagtagtttaccagcaagtataggtaaagct

SEQ ID NO: 14199 - DNA, 2862 bp, Oryza sativa
ccgggactaaagatattttctcgctatttccaaattctttttaaacccggttagggttaagaaccgggactactgataagcgcacttaatattaatttccattacatatgtgattctaaaatagagtgtgatgcattaggattatttaaagtcgagcaattaatggcaattacttcgaaacattattgttgtctgtagtgaattaagtggataaaacgtaataagcaaatatatgatttacaattaataagcattctaatgatcatatatacttacatatgaataatattaaattgttaaaaattgtaattaacatatgtatatacatacgacatgtatgatttaaaattaataaaaattataataatcatatataattagcatatgaatgatattagattgttaaaaattgtaattaacatatgtatatacatacgacatgcatgatttaaaattaataaaaattctaataatcatatataattagcatatgaacgatattaaattaattgttaaaaactctaattaacatatgtaaatgccacatgcatgatttaaaacttttaaaaattctaattatcgcatataactagcatatgcatgatttaaaattgttaaaaactctaagtatcatatgtaaatgccacatgcatgatttaaaacttttaaaaattctaattatcgcatataactagcaattacatgatttaaaattgttaaaacctctaataattgtacgtaattaacatatgccatacaaaaattgatttatatggataatcaatacatccaaaatagtttacatcgtgtacacaataattacgtcaatacatcagcggtgacggttgaccgcacgtactttctcctcactattgttccctccttgtgatcgctacgtgagtaaggggtgtcttcatttgataggaggatgctaaggtcaatcgtcaccgtgaaagggggttgcccatccaattgatcgtaatcctcgtcagtcttgtcctcaactccgatgatttttcttttgccttggagaaccacgtaacgcttcggctcgtcaggccctttgcccttctttcctttgctagacatgtccttcacgtaaaagacttgcgttacatcattggcaaggacaaaaggttcgtccgagtatccaaccttgttaaggtcaaccgttgtcatcccactgtcatcaatcattacgcctccaccagtcaacctaacccattggcaccggaatagagggaccttgagaggaccatagtcaagttcccatatgtcctcgatggcaccgtaatacgtgccagttgttccatcgtgtcccatggcatcgatacgaacaacgctgttttggttcgtgctcttcgtgtcttgggctctcgtgtagaatgtgtacccattgatctcatatccctggaatgtggcgatcgacccagatggtcccctcgccaggaaggccagttgttggttgatcgtctcgttacccatgagatgttgttgtagccacgcggggaaagtatcaatgtgatgccgtgtaatccacgcatcggactaaccgatgtttctggcgtgaactagagccaagtgctcctcgatgtaaggagctaccaatgaagattgttgcagaaccgtgaaatgggctttacagaataaattgttgtctaccgtcattattgctttccttccgagagttccctttccccgtagtctcccttcatggcgtgattcaggtaccccgattgggcgaaggtcttcaataaattctacgcaaaattcgatgacctcctctgttccataccctttggcgatgcttgcctctggacgagcacggttacgaacgtacttcttcagaacgcccatgtacctctcgaaaggaaacatgttgtgtaggtatacaggcccgagaatactgatctctttgacaaggtgacaaagcagatgtgtcattatattgaaaaatgaaggtggaaatatcaactcaaaactgacaagacattgtaccacatcattctgaagggcttctaatctatccggatcgatgaccttctgtgaaattgcgttcatgaaagcacatagctttgttattgttgcccggacattgtctggaaggataccccttattacaactggtagcagttgtgtcatcaacacgtgacagtcatgagactttaggtttgtgaacttcttctccttcgtgcttattattcgcttgatattcgtggagtatccagacggtacctttatactctccaagcattcaaacatactttcattctctgccttgctaagagtgtagctagctggactcaagtaatggcttcctttctcctttcgttccgggtcaaggtcgctgcgttgttccatatacttcagatcattacgtgcttccagtgtatctttcgactttccatatacacctaggaagccaagaaggtttacgcaaaggttcttagtgaggtgcatcacgtcgattgcgtggcggacgtccaagaattcccaatagggtaactcccaaaatatagagttctttttccacatcgccgcgtgaccatcttcgctctctataggctggcttccaggctcctttccgaacactactttaagatctttaaccataacaaacaccgttttcccgctgtgatgtttaggcttcgtacggtggtccgccttatgttcaaagtgcttgcctttcttccgtaccgggtggtttgcagcaaggaatcgacgatgacccatatacacaaccttcctacagtgcttaagatacgtactttctgtttcatccatacaatgagtgcaagccttgtaccccttgttggactgaccagaaaggttgctaagtgcaggtcaatcgttgatggttac

SEQ ID NO: 14200 - DNA, 3771 bp, Oryza sativa
accacccaatttattgtttaaatttagtttttatttttattttcagcagcaattaccctttagtccctatattttatgtaatttagtcgaaacagttcatcagttgtataaacaattatgtaatgatcctatagaccactgatgttatgtgtttattaacataggtgtttatttaaataccctgtttcactaaatttatttgttgtcttaataacatgccttttgcatattatttcaagacacgctctactttctcgctttattaatttacaaaattctataaattttgtattttgatttagcaaattccattaattatgtccaacataattaatggaggatttaatgcatgttccacttcatactttgacttggaaattaattacatgtcgatggagtcctatactttggtcatatcgaccataacttaggcagcgagtatctcgcccatcataaagtggtctacattttgagatgattacctgatggagtcctagaaattggccgcactggtcataacttaggcagcgagcacctcgcccatctcacagaggtctacatctcacgatgattacccacatgtgttcttttccaagaatatgttttgagaaatgagattgtttgaaatttggttgaacacaaggtagtggagtcctaaacaatggctgcggtatattcatcagaatatatttgcctggagaccgtgttttaggcagcaagtataccttgcccactattaagagatctactccactgtttaattacttggagattagccacattgtgccacctaatttcgaattctaactcaaaattgtcaggtccataacctacatctttcgaaacattacagaatatgaagttttacatttcgcattgagatttcaaccttaatatcatgtttttattaatttacctctgtaaattgataatgttaaccatgattgtagggacatggcaacaaaagagttcgacgaactcgccctcgatgggactaactatcccatctgggcttctgatatcaaaatcaattttgcctctcgggggattctaaatacaattgaggaacctaatgatggggatccagcaattgagcccaggaagctcaatatagccctttttcttttgagactctacattcacaaggatctcaaacatgaatacatgttagagacgagccctctcaacctttggaaagctctaaaagagtgttatgatcagcaaaaggaactcatttagcctgaggctaattataagtgggttcatttacgcctacaggattttaaaactgtggcaggatacaaccatgttgttcataacatttgttccaggttgaagttttgcgaacaagagccaacgaaggcagaaaagatagagaaaactctatcaactatgcttccggaggacacgatactgactcaacagtatcgcgctaacaatttccagaaacattctctgcttatacatacattgactcaggcagaaagacaccatgagctttctttaaagaatgcccaacagcgcccaccgggctctgctccactgcctgaggtgcacttcaatgtacagaataatgctgagaataagaaaggattcaagggaaattcttcgaataatcctaagaatctgactggaaagcgcaaacgcaacaacaacaggcgcaaattcaagggtcgaaagaaaggaaaagggaagggtaaggcaccacaacctcgtagcaatggcaacaagcattgcaacaggtgtggatctgacactcatgtcgctaaagactgccgcatcccgaaacatctcgtcctcttgtaccaaaaatccctcaaggacaaaaaaatcttctgagaacccaagatttgaagcccacttcaatcttacacatgaagagcgccctgaggttgcaagttctcaccaggctcctgctgaaccagagagcaacctcaatgttctcccagaagatgtcgctccactctctacgatggacggtatgttcatcgaatactgctcaacggaccaacttggagatttgcaatgatctcggtgcgtcctacttggagatgaagctgcccttatctcagtgtgcttgaaacagtatattgatatcctataagtttgccaaataatattggttgtaataagtagataagtacgaactcccttgtattgtaaggttgtatggcttgctagtcattagagtatgtactattaacatatgtatttgatgttttaattattgtatgtatgtatatatattggataaagaattcttaatcatgcaattcttctttcattatagatgtctaaggatatcgctccgattgtagaggaattatgtcttgtggacagtggtaccacaaactctatacttagggagatcaaatactttcaaactctcaaaaagagagaaggcaaagttttgactatcgctgggcgcgatactgtgatagttggctcaggaagagcaaatattacactcccaatgggtacacaaattacaatcgaggatgctttattttatcctgattcaacccgtaccctattaagttatagagatatccgtcaaaatgggttccatattgaaacccatatggataatcgagaagaatttcttctcttaaccaaacaaaacggatatggcaaacgcatttgcgagaaaattccatctctcacatcgggattgtgactatacatacattaagcccattgcacatgttgcatacaaagtaatttttcaaaatgttgatgcattccacacttgtcatgatcgacttgggcaccctggtatcgggatgatgagaaaaattattggcaactctattgatcatcatttgatcactgacaaatttcccaaatcctctgatttcgtatgcactgcatgtgctactgggaaactgattttgaaaccatcttatctcaaaatcagagccgaaccacttaaattccttgaacgcattcaaggagatatctgtggccctattgtgccaatatctggaccgttcaggtactttatggttttgattgacgcatctactagatggtctcatgtgtgtcttctatcgacacgaaaccatgcctttgccaaattgatgtcacaaattataaggctgaaggtaaattaccctgaacataggattcaatcaatccgtatggacaacgctgccgaatttacatctcatgctttcgatgattattgtatggcattgggaattcaggttcagcactctgttccatatgtccacacacaaaatggtttggctgaatcattgatcaaaagaattaagcttattgctcgaccattattgatgaattgcaaattaccttcgtcgtgttggggtcatgcagttctgcacgctgctgaccttgtccaactacgaccaactgcatatcatgaaacttctccaatgtagttagtacgtggaaatcctccaagtatttcccatttgcgtaagttcggttgtgctgtatacataccgatttcaccaccacagcgtaccgctatgggcccacacaggaaagtggggatctatgtgggattcaaatctccgtcgatcataaagtatttagaacccttaacaggtgatctatttactgcccggttcgctgactctatctttgatgaggaacatttcccggcattacggggagacttcaagtaccagaaagaatgctaggaaattgattgggatgcccagggtattccagcctcagacccacgtactactgaagctgaacttcaagttcagaaaattatacatttgcaaagacttgcaaataacc

SEQ ID NO: 14201 - DNA, 3276 bp, Oryza sativa
gtcatctattaaaaaacagaggtagtataaaatttaaatcctataaatacttacattttgaaataaattaagtatttagttagagaggtaagacacgcatacatacaccaccacttggaacgcacacatagcacactcaaatggtttactcagagttgcggctgcgctacatccaataggaacattgccacaagcataggcggatctaggagtggtccagtggtctcgatatgtgcctaagagcaggtccaatagcatgctataagccagttataaacatattttaaagagataaaggaaaagagagaagagcggcgggctaggactataagacgtactgtgcgtataacatgtaggaccaggtattaatagtatagtaagcaactattatatgaattggctattatgctggctatggatgatttgaagctagtagttggctatactattaaacttgctctactagcttcaattcatctatagctaatctaatagctcattcatacaatagttacatactacacttttaagagcaggtacaatagcaggctataagccagctataaacatattttaagaagataaatgaggtgagaaaagagcagctggctataaagatttgtagccagctgtagcacggactccaagacgcagtgtgtgcatgataggtgggaccatgtattaatagtgtagtatgtaactattgtatgaacaagctactagattggctataaatgaattagagttagtagttggctgaactattaaacttgctctaatacatggtcccacttaacatacacacagcgcgtcttaaagtccgtgctacagctggctacaaatctatagtccactgctcttctctctttttatttatctccttaaaatatgtttgcagctagcttatagcctgctattgtaccttctcaaatagcgccaaagcacgctaactagggctgtgtttagatccaaaatttggatccaaacttcagtccttttccatcacatcaacctgtcatacacacataacttttcagtcacatcatctccaatttcaaccaaaatccaaactttggatccaactaaacacacagcctaggtatgtgccacgcaaacatgcagcacataaatgggaacgaaatactctgtccatgactataaacttaaaatcagctctgattgattgagctacacaatcgataagccgtagaagaaaaaagtgaagcaaaaacaatttgttgtaaaattttatatgtatatcattctgatatagaaaatagacaagaaaaatagataatcaactataaaacaagtttaaaagtctaaattttgttggaagcataagccaacaagcttgatgactttgttggcttatttgttttttaaataaaatctctacttatacttttacgtatttatactaaaattttaaataatatgaacaatcaaacattataaaaaaatcaacattaactcatattttagaacggatggagtaccatactagtccaggctgtgttcggcagggagggttaggaattctccctccaaacacgcaaaacaaagtggttaattagcatgtaattaatttagtataagctattttttaaaaaaaatggattaatatgattttttaaagaaacattcgtatagaattttttttttaaaaaaacgttcagtttagcaactagcagtttattaggaaacgtggagttgggaactgaagctccagggagactctacaaccaacccatatacgaatactacaaacaagattgggacagggcacctggccaaagctgctggagtgtggagcacgcgcatgcatgccgagtggcgtcctttttccccaaccccaaccacgcgctcttgctgccgcctgccgccgcgcgcccacagcttcttccgctcatccaccagtagcgatcaccgcatcagaacaaaaccgaggaagatccaaagattcagacggaacggagttacggaccccgcgatctgattccaacgcttcagaaacccgcttgctgctcggtcaacatccagcggcagcagggcagcaccaaagaaaacatcacgatcgaaagaacaagaaaaccatcacaatcctggccaaggctcgcaggcgcgacgaaaaccgattgaaattcgcagctttcgacctacggttttttttttttgctatttcaattatcagatatttacatagatttttttgacttccatcttactctctccttgcacatgttacttttgtcatcaagactaatgaaattaaatcatcttacatgcaacaaagattaagaagtgaatgcaaccaataagtatttagatgactccttaggttttattcaaacatttaatttatctcttcgtttatgttatgaaatatttgggtgatctcatccatctatatggatagagcagcaataaatctaggacaggtcgtgccccacacctcttctcgcctcacggcgattctaacaacggacgcgatggttcccaaaccatcgcgtcttctattaccgcctctctccccctatatattgtaaccattgttatcaataaaggatcgctcattcattctctacattcttgtgtgcaattctctctctcactcaatctctctcgctcaatcaattctattcacaacacgttatcagcactttcgctctcgcgaaggagatcgcgaagtgaaaggaagaaacatcgcttttgatctaacagaaaagcgaacagaagaatcaacaaagaaggtacgatgcctacctttcattggatcatggatgtcgttctcggcctccctcgccatcagcgcgcacgcaggcttcaccatcttcttcgtcgatcgatgaggagggcgcgccggggatcccgcggaggcagggctagggttggtggccgccgccattaccctcgtcgtgtgcctgcaactccggttgtggcccccccgcccgtccctgtcgcacctcctcctccgcctttggttgaggaagcacctcgtcggatccttgtgcaaggggtacagtacggtgcccaccatggatgggagatggcggtggaggcgaatggcggcggcggagaaggtggaggtggcggtgcaattggtggcgctccacggcggcggttggcgacgtcggcgcccccacagcgacgcccccacggcgacgccccacggcttccccatggcggcgtcggcggtttccccacggcggtgtcggcggcggcgaactggcggcggtcggcggcggttggcggcgaaatggcggcggtgagcag

SEQ ID NO: 14202 - DNA, 12009 bp, Oryza sativa
ggccttgggtccacctgtcggcgagggcagaaggaagaaggctgggggttatgtggacttggagaagggggagccgagctgggccgacccacgcgaagaaaggagggaaggagggaagggagaatgggccgagcccaaagacaaagaggggaagtttattttgttttctttttatttaaattagtttaatgaactttgtgactttaaaactatttctcgagctccgaaaattcacggaaaattccggagagtacattagggcacaaagaatattacaaaatattcccggccattgatttttaagggaaaattttaattctcccattatttcacttgattaaattgatttaacttttatttaatttctagaaaatgcattatttaatgatttttaatcccgaacgaaaatcggggcgttacaaatctaccccccttacaggaatctcgtcccgagattctgggatggctagaaagaaagccggtgctggtcagcggtctgactgatctgcacattgaactgccacattctgcttcgaactgattgattgactggttgatcaaacctgcacgattgcactggctggattcgacctttctgttcctttgctttgccaaaactggaccgactggttctgcttgaactgacctaggccagaactgcggatactcctgaaacttacttatcttggactgaactgttgaggttggcaattttggtaacctgagaattcaccacgctggctataagaggatgaaaatggaatctggcatttataaatcatttaccctatgtccgcttcgactggtcccaattcaaataacaagtaattccaggaaaacctgcttgacctgtcttttgtctgaactgcaaccgtctgcttgacctgtctaagctaagcggttgaactggcctcatgggtgtaccttagaattcaatcggttgctcggggatcggcttaattcttctgataccttgcaacatacttcttcaagtgctaccctgattgcggcactggttgaaccttcaactaaaacagcgacgaagtgaggcaaaactcttccccgagacctaccccccttacagggagtagtcttacttccgcatggctgggatcagttgaactgttgtccttcaaatatagccaacacttctctgatttacaaagagccctgactttgaaaactgaaaacttcatcggtccatcaaattgaagcaatggcgatgcactttcaccccgacaagatttggaacttaacccttagttgatgataggaaattccacataaaagaaattctcatttagctcctgatcttactaactcttaactgactttcccatcagtactaactgctggcatgactgtccttcttctgacctgacttcggtgtcgtccacctaaatgggttgtgtagttgatatctcaaaactaaactgaccgactcgcattggaattgacacaacttgaggaactggggtgctgcgaatagagctgttgtcttgatgacgctaacgccttgccgttgaacaaccttgcaagaactgaccttgtaaaccataaccactataggtagcacttgttattcctgggattggtggtggcttagctgtgctgatttgctgaggacttagtggcgtactatctgaggttgtgggtgcttcctctttgaaaacaaactagctttggctctgatcctaattccagcttgcatctgagcttgtacttgttgttggagacattgtcgttgcatctgctgctttggactctgcggttgcggtatcaacatctgacacatccatcattagatcttggctagccaggatctgaccagagcgaggtgctccgactcagctggtagcttgttgtcttgaactgatccactgactctgactgcaacacactactgctagagttgcttccgctacattcgaccttgcatcgagctttgcatctcctgcatcaatacacccatcttctgatcttggacaccaaaagttgatcatgagcagggttcatctggcgttggggcaccttgcagctttcaactaaaccattgatctgtggctttaattgatcttatctctgacactgaccatctgctgctaggacggaagagaggtggaagagaggggtcgctaaagataaggtactaaaccacttgcctactgatctgttgtgagtacacttttattgttcaagttgcttaagcaaacaacctagtatggtcgcatccccaccaatgatgcaaaccatacccctacacacaagcaaacaacacacgatctagaaagctaacggaactactcttctgggaaagattgggtttaggtcatctccgagaaaacttcacttgatcttcgcagaacgacgactctgaactgatcttctcgctccttgcacgaagcttgaggctcgaattgacttgacttccgaacagacatgaagctgacagctggtcctctaggtgtgacaactacaagaattggagagactgggaggagaattttgaaaaaccgtttgacaaagaaatgccgaagggcgagaggagacaatttgcaaatagggttttcagaaaacttgtccttagggtttgaccatttggctcaacctacagtcaagttggctctgataccactttgtcacgcccagaaatttagcccaaatttccagactattttgtgtattaaatccctgtccaggaccagccagggtacacaaaacgacaagtaatatacagttccaaacgtaaataaagcgtaaaatacttacagaaaaggcacttagtcctcacaccgaaacaaaaacagcagcagcggaaaaaggcgatcctagcggggcttcagctccactccacaggcaaaactcaactggggtctgagccttggtcctctaacttcgtcttcagctcagaagcactacacttctgaaaagggggaataatagcaagactgagtacaaccaccgtactcagcaagccacaccaacgatgcagacgtgcaaggggaacacaaggacggtttgtggctatttgcataaaggcggttgtaaaacattttattgagcaaaacagtaaaactgttgagtaattaaagtaacattaaatctccactgatcaacgctacaccacgttgaacaggcccaaccaacccacctaaactacagtgcattgggtcgatttattaagatgggactaatcacggtgaatctggtcgaccgcccataaccgcgggcacggctattcgaatagttttactctgatcagaggtgtacaactgtacccacaagacacagccccacgacacgtttccgtgcgccgacatgccaccacgacataccggaaagaggccgtgacaggacccttcgcataaccccctctagccaagcacaccacacctcaggtttcacccccgttcccagcgggcaacgggcagtcccctctcgtgcctaggtgaatccggaagcgacagaggccgtcgcagggcccgccccgctccatcacgcccacccttgcctggatgcgtcgactagaggaaagatacactacaagtccagccgttgcccacgctggcttgtggtaagtacgataagttcttccagggcatcccgcgaaccggtccttaattgccatgggtgcgaccagcaaaaccatgcacccacagcccaccattcagttgcattttagttggataattacgaccatgaagcatggccagatgtctcgagcacgcagctcaacaagatactagaatgtctaatactgcaattatcccatcaactgagctagtggtaattaagcatggctaagcatatagttctagctaggtcacataagtaacatgagctagtcgattcattacccaaggttgccaaagaatagatatcaagtaaacatggcacaagcgagcagataggtaaaccctgatcccgtgtaattagcaaaacatgcatatttatttgcaaacggtaaaacatttgtaaattaggatcaacatgctcaaagggaatgtgtgacttgccttgcttcttcactttgatcttccgaactcttttcctcgcgaccgcggacttccgaaacgacggaaactacacgctggcacgcaaaacgaggaaaaactctaataaagaccaagaaaacagtacataaaaactaaacaaacatgtagagctcaattttagatgaattttgcaagttgaatggctcaattcggagttcgaatgaattagatatgaattttagaagttttgagccatttaaatgaatttctagaattaaactcgatttattgcgcaattattaattatttttacaaaggaaaaggatctcgctgacgtcagcaaggggcggccggcaagcgggccccactggcagcggctctataggggaaaggagagggaggggtggtccaccggctggtgggccccaccgggcagtggctcaaggggaggcgagggaggcgccggccgggctcggctcggcctcaaagccgaccggcggccatggcgaccggcggcggcacgcgcggtcaccggcggtgaccggcagcgcgggagacggcggcggccggcgcgaaagcggcggcggcggccgaagacgacggcgcacgcgcggaggacggcggcgctcatgggagagagaggaaaggaaggaggagaggggattcctcaccggcgaacacggcggccggcgcgaagggagaaaacggcggcgacgaccggtgatgccgaggcgcgaacgggcggcggcggcaccctaggagagagcatagaggggttagggaagggaaggcgaccatggcggcttgaattgccggccggagacggaggggagagagggtctcaccggcgcgcgaggagaaaaaaaggctccggcggtgattcgcggcaatgaagcggcggccgaggtgcgggcgggctcggtgagcgcgacggcggcgatggtgcggcgcggcggcgcgacgcggccgactgaaggcggtgtgtggcggtagtggctcggcctcgcgatgggaaggtggttccggcggtggaggagggagatggagtgggggccggggtagagcaaggcgtggcgatgctagcggcggcggcggcgcgacgcggcggtggctagggcggagaggagcgacggccggagctcaccggaaagcggcggcgcccgggctcgcggtgcggacgcgatttgtggcacgggagagctcggggaaattggggaaaagagagaagggagctcgtggatgctttttatagaccgagggagcgacggcgaagccggggagcggcggatttcgaggggaagtggggcggcgtcgtgggggagagagagacgcgggaggcggcgacgtggccggattttgcggggagagtgggggaacggcgcggacgtgagcggcgaggtcccacggacgagcgcgcgcgcggggtggaggaggtgggcggaatcggcggcgacgtggggagaccgtggcggcggtttcggctgagggagccggaggttagggatggccctgacaggtggggcccacctgtcggcggctcgggggaaaggagagaggaggagacggttgggggggcgatgacaggtggggcctcgggtccacctgtcggcgaggggaggagggaggaggctgggggttatgtggacttggaggagggggagccgagctgggccgacccacgcgaagaaaggagggaaggagggaagggagaatgggccgagcccaaagacaaagaggggaagtttattttgttttctttttatttaaattagtttaatgaactttgtgactttaaaactatttctcgagctccgaaaattcacggaaaattccggagagtacattagggcacaaagaatattacaaaatattcccggccattgatttttaagggaaaattttaattctcccattatttcacttgattaaattgatttaacttttatttaatttctagaaaatgcattatttaatgatttttaatcccgaacgaaaatcggggcgttacagataaggtttggtctttcgaagtcttaagacaatgagatagctatttaataaattttaagtaaaatcatagtaaaaagtatatgttttgtttaggtgctagccacgcaattgcgcgggccacttagctagtttcttaaataatacggatggttaaacattgcacgaagaaattacagctgcatttaaattaggacgaaggtactaggccgcgttcgatagcgtgagattgaggggattgggtgaaagcagcactgtagtccaccgaataatttactccatcgtgaaatgcagtccagactgtccagtgacaggtgttagacagcagtagacggcgccgtttgctactgcacagatgccattcatttgggcttaggtagctgtagcgtctatttttttctacttgcaagatgatagatattttttgctgtctcaaatagtagttacagcgttctattaaaagtagtgacgacaaatgcagaaaaaaaaatattgcaattcgacatatgggaaaaaaattgttggaaaaataaaatatactccatccgttttttaatagatgacgccgttgactttttctcatatgtttgaccattcgtcttatttaaaaaatttacataattataatttattttgtgatgagttgttatatcactcataatactttaagtgtgatttatatcttatacatttgcataaaatttttgaataagatgaatagttaaacatgtgagaaaaagtcaacggcgtcatctattaaaaaacggaggtagtagcaatttgagcaacgtaatgaaaaaaattattgaatacgagttggcacagtccaaagacttgaatgcagtacataatacatatatccatcacgaaatggatttcttattaaatcgtacatctaataaaaagctcgtacactgtacaggagatagttcatgtacttctacaggttctccaccgaattggcaatggcatcacggtatgcgttcatcgcttgtgcgctattgccggcgtaatacatattggagaaggggggtgccattggtgctataggattaccattatacagagggttattggcctggaagtcattttgcttgctgtcgattcggaagttgtgcaaacaaaacgctgccaatattatgttgctctggacattcttgtatgggttgtacggtatgccttttaagattttccactgttttttcacaattccaaattgcctctcaattatattacgcagcttggcatgtatgtagttgaacttctcttcccttccttctggcggtggagcgcgtggccccttgaattgatccttgtggtaccgtacacgtgggtacggtgccaggaagcccatcctactcggatatccggagtcaacaagaagatattttcctacaaaataataagttatacatgaaaactatcagtgcacaattaatgaagtgctatatggtgtacaaatgtagtacttacgaaaaggtagtcttggaaactcctctggatatgagtcaatagcttcgtttaggactcgattgtcatgcactgatcctggccatccggcatcggcaaatataactctaccatcgaatccaacaattgttaggacattttttgttgtctcgtcatggcgattcatgtgttctatggcactatccacaccaacagtgaccggaatgtgtgtgccgtcaatagcacctacagcaaactggaatggtccaaaacgactatcttgtagtaggcgacgagggatgtccgtaaaattcagatcaattggcttgagtattttcgaccctaacataaccattcggctaagaacccttcgaaaatagatagacaccgtcgagttcgaccggacccaacgattgttcgactcccttgcagaattatttcctgccattgtgaacaagaagattcctagtgcctccaaagaacttacatcattactcccatgcaggttgtaaggggcattttccataatttccatgtagagtgtatatctgatattccgttaaacggaaaatcgcacggcactgtgcaggattcgccattgtctctagcatccaagttattccaaattgggttgggacacgacgaggagctcttggaggagcagctaaaatctcttgcatcattgcaataatagcgtcatcctcatcgctcgtgtattgcccttcagtaccatccgaactccacgatgaaccgtcgctcattgtgtgattccttcgaaacaagaaaaatatatagcttacattaaccattacaacattatttgtaaaaaaatgcacgcatggtgttcaataaaaaaattaactgcataaaaaatttcacagtgacataccacaagtaccagttcagactacaagcattagaaatgagtaaagcagatgctaaaatcctactgcaaacagtatggtgagcattattttttatgcctctcatatgaatctcctcctctcagtgagctccaggcaactgaccaagcaagagcaactcaatagaacccattaccatctacgctaccaggacccccacctccaccagggccacccccctaccaacctccaaaccctgtatgacctcctgaacaagttggcgggggtactcctccaccataaccctgctggccagttggcgggggtgctcctacaccataacgctgctgcccagttcctccttcgtatccaggctgtccacctccttggccaccagctccttttccgccaaattgcttttgccatgtctgtactatgtaatgggaccgtgactcgggtgtagggcagtaatcaatgaaccattgacgccaataagcacgctcaaatacatccagtgccataaagaataaatcactccctgggttatgtccatcagctaccaccaactggatgcaagctgctgcacttctagccctgtcctcttccaccttccgggaacggctctccatcgactgcactcgcaaatcagctagccggtgcagggcatcaccggctgagtcacttcgactcttctttgaagccgatccactcgaagtgccagcttcatctgctggcctcttgcctttttctgcacttgaaactcctggagtcgcaatgttttgttgttgagctagcagctgtgagatattgatgttgggccttggagttggctgctgaggaggtgctggtgctgcgcctgcaacagcagagtggttccctaccactgtgcgccccgaaaaaatagcacagtgaaggtcgatgtgcttgagaggggaatctttgaagacacgagctccgtcctttttctgcgaaaatggttgagtaataaaataaatttacattgaaatgaacataagtagtttcttaaatcgattttcatttttgcattttgttgacgctttttgaactaaaaaaaagacagcagcatacaagtacataactaatgtacgcagcaacatagctattattggtggcaccatgttttaacatctgcagactgcaggtaacattttacctagattttacggtctaactaattcaagaaaatggaggaagtactatatgatattgatatgcattgacaataatagcagatgatgagcagactaaaaatcaaaaaactttatgccatgtaagcaatgtgacatgtcacatagaggttgatgtcatgtcaaactatggcatcaacaatagcataggaataccaaatatctcaagatatggctcagttttgttgaaaagacctacaagagaataataaaaatagtaccaaccatgcatttgctgcttcctaatcaatttattggaaggtagtgaatgcagcagagaaattgtacccccattcattatagcaaaaaaattacattctgattttgtatcctagaaacacaaggttttacaaaggtacataacactttctatgaacaatatgtatgattatacctaaaaatagataactgtggagatttcatgaactaaacaaatgtcatgggtccttgtgttaatgcaaatcagtatggaaatcactatcttcctagttcgaccgaacacaacataagggtaggtgacatacctggtccttgtcttcccaccaatcgtcgtcagcaacaatggcttgagttatcgggtcacggccaatgccggtagcctttgattccagccacgtccaaagcatccaccttttacgacattgacgccatatgtacttcacctgatccttggtgaggtttcttccgattctctccttcatcttctgtatgaggttcttgtagccttgcggctttggacaagtggatgttatggtcattgcggacaactcctccaagcatgcctcaagaaatatgccaatttcatcgtcgctccatcggattttaccctccgccatctaccacccaatgttaacaaagcacaaatgcaatggatcaaaaacaaattacaatgggcattaccttttgtggcgagatgggccggatcaggtccaaatcgagggaccgaacaaccgtcgccggcgacacacgacggacgaaagagcgaacgccttctggggaggtcgcacaaacggctgttaggaagcgggcggccacattgatgtcattgtcacaaggaggggcagagctggcgtcagatttgccagaggcgctcgaccccgtccccgaatccagattgatgacagtccgtgaggagccggtgcggcgaacgccaaaggcacagcctgccccttggctgcagtcgacggatggatgtcctcccctctctttcgctttgttcccctggtgcccattgtccacccggagaaggaggcctcaaataggaggccggaggcgagaagatagcttccaactctgccgaatcttgacgacactgtgacacccgagagcgctccaccgagtacagccgcatgcggccaaagctgcagtgcctgatgagcagctaggtgacgcagacaacaccggcagcgctccccgacttccgcctggcttgatggcagctccgccagagaatcccctttctccggcctcgattcgccttttcagcagctcccgtgacgagtggtcgatttctccgcgtgcctaacagccccaggctgaccacgacgaccaccggacgacgctcagcagtagggcacaacgattccagccacggcaaccgcgcgtggagccgtcgacgaccgagaaaatttggcgaaggaagaaggggatcgatgggagagagagagagcgagcacggctgcttgcgctggtggtgggttggggacggatgggccgacgaatcgatccatccaaatgccgtctgtgccgtttgtacaggtgccacgtttagtcaccaacgccatttaatatgcagtaaattattcagacatgtacagtgctgaacagtgcacaattcaccaaatcccctcgatctctcgctatcgaacgcggcctaagactaccaggaagagtgtgatgactgatgagaaggcaggacagctcatggggtcaactggtgattgctgtgatgcggcgcatgtgtgatgagtggcgaaaagaaaaagggatttggtgtgccaggctgccagcgtgtgtgcttgtgtgtgaagaagatgacgattttggtcgttcggttttgaataacgaaggcactaatatcactgtatcagtggtttgacaaatagaagtagattcgctagatgaatggtgaagaaatgatgatctacatgccgtcttttttcaccgttaattcatcgacgtcacgattttgtgcgatcgtggtctcgttcacggtgtcttaagatttaggctctttcgtgatgcaggagttttacctaatttcctaggagttcgtttagcgttccatccgttgttaagtataaatatttttaggttatttaataaatactaagattagatcaaaatgtttttaagtccttttaggttgtcaattatttatactattcgctctcgaagcatctgatttggtttcgaaatattaaaatgatgagaattagtataaaaatgcttatattatgttactccctccgttttttaatagatgac

SEQ ID NO: 14203 - DNA, 6034 bp, Oryza sativa
gattcagaacatataatatatttagcatcttgtcgaattaactgtattaagtggacaatatgctgttttcagatcttacatcatgaacacattcaaatgcttggatcatggcgttgatgttgccagtgcattcaacgctgcggtcaactccgccattggtcatctcagcaagtacctaaattaccataacacactgtatcagtacaatcaagtgatacagattttccttttcctgatgtaagggaacatacatacctgctgaactggcttgtcatggtcctttgggttcacaaattcagtgcaaccaaatttcctagctgaagatatacaaaatatataagatgactttaaaagaccatcaaacaaactgatgatctggtaaatcaagaggattttaccttcttcaaatctgttggcgttcaggtcaatgccaatgatccttgacgctcctgcaatccttgcaccttctgcggcctaatcagacaatatgtagagtaattagatggatctctcattgtaattgagaacattcaaggtgagttcagacactcacagcaaggcctacagctcctagaccaaatatcgccaccgtcgaaccctttggtggctttgccacattgattgtagcaccaagacctacaaaaggaaattgcgactcagcatctcaacttacattctatcaagtaagaagaatgcaagaaacaaaaaaaattctgcttaccagtagaaataccacagctaagaacgcaaactttatcaagtggagctgccgggttgatcttcgcaacgcaaccaacatgcatgacagtgtactcgctgaaggtcgaagtcccgacgaaatggtaaatgggcttcccgttgatggaaaagcgtgatttgccatcaccaatcatcacacccctgtcagtgttgatcctgagcagatcacacatgttgctctctgctgacttgcagtgggcacactccttgcactccccagtgaacacagggagaacatggtcaccaggggcaagatcagtcacaccctctccaacactctccacaatactgcagaaatgaataaatttcagcagatatgaacaataggaatcttttactcaatggaagtgttaaaaaaaataatccacgctgtatttcagaaaatagaaagggtaccatgaatatgttaggtagcataaaggtcaagcaatgcctaatttatatgccctttgtcaactggaaaatacaaacttattgaagagaagtcttctaaagggtcaatcaacgcctatcacaaataaatctgccaacttcaaaaataaactaccaactactaactgaaagaaaaagtttcttccttgtaataagttataaattgataaatctatcaagatccaactgaagacccacaaaaaaagcacacatttataatgtttgacacaggcaacagcatgtgcccatatgattctttcccatgttgtccagattacctcagccaaatgttctactaatgccaagccaataaacaatgaaccccccccctaaactgcaattagaggaagattcaaccacaaagcatagttttaagtacttaacaacatgccacatcagcaaccagagcagtagagtaaaccaagaagtaacaacgagccaattaattaacaacacaacacaccagcaaccagagcagcagagtaaccaagtagtactaacaaagaatcaattaattaacaacaggccacactagcaaccacaacagtggagtaaccaggtagtaacaacaaatcaattaactaacagcatgccacatcacacatcagcaacaaaagcatgcatcagagcaaccaagtattaacaagaaacaaaatcaaggaagaagatgcataaaagcacataccctccagcttcatggccgaagatccgagggaacacgggagtctgtccctaagagattcagaagccacacaagaggcgcaagtcaaccacacattggagcagctatggatggataggaactgaagaagaggaggtgagtagataccttggcctcccagaagtagacgtcggtgtggcagagcgaggtgaagaggatcttgacgcgcacctccatggcctgcggcggcgccacctccacctcctcgatcaccagcggcttcgcggcctcccatgccaccgccgctgcacagatccagcaaaatcacccaccaatccaccaaaaaaacataatcctgaatgacatttttcactaaaaaaaaagatatgcttttctccacagcttctgcaagatcggtaatgttcacccaagaaaactctaaaaagaacacaatccaagaatttcatctacagcgccgctccagtaataaaatgcctaaaagttcgcccaatccaaagcaaaatcgaaccaagaagaaacagggaagggaggaaaagcactgacctttgcacttgatcaccttccctgcggtcgccattactctcctccccacaaaatcccgcacaaaccaccaaaccaaaccaaaccaaaatccctcctccaaagaatctcactcactcactcaaatcacacagatcaaatcaaaaccggtgaggaggctagatgaaccatccccgtctatatatagctcctcctcctcgaaggaagaaaggagaggatggaggatggagggtgaggtttcgccacttccttcttcttgtcttcttgggtagcaaaccacggacggagtggggcggcgtggcacacaaaccgggcctcctccccctccacctggaagcggaattgcagccgctgttttcgcctcccccgacgccgatggtgagtggccgtcggatgcgcgacggccggcgagatctgcggctgggagctgtcggcgctgggttgcaccacgcgtggattattaggaaagtaaattgattttagttagggcgtggttagggccagtccataacattatacatgatttttataaactctaaattatcaagacactactctttcaatttaaacccaactattccatatttcaatttaatgctatttatctcacatgatgttttggatgttgtgtaaaaaccggttttcttctctttcctcatttatttacttgtcacatcattttttagatgacgacttatttaatgatatgtacattatcctagtcattgggtttagaatacacttaccactacctccgtccagaaagaagaaagaacgtagctttgtactgtttatatgccacgtcttattattcgtttaaaatttcatttatatttcaattattattagatgataaaatatgtagtattttgtgtgtaactaattccttacatctatctatctatctattatattattaaaacagctttgaaaggaggcaccacgttcgctgtgggggctagaaattctcacattaatcggagaaaaagaaaaaaaaagaaaaggagagtccaagtataaatacaatataaaaatagctaaaattcggaattaaaaataagcaatattgaaaaaaatttccatataagtacccaatacgagaataatcaaaattcgaaataaaaactattatattattaaaacaactttgaaaggaggcatcacgttcgctgtgggggctagaaattctcacattaatcggagaaaaagaaaaaaagaaaaggagagtccaagtataaatacaatataaaaatagctaaaattcggaattaaaaataagcaatattgaaagaagtttccatataagtacccaatacgagaataatcaaaattcgaaataaaaataaaaaaatccaaaattataaaaataaaaggataatcaagtaggaatacaatttaaaaatagctgaaattcggaattaaaaataagaaatattaaaagaagagtccatataagaacccaatacgagattaatcaaaattcaaaataaaaataaagtgacatctaaaattagaaaagaaaatgagagttttaagtagaaatacaatttaaaaatagctgaaattcggaattaaaaataagcaatattgaaagaagtttccatacaagaacccaatacgagattaatcaaaagtcgaaataaaaataaaataaatctaaaattagaaaaataaaatgatagtccaagtaggaatgcaattttaaaatagcagaaattcggaattaaaaataaaaaatattaaaagaagagtccatatagaacccaatatgagattaattaaaattcgaaatataaataaaaataaagtccgaaattagaaaaaaaaagaagagttcaagtaggaatacaatttaaaattagctaaaattcggaattgaaaataagcaatattgaaagaagaattcatataagaatccaatacgagattaattaaaattcagaataaaaaataaaataatattcaaaattagaaaaaactaaaagagagttcaagtagaaataaaattttgaaacaactgaaattgaaaataaaaatattaaaagaacacaatacggtattaattaaaatttggaaaaaatgaaattataaaaagaaaaataagatttcaattaggaatataatttataaataactcaaatttgtgataaaaataacgactattgagagaaaataccatctagaatacatgaccagataaattaagtcacatgcttataaaggagtagagtggcggcggttgatacgacatataaaaactgttaataaaacaccaaataaaatcctaatgacaattaaaaggagggacgacaggcatgccgtaaaacaaaaaagcaagggagttgccatgacttctataaagttaaaaaaaaccattgataatcaatgacaataaaaagaagaaggagcgggcggggtgtataggagtatagttgacgggtcttctagaaaataaaaaatgaatttcaacgatagttatgttcgatttttagaatcacaatgacaataaagagtaggcggcaaacgggctatagaggagcatagtgatatcgtttgacgggacttctaaaaattaaaaaaatggaacccaacaaaacaataaactctaaaagctacatggtctaatttttaaaggttcgaaacttctaaaaagtaaaaaaagaagggagagagtgggcgagccgtagaggagtacaatggcaaagccgctgacggtttggcgaaacttcttgaaaagtaggaagtaaaaataaacccaaacaataattatgttcgaattttaaatctcaatgacaataaagagaagagacggtggacgggccgtagaagagtacaatggcaacgtttgacgagacatatagaaattataaaaaccgaaacccaacgtgactataaactttaaaaactataagatctaatttttaaaagttacaagaagaatgaatagaaatagcggtagatcaagcaagtaaataaagaaggagatggcataaggggtagtagctggtgtgacttttaaatactatataattaaaaacacagggatgataatgtcacgcccagaaatttagcccaaatttccagactattttgtgtattaaatccctgtccaggaccagccagggtacacaaaacgacaagtaatatacagttccaaacgtaaataaagcgtaaaatacttacagaaaaggcacttagtcctcacaccgaaacaaaaacagcagcagcggaaaaaggcgatcctagcggggcttcagctccactccacaggcaaaactcaactggggtctgagccttggtcctctaacttcgtcttcagctcagaagcactacacttctgaaaagggggaataatagcaagactgagtacaaccaccgtactcagcaagccacaccaacgatgcagacgtgcaaggggaacacaaggacggtttgtggctatttgcataaaggcggttgtaaaacattttattgagcaaaacagtaaaactgttgagtaattaaagtaacattaaatctccactgatcaacgctacaccacgttgaacaggcccaaccaacccacctaaactacagtgcattgggtcgatttattaagatgggactaatcacggtgaatct

SEQ ID NO: 14204 - DNA, 15267 bp, Oryza sativa
cttaatgaatgaacacaaatatgatgatcatttagaaataacctcaaaaaactacatgtagatcaatttggaatggaggtagtaatgaatttacagttgagactttacacaacacgcatatcaaggaaataatgttagtgggtgtttgggagtgagaaacttcctctctccgaaaaataagtccctcctatacggactaaaatttttgtgagagggaactttagtccctccttcccaaaccccaccttagttgatctggacagtgtgtgcacgtggtacatttctcttttattcccaaacaccgccttggttgatgtggacagtgtgtgcacgtgatacatttctgttttagtacgatattggtaggctaattcctttgcaaaaccaaaagcattttttttcagttccacctgagttttgaagccgaaaaatgttctaacttataaactaaaaggccagcttattaacatcataattgaaaaggctaataaaccaaaacaaactggcccttagtgatcagtgtaatggtggcctagctaattttatttagtactaatttctcaaatgtcgcaactaaatggcagcagcaaaatgtaggtacggctctcttcaagtgattgtgtgctttaattgctacaaggattgtaatctgtccgtgctgtcggcactgcagttaatcattgccgttagtggcttcacaaaagataagccaatatattaagttagcaaccgtagcaagacacgtacaataaaaaggaaacatttttgggaccaaatgtacttcgcgatgacaattatattagtggtgttattagcatccaatgagtgaccaacattactgattgagtgtgttgcaattaaattcataaatagccgcgtaagcagctacagttgtttgcttaaatgagcccaaatgtacttttgtcattgctaattccctctctattgacatttgtacaacttttcatggaaaacattctatgatttaacaccagctgattttagcttgtgatgattttatttgtatgtttcagaaacataaaagtacagcagagcaaaatgaaacagaatgaccaaggtcatcggccaaatgtctggtttaattttagtataaaccggtcagtactcatcactttttgggtaagggtctcaacattttaaccttggtcataaccagaatcagtaaccttttctccgccaaaaaaatagtactactccattattttttttcttttatttcacgctgacccattaatcatgcatgcctagtttccaaccaattaactctacgacgtagagtgattaataagagtcgaacacgataaaatttagctagttctctcaacctctcaaccttttggttatgacactaatacgacatgttaaggttatgatttacatactgagacttaggccatgttattaatttttgaattattcatcgcattattaaaatggattgtgtgtgcatgctttgaaatatatgttttttcttttcaaataaatttctcctgcctgtttgttaatattattttgtaacaaaatttattcattcttataatcaactagataatccactacaataatctaaaataaatgaaacggggccttaaaaatcttaatttgttgagggaaagttgccattattaataaccaggcccgtacattcacctccataaatcatagtactatttatgtcctcaacatatacaaacatcgtgaaattactttgttgtactaagaataagtgcattgtacaaaaagaaaaccgtgacaaaacatgaagcaacaaaggaattcaagcaccagatctagagagctggaaaagatgaattgaagatcgatctagctaggctgtgatatgtatgggacaggttgacagaatcacatgtagaagctaggtctctttctcacaacaacagtgatctttgcattgtccatgaacagctaagcacaaatcaatgcagcctcactttgtagttgcaagccactacaaggtactctgttcttgctcctcaataaaaacagagcccaactaacactgcctacttccctgccaactactcacaaatgtggcattcagataaaggcaatcctgaaataggcttgaacagagcagaatacatttgtgttttacagagacatttaacaattaatcaaagcaagggatatagtgcaaagttagtacaaattagagtgaggaagagtgaaaatcttgcatggaaaaacagagtaacaaacctaacaaatcagttgacttgtaattcagtgaaaaatttacactacctggtaattgcattgcatatatcaaagatgatagaacaatccatgtactaggccggccctaacaatataactgcactttaaagctcgtaacaagaagcaaatggtagcttttaatttacaatccaaccaaagaaaaaaaattaagctaggggacagatcgttacagaggtttggcaccacttagaatcaatgaattcaacacttctttacagtttcactcggcaacaaatcaacaaaataccccaaacccaagaacaaaaatgactatatctcacttgtacatatatgtatatatataaacatgtagaccaaatttatcttataacccctctctctgtatatattccatcttctgagaccccagaaaagaagaaaactgcacagatcctcaattaatttaatatttttggacctttatgcaaaatttctctcttcttctgtcccagcaagatgcacatgaacttgatcaattccttttaatttccagtaatttaattatgatctacacaattttgttgatttcaagaagaaattaaaattatgccaaccatggatgattaattttcatctcattctaccagctaatagctctagcttaattttttttcaaactcagttgaacttggagcagactttcctgacctcgccggcggcgccggtgagcacgccgacgctccccatcttgaccatggcgtcggcgaagtcctggcggaagtaggggccgaagaaggcgctgagcatgctggagtaggtgtcgacgacgccgacggtggccgtggcgttgtagagcgcggcgtcggaggcgatgacggcgaagccgttgcggatgttgcggaggatggaggtgtcgaactcggcctcgctgccgcggtcgagcggcagccgcgtgttgaagtcgccgggggcgcaccgggactggagctccgagaggaacgcctccgggatcgacgggtccgcgccgcggccgccgccggcgagcgggaagttgtacagcctgtcctgcaggaagaagcacgccgtcgtccccaccgtgtgcgccgctgcaaacaaaaaacaagagttcgtcgccgtcgccggccatggttaggttagtgtgctcgaccgcctcgacgccatggttggcaatgcaaggagtcaagaagaagatgaggcttacagctgaggaggacgaggtccttgtcgtcgaggccattggcggcgaacttggagcggaggacgtcgatggagtccttgacgtcggggagcacgtcggcgtcgcggaggctcgacgtccgcccgtcgcgccgccccgtcggcacgtcgaacgacggcccacccgtctgcaaacaacaacaacggatcatatcaatccatgtcaccgagctaggcagtacagtgcacagcgacggagcctgaaagattttttgagcccgaacaaaattcaaatataacaagtacttgttatagaaatttcatcatcaatttactcataaatattaaaatttaaaggagttttcgccggcgcggtgggtggacgtacgaaggcgatggcgtcgcgggaggcgaggacgacgatgtcggcgcaggagacgacgccggggcactccgactccagctgctgcttgatgctgtccaccacgtcaagcccacgcagcccctggtgcttgttgttgttcacctccgcgttattccccactcccttgatcagcaccgacccatcacacccctaattaaccaaaaatattataatagaaaattaattaaacttaattaaaattctaacaaaatatatatcacaattgaaaaaattataatttattgtaatatttttatgtatatgtaccttggcgaagcagtcgtggaactggagacgaacaagggcggggaggatggtgctgtcggcgtcggcgaactgccggacggcggaggcgacggtggattcagctgtagggcatgacttggagtagaaccccaccttcagctgcgcattgctgacggcggcgccggcgacgagcaccgccgccaccagcaacatcgccggaccaccaccgccaccaccactcctacccatctcaacccaacaagaagagatttcagagagatatctagctagctaagatagctagaatggagaaagaagaaggtgaggaggtaggaggtcggaggtccagctgggaactgcgttgaagagcttttatagggttttctcctccatgggtgggggtgtagtacatgcaatggatggatggatcatggacaggaattatgtttgcactttctcgcaaatggcgccaagctgtaacacatgtggttgcgcgttacacgatttgacttgagtgaagtcccatcgtttcgctacagttgattacaagccgtaacacttattagtgaaaaaaaatatttaattatggataaaacttttgtagcattaggcacgctcttagaaatttaaaagctaatacattagaaaataaattacgatggaaataaaatcagaaccaactctaaaattaagatttaaaattcaaattttggctacggataataagctaaagagcaattgatggagtactaggtccgacctaggaaattaaagtagctacaaagtacacttgttttttttttttgacatatgctgctgatttgtttttttttttccctataacatgaaaataaatcgtgtatatatgctgacactgaatctactgctactagctagatactccagttttctgaattcaaatcctgcaggttaccttcatgaatgctatacacatgcatatactatatactagtaatagatatagtacagtactatgcccaatttcagagccagaaatttccagtggaccatggttaattggcccaagcatgtacgcatgtgcacaggtcaccggagttatgtaggacggttgatcgatgaagctttttcccgggcagcagattgccactgcaaaacggcagtcagcacggagaaaagtagctggtttgttcatgcatatgcatatgctggtcctaactgtggttggcaccaatggctggctgagaaagagcaaagtaaattcgctcatggagtcaggataactaattaaaccaaaagtatttttgctattgggtcacatgagtatgtcggacatggattcatatatgcatgtttagggcttgattgatttggagaagttagtgagaattgatggcatatgcaggcaacaggtaggctgactgcctgaagaatggaagtatctgcagctgcatttctgaacttggagattttctgttcagaggagagaagaaacttactgtacatggctaggaaacttcttgtcatcagggcagtcatagagttgcttagctggtgtttgagcctgattgcctgacatccatgcacatgcatgcttgttttttttcagcttcttttttctttctaggtttgattttgacctgacattcttcatcagagtcgtcaattgcatactaaattaatatgttttcttttttttgagaattaattaatatgtttttctggttcagttaaatatactcatgtgattgaaatctcagaggtgtcattttcacgaatgatccaccatataccattaatttggtgtcattttctcagagtcggggtctcagtttgacctaggcttcaaatccaggtcaaaccctgtactagctcctatgtacacttgtcaatagtcactagctaggaacatggtgtcacacaaacattccgttagtttgcgagaaaatagtgttcacgcaaatattctccgctttcaattttcataactctcaattgctggcggcccgcgaattctcccccttccccctctcggccagcttattagcgcaagcggacgcaccttcaacccgccactgatttcaaattgcaaacatcattaaaaaaacttttctgcagttctagacaaaaactactgataatgcacttgctatggatgatcacttcatgattcatcgttcgcctaatatttttaaaaatgtaagccctcttagaacttctagttttatctcttcttccatgcatgtttggccttatgaaataaatgtcaccactctcacaactaaatgacttttttttagtctagtataaataaaggatatgaaagctctatcggtttgttttcttaattcattggagagtctaaaacgaattatatttgaaaccatagtaatacccactagtgaaaaaaaagtttttccaggcagccaaatggctctacgcaacgcaagcaaagactctgccatcaactaaaggcatgcgaaaaacggtgtttaaaccacattcgtggccaaggcatgcaacccctcgcccacgactatccagacgggcgttcgtgtccgaaatacagcccgtctgcacggtgatgtgggtatcgttgtgaaaaatcgttttttaagtagtgactgattaagactaaaattttatttggatcataaatcaagttgcgattaagcaagtgattaacattatttatgtccaatgaattgagaacacaagcaagcaacatattgcgtcatcaatagccaaataattatatatacacattaaagagagaagctccaaagctgactgtgcacatatcaaattatatataaaccccaagccggccaatttagctgtgccgattgtgactaggcatccacagacaagtatttattgtgcacattatattggctatcaatatatagcatgaccatgagttgggccaagcttgcaaactagagctagcttagcataagtgcacacggctgattgataactcaacggttgctcctagctacttccaccggttgaacggctttcccatttattgcccacgttgcatgtctccttccaaatgtgtgtgttaatttggaagattgccaatgtggttttatgcacgttcacacttcaatttctcgcgatttcaatttttagaggtgatccagctaagctatgcatgtttggaaaggccattgcaaccgaaataatgtgtagaggttttttttttctctggtagaggagataaaggtatctttctctatgatcaaaaagacttatttattttgatgtacaatgcactaaatgatattctatttcgcaacatttacacgttaattgttctctactgccgtagaaaataataatatcaagaagttaccttagccatcttaacttggcatcacagcttgtttaagcatatgtgtctttagttattctttttttaaaaaaacaatttaacctcaaaagttgaagatatatatagataggtcgaaacgaaaaggtatacacaccatgaattagaaagcgcaaaaaataaacgcaattacaaataattcactctatttttaaaacatgacaaaaccatcctggtacgttttgcagcgtgtctatgaaacatataactttgtagatgaatataaaaatgtttctagaaatagtgatagaaagagagttctgtacactatatactactagctctgtattaaatagattcaccgttgattttatttgtttttttcacaactttaaccacttttttaattagaataactttaatacataaaaaagactgtaatattttaaaaatacttataaagaaaaatcaatcaatatgaattttatgtaaaaatacttataaaactaaatattttgatagcatatattattatatggagtatttaaatacagaaggagtacttagtttgcttggtaaaaaaagagagtaaattttacaaaactacagatactttgactaaattatcacaaaactacagatttaacatgatgtatcacaagactacagatttaacactaattttataacaaaactacagatttaaggtaaaatatcgcaaaactacgatttagtaacaaagttatcacaagcatacatgtttaacttcaatttaatcacaaaacctggatatctataactcaaacattacattactgcaaaggatctaaatcctaaaatctgtagttttgtgataattttattctaaaatatgtagttttgtgatagttagttttaaacctgtagttttgtgataaatttattgctaaatctatagttctatgatatacgaccttaaatctatagttgtgtgataatttggtcaaagtatacgtagtttcgtgaaatttacttaaaaaaaaaagcatcttctactgattatgcatggactgaggaggtaattacagtgttatggtgcattaaaagctgcacctaagtctccgtgacggcagtttcattaattaactgtcaaacggttattcaccgacaatatttcagtacctaaagtaacctaactgcctcggtggtgggtccttaagccaagcgaatctgtgaactcggagatgtgttattttctcctcatttctaactttgaattatttttcacgcgcacgatttctaaacagttaatcactatattttttttaaaaaaaatgatagcaaagtgattgtaaaaatcatattaatccatttttaaaatttttaagccaatacataattaattatacgcaggaagggtttccaactcaaaagaacatagtcagaggttgttcaaattgacgccgcgtagctagcccatccgacggacccacttacacataccactccgcttacactttcgtccttacttcgtgtaaaagggttaatccgagagtgatatagttgttccgcttacattttcgtctttactttatgtaaaagggttaatccgaaagtgatatggtggttcccaactcaaaagaacatagttagaggttgttcaaattgatgccgcgtagctagcctatccgataggcgggccacttacatataccactccgcttacactttcgtccttacttcgtgtaaaagggttaatccgtgagtgatatggttagagggacaagcccttataagctggttccactctcactaaactagcaatgtggtactaaacatgcgcacacaacttacatggcccacacatgcctaatcttaattgggtcaggatgtcacaccaaccataccattttttttttggcaaagttgccaaaggtgtgcatacatttagttttttttttgccaaacttcgacaaatacgtaagaaattctaccaaaattttagtaatattgtcaatttatcaaaattttagtaatacataagcattactaaggtttattttggctacgatccgaacagccccttacaaaccgcgagaattttttaccatatttacccgtgagaatgtaagtgctagtatagcacaaggccacaagccgtccgatgggataactgatcggctcatattcaatttcccaacctaattaattagttaatgtttggtagatgattgatcatatgtacattgttcagttattgctgacgatttgcagttttgcactgtgtatataccgtactccctccgtttcacaatataagactttctaatattgcacacattcatttagatgttaataaatctaaatgaatgtgggcaatgctaaaaagtcttacattataaaacggatgaagtactagctagtaggtaatttgacacctaaatttttacttcacatcggtgatatatatatcgatcaagtacattaacttggtcgtcggtcctgcaatgcacatgctcttgcacggttgcacctagtcggccatcgatcaggccataaacccataactgcatgcgtgctagcttgtccatgcatatatctgtacagatgtactaaagtttttagttataatcatgctgtcatgttgccggttactttaattacttggattagtaggcctgcatatcttctgttcctttttaattatcagaatggcagaatgcacgctggcccgttggcctttaggtttttaagggccgagcctatttgatttataacattgaacgaattattattatcgtgaattaattatttaattatagagataaattaaatattaaaaagataaagttgagaactaacttaaaacaaagtgatgaaagggaatgaagggtagaatggtaaattctctgcttccttaattttcacaagtgctccctctatctaaaaatcaaagacctatttcgtttttttgcaaaagtctaagacctattagtaatctatatgtgttgaattaaattgttaaccgaaacccaagaagccatcttattgcatgcaagtgtatagttcatttgttttgtcacatagtggatgagttaaattacttattggtcttggtgacaaaagaaacatgtcttgttttggatggagggagtatatctgaaatatcgtaagtttaaaaaaaagatggagttattacaacttaatattataaaagaaggcattcaaagaacatcgttatacatttttcttctgaaaagaaaaaaaaatctatcatgcatacaaattaaatatgctgtttcgactttggtcgggtttgatcatgaatcacctgggacgtgacagcatgcaacgataaacaaagaaaaaaaacaacccacatatacactccaagccgtgtttagttgtaaaacttttcttcaaattccaacttttccatcacatcaaaactttcctacacacacaaacttccaacttttccgtcacatcgttccaatttcaaccaaacttccaattttagtgtgaactaaacacagcctccgaattaataaatgcatctcaaaatgaaagcaaaggttagcctgagcgatctaagagtgttcatgtgggacctatattaatcgagatgaaagtgagcattcactgctacagaaatcataatatgtaccggttaggaaccctacataggtgctagatttcccaaccgacctcatagacggtatttgataaggaggactcaaatgtagcagtttaggaactcacacctttaggtatacggtttgaaaaaaaaaagctaactcaactcgaattgagttgagccgatgcttcaaagctaccaaaaataaataaaagaaaacctaataacaaaaaaagagacaagttcacattagagaatcaacaatttcatagatcacataatcaaatattcatcgacaaattcacatcacaaaaattcaaaaaccaaatcaaagaatgcaccaatcacaatggagaactccacctaccaccatcgctcactggagagaggaaggggaagccaccgccactgcacaggggagaatgggaggttatgtggagacgagggagaagccatcgaggggaggcgctgttgaggggaggtgagggaggtgatgttgaggtggacgtcgcctcctcccgctcgctctgccaccgcctcatcgagcccctttcgagccgcgacgctaaatgtgggatgtgggggagagatcgagaaggagagagaaccagctaggtggagaggaggcggccttcggcgcttttggtgctggggagaggcggccggccgccgctcaccggcggactcagagaggagagggcgatgccaatacccccagcggccagcggctagccgctagctcaacacggcaacaacgctgtgcgtgtgcgaccctccccaacaggcggcagcggcagcacgcccttcccctccggttgccctctccaccgtcctgtcccctcctttcccctctcttccggcggtgcagaggtacggcggcgcggcggggcagcgcgcgcggcggcgtggcggccacgcacaggcgcggcaacgccacgccgcagaggcgtggcggcggcgcaccgacgcagcacacaagctgagagcgtctctaagacacacatcgagagaaggattcacaaactctgagaggtatttcttgatctttatttctgtgttcttttatccctaatttccaatctgatgctatccctaattagaacatgatttgaggtgaattgttgtggatcagtggttgaacttgtggtgaattgttttggatcagcggttgaacacttgaacttgaatgattgatgtatcaatatttgtggaatgatggatcatgaaaatatttctgtttttgctgaattttgatgatgttattcagtattcaagtaaagtatcatgttatttttgggctgaatcgatggagttgctactcactgcggggccccgcaggggtcgggggcgggggatgatttccacccgcatgtccactcggggccggggcgggtggagggttcgggggtcgggggcggggctattccagcccgccccgccccgttgccatccctactaataagtcgctctgttttgtatgcgtaggagattagctcccaacacagatagtacactactatagtgtatatagacttgcattggctcgcgactgacatgcagatccacataagttgggccggaataatgggaatcccaactccgtgcgggcccatgttagctgggccgacaggggaacctgacctcggcgctgacccatgtgaattgggccgtaatgcgcgggccaatgtaagttgggctggaatgaaaatcccgcttcatgttaattgggccaaacgggaatcccgcatatgttagttgggccggaacgggatacaaacggatcgaacggcctatgactgcgtgggctgttagagagaccgacgtgtattaggcccaagtattgtgggcccataagaatgttacagagcaagagcatttgggcctgtctttttttcatcttcatattttgtacctgagcatttacgttagtttcatcttcatgtagtttgaaaagatgagatttttacaatggaatcaaattcgtatatatatccattcgttcgcaaaatacctcaagacttaatttataagcttgcaatgtgtgttgtttgtgattacacagctaaaaagaaagagagaagaacaaacaaagaaacggccaaagaaaaggcctgaatcaacaagaagttcctaaaatcaaattaaaaccgaatttctatgcactgaattcatctgaaccaataattcagagcaagccagggcgggagtggaaggggaactggtacatcaagattggagctgatgatgatgatgatccactcttcttcttcctcatctcgaccttctccacaccagcatgatgatcaccatctgatcctcctccaatcttcttctccttctcaccaacttcagcagcatctgcatccttcgacttcgagcagtacagattcttctgctgctgattctgatctacaggttgctgctgctgctgcttcgccggcgacaccttcttcttccccatcatcccagcacccaagcagctcaaacccatcacttactactccaattgatcctcctctcaatcgtatgtatgtacgtgttcgttgttgctcacttgcttgcttgctagttttgctatgatcagattgatctggggcgagctggttttatagctggaggttaggaggaggaagacgacgactgaactgctcaggtggtttcctttcgttgactcagctagctagctgctgctgctgctgccttggtcaccaaggttcttcgtctctactacgcttgcaggctactcatcttctgaattccgagtgagtaaatttcgtggtcaaattggatacaattcgaaagagaaaaggggaagaagcatcgcgtcgcgcgtgtgcaactggacgaaagtggtgatggtgactgaaagtgacaccggggtaattaacacgaggttatcttcaaataccacggattttcccttctttttcttagaagcaccattgttctcatccctccttttcccagaaaaactgctccctcccccctttaaaaaaaatcactcataaaaaacgcatgaaaaacaggtatatatatctctggatccgttgtaatgcacaggcacgtaactagtcagatgtcactgttgttcgtcctcatcttaacagattggtccctgactatagatgtttctaatcaataaatatataaatctcacggtttttgcagttgtggaatttgtacatcttgatccttctagtatttcttaatatcatagacctaataaacctcacagttttgcagttctggaacttttacactgagatccttctggtactcttattatataaataaacattttccattatacagatggatctttttagtgtatttcgtgccacactcagcaaatttctcaacgtcgtcacttgtcagctgcccaaaaaaaaaaagttgaatttacttaatttttaatatctttttgttatagtttgtttttcagtgttgcacatatataaaatatttatctattattttttgtcgcaaataaacgttaattacggtttaatcaccctttgtcagctgccaaaaaaattgaattttgaaacttattttttaatatccttttattatagtttgtttttcggtgttgcacatatataaaatttttatctattattttttttttgtcgcaaattacggtttataatcacccgtaggtgaaatggaggtgcgaaacggtaggagcgaaagcatctggtgctgaggatgttatgcacttgtacttcaatgctttcgttgatgtcgatgagctaaagtttttattagcttaataaaggtccattttagaaataagtttacggacgagtctctgtttgttgaataaaatatgggatggaaccagctgtaaaagttgctgcagtttttctctgaggttgtaggtttggtgtttctcaagctccagttactggcatgcgggccccgctcctgaacgatctatggggccaacaatatcagataatcagaacagcccttaaaccacaactcgagcgcacaaatctctgatgacaaatatcccacatttacatgaacatgtaccaaattcaagccaccatggaattcaaaaacagcacgtttggtggctctgaagtcataagacttaaaaaagttctgaaaagtgaagagggtgacgaactgaaactcgtataaatatatgataatattacgccaaaagatcactgattcttaacaaactctttgcagctacagacactggaattataccgtactattactgattgacaaagc

SEQ ID NO: 14205 - DNA, 745 bp, Oryza sativa
atccaggcaagggtgggcgtgatggagcgggatgggccctgcgacggcctttgtcgcttccggattcacctaggcacgagaggggactgcccgctgccttgcgagtagtgggggtgaaacctgaggtgtggtgtgtttggttagaggaggttatgcaaagggtcctgtcacggtctctttccggtatgtcgtggtggcatgccggcggacggaaacgtgttgtggggctatgtcttgtgggtacagttgtacacctctgatcagagtaaaactattcgaatagccgtgcccgcggttatgggcggtcaaccagattcactgtgattagtctcaccctagtttagtctaatggaattgattagttcaggtggatggttgggcctgttgcaacatggtgtagcattggacagtggatggttaatattgattaattattagaactgttttactgctttcaactactgtttataaatgctagctttgtgcaaatgatccccttttagccttcctttggttatatattgcatcataccctccgttccggtatgacttgctgagtacagtaggaagtattcagtcttgctctatctcccaaccctcagagttcgagtatgcgtccaatggtggtttctccgaggagtaggctttgtccgtgccgtcgaggatgcctgtggagtggtgttcccgctgctatccaagtccagacttagctctagttatcttttatatttccactgcatttatg

SEQ ID NO: 14206 - DNA, 748 bp, Oryza sativa
cagagattcttgtgggcgctgcgcgcgcccgcgggcacgaagccggacgccgcgatgtctcttcttcctgacggattcttggcgcggacagccgacagaggcgtcgtggtgaccgcgtcctgggtgccgcaggtggcggtgctgcagcacgcatccacgggcgcattcgtgacgcactgtggatggaactcgacgctggaggctgtcgcagccggcgttccaatggtgtgctggccgctcgacgcggagcagtggatgaacaaggtgttcatcgtggaggagatgaagattggcatcgaggtcagagggtataaacccggggcacttgtccaggccgacatcgtcgatgccatcttgaggcggatcatggaatcggatgcgcagcagggagtcctggagcgggtcatggcgatgaaggagagcgcagcggcagcatggaaggaagggggatcatcgtgcactgcattcgctgaatttctcaaggacatggaggaggggaatgttgccatggcgcattccaatcaggttgaaacttgaatttcttcctgagcatggctcttgacctttgcatttgtcttccatcaattaggatccatagaaaattgtccaaacccatctgcaagcaccacagttggtcaaatgcttgtttatgataagcttaagttcaaatgaaattcactgaccccaaatatgtgatgacaggtctcttacctgttagaaattcaagcttttcaatttcgtagttcgt

SEQ ID NO: 14207 - DNA, 732 bp, Oryza sativa
tgagaggcctcccactgctcccgagtgagatggagcttcccgccgatggtgatgggccccgagagaggctgtggctcatcaccatcgacgaccttgaggcgacctaacgcctcctcgatcgacattgtggagaggtccagcagagattcgatcgagcgagcgatctgcctgtacttctcagggacgcagcggaagagcttctcgacagctctctcctcgtcgtaggtgtcgtcgccgtactgcaccattttctgcaagagagtgttgagacggagagcaaagtcatcaacatcctcacctggcttgaaggccaggttctcccactccttgcggagtgcctgcagtgtggacttgcgggcgcggtcgctgtcgatgcgtgccgtagtgatggcgtcccaggcctccttggcagtccgcttctgggaaagcgagaactgcatctcgggcgggactgcagcgatgagggcatccagtgcctgccgatcctcgtcgtagtcgacgtcgccgtaccggactgcctcccacatgtgccgcacctggagcctcaccctcatcaccgcggcccactcgatgtagttggttttggtgagggtaggccacccaccgccgggaccaaagtccctgaccaccgtctggacgccgtggtgaccatggcgccggtcaagggagagccgcgctgtctgtgagggccacgtgtgggctccgggctgccgccggcacgcccgcgcccgt

SEQ ID NO: 14208 - DNA, 838 bp, Oryza sativa
aattcctgcagcccctaagtttgataaagatgtgatgttttggcatcatagacttggacatgttggttttgatcatctcactaggttaagtggtttggatcttgttcatggtttgcctaaacttaagaaagatcttgatttggtttgtacaccgtgtcgtcatgctaagatggttgcttcttcacatgctcctattgtttctgtgatgacggatgcaccgggacagctattacacaaggacactgttggtccagctagagtgcaatccatggaggaaagtggtatgtattggttattgttgacgatttttcttgatattcttggcttttcaacactttcgtggtttgtttgttcgattggatcttgaatttcctggttctttgaaaagaattcgaagtgataatggtggtgagtttaaaaatgcttcttttgaacaattttgaaatgaaagaggtcttgaacatgaattttcttctcctcgtgttccgcaacaaaacggtgttgttggaaggaaaaatcgtgttttggttgagatggctagaacgatgttggatgaatataaaactcctagaaaattttgggctgaggctattaacgttgcatgctatatttcaaatcgggttttcctgaggtcaatacttggaaaaacttcttatgaacttcgatttggacgtcaacccaaagtttcacatttgcgtattttttgttgcaagtgctttgtcttgaaatctggacatttgaataagtttgagtcacgttttactgatggattgtttcttggttaccccgaacatactcgtggctatcgtgtacttattttggagactaacaaaatcgt

SEQ ID NO: 14209 - DNA, 1291 bp, Oryza sativa
gtgcttggataaagtgtttagtgtgttccttttgttagggacatattaaacatgagtatgagttaaagatatttgagatgttgtggatctttagccatttttgtcaagtctcctgattgtgtaacacatctggtcgccaccttcgagtggtttgacgggcacatctcaggctgaagttgactggcaggctaaaggcccggcaatgtctcacatatttttctctcggagcgtcgaatgtcttaatatgtttgatggaagaattgtgattagctattcatccttcaaatatactaaggggttcggagtgcttccgacaaaaatatacttgttctttttgtggcaaagatggatatattgttggtttttgtttcagattagctcataaacagaaaaaggagagagaggttgcttttgcaaaatcaaagtggcaaaaatctggttttccctcgaggaaaccggtcagaccgtagtgggtcccgtggtcagactggcaaccggtcaaaccggctgcagagtctcgatcagactggacaccggtcagaccaacggtgaagcggcggtcagaccggcccccggtcagaccggctggacacccacggtcagactggcctcggagagatttttcgaaaaattattaaactgtttttgcacgtggatatatgcctattggatcttctggtcgtgtgtctcagtactggattcctaaatttttattatcatctaaccccagtactgaggcttcgacatatgcttgtgtgtaggctttggtggcaaggaaggagaacgtgtggatcgtggattccggttcttcgcgacacatgaccggtgataaaaattggttctcctctctcagaaaggcatccaagactgaatcaattatctttggtgatgtttctacaagtgccgttctcgctacaggtttggttaaggtaaatgagaaatttgaattgaagaatgtagctttggttgaggacttaaagtacaatttgctttcggtttcacaaattgttgatgaagattttgaggttcactttaagaaaactggaagtaaagtttttgattcttgtggtgattctgtgttgagtatttctcgctatggaagagtgtttaaagctgattttgaaaatcctgtttcacctgtgataacatgtttggttgctaagtttgataaagatgtgatgttttggcatcatagacttggacatgttggttttgatcatctcactaggttaagtggtttggatcttgttcatgggttgcctaaacttaagaaagatcttgatttggtttg

SEQ ID NO: 14210 - DNA, 1191 bp, Oryza sativa
tgaacgaacagttgattatcaccatgcttaagaacaaaaagcgttttgtcaacctttcccattgtaaaacctttcgcaagcaaaaagttcttaagcctatcataccactctaggtgcttgtttcaagccatacaaagctttagacaatttaaaaacatggttgggaaaatcaggattttcaaaacctggtggttttttgacataaacttcttcctgtataaaacgatttagaaaagcactttttacatctatttgatataatttaaaaccttttgaagcagcaaaagccaacaaaagtctaattgcctcaattctagcaacaggagcaaaagtttcattaaaatccaaaccctccacctgggtaaaactttgagcaacaagtctagctttatttctcacaatcaaaccatcctcattttgtttatttttgaaaacccacttggttccaataatattatgtccagaaggtggttcaactaaagtccaaactatgtttctcttgaaattttcaagttcttcatgcatggcgttaatctgcgattcattagttaatgcgtgtgacacatctttgggttcaaaagaagcaacaaatgcagaatttacataaacatcatgagtcgttaccttagaccttgtagtccgctcacctatattactaatgatttgttctggcggatattgtcgttgaatgtgcaatggagcagcgacttccgaacttgattcacgccctgtatcaatactgatcaaagttgtagtctccggaggaccatctcgatcagcatcaacagtacccgaacccgatgagcctggccggtctgactgcacctcctgtgtcagtctgatcggcggcgtgccggcagtctgaccggcctagcgcctggtctgactggccgagccgaccttatcgttgtcgtcattgctctcgtcttcaaaaatacgaccatcctccccctgaacctgtgacaatgtacctgcaatatcgggtctagtacctggactagcctcatcaaaagaaacttcgcaagtctcaacgattttgttagtctccaaaataagtacacgatagccacgagtatgttcggggtaaccaagaaacaatccatcagtaaaacgtgactcaaacttattcaaatgtccagatttcaagacaaagcacttgcaacaaaaaatacgcaaatgtgaaactttggg

SEQ ID NO: 14211 - DNA, 4507 bp, Oryza sativa
ttataacctgaaacggaggaagtatattttttttatcttgttgtcaaaactctattttcatccagcaattccccccctagggtttgctgtgccacgtaatttggacaaagaattggctatatataggagtttgtgtaatgtgccaaagcattctttcttttcacttagttgctttcctgctttttttagtaaattcatgatgtcatctcagtcacttccatacaacaatgccactcttatctaccttcctatttgagcatctgaattataccacacatttctatgtgaatttttatatctttgaactgaaaatgtaacagagacattgccttcatttgtaaggtgtattactaattgacatatttatctacttgattcaattaacatttttttaaaccttgtgtgcatatcatgatgttgcttaggccttccaagttaaaaaaggaaaacataaaatttataagttcaatctgttgtcccttttgtgttgctaatgaaactatgtagatggatcgttaacgttttttgttgaccatccttgtaggaagagttcgatgcaacacggtggcttgatagatccctcatacggctttgttcaagatttggggattatcggaaggatgatccatcttcatttagcttgcattcaaatttctctttgtttcctcagtttatgtttaatctacggcgttcacaatttgttcaggtgatgtgttgcactttttttttttggttatctttaggaaatccttgccttattaatactagcattttccttgtcacaggttttcaataacagtccagatgagacagcttatttccggatgttactcaaccgtgagagtatcactaactcagttgccatgattcaaccatcattaatttcattctcttttgatttgcctccatctcctgtattcctcgatgtggcatcaatagcagcagatcgtatactgctacttgatgcatacttcagtgttgtcatcttccatggtatgacaattgctcagtggagaaacatgggttaccagaatcaacctgagcatcaggtgagcatcctttctgcatttctacccataagaacttattcctcctgtgattgacttaagggtgtattggttatatagccgtctcaattgtactgtagttatcacttcagaagaaacattggtcagacttcctaggctttggtagcagcatattctagttctagaaactggttaactacatgtttgttggtttcaccagttgctctaatgacagtgtatgctctagttatcactcagtatcaccagtcccttattatagaagaggttacagcatgcgttttgtagccattagctgtgtggacctgaaacccttgccacaatctctttcagtgacggccctttataatccatttgtctagcacaatactactgaaaacttgtatatattacataaaaactcaaagtcaacttgagatttgaaaatgcgaaccagaggacgaaaaaagctgctttctgtgttattattaatctgaactctgaactgtccagattcagtttttactgccaaaatggttttcaaaactcttctatgaagacctcgcagagacgttacatatttgataagtccgcattgttgaccacacatgtttaaatatattggatctatgttcttctatgattgtcaattgaactttttcgtgtatataggttagctgatgttttgatgcaacctattgacaagctagaacttccatgtttatgatgcttaatataactctccgtatttgtttcagcaatttgcacaattgttgcaagctcctcacgaggaggctcaaataataattaaaggacgatttcctgctccaagactagttgtctgtgaccaacatggctcacaggtatgttatcacagttgttatttttctttcttaattgttcctactaccattaatggcttgtactctccatgcagttaactggaaacaactaaatgctcatggttaagaatgagcctacatacatgtcctatcaccatctaaaaccatgaatattttataaaattataaaattgcatacatacgttcatatgccttaattgtaaaattatcttgataatagcataaatgtgtgaagttgttctcaaacttttatgtactcaatttggatagtctaaggccaaataagaaggcaacaaatggaagaactatttgtgtacaagttgtggtagataagctataaagcataaagatatgctatatccaaagcctttatgacaaataagtttgttaaaatcgcaatcctgaatcagaattgggggtctctaaccaatcacagaatcacatacataaaaattgtaaaatcgtagattctgcctactagaatcatagaatcaggcctcttgattaggatagtaaattcgtagaattgtatggaagaatcgagttacaaccttgatgataaatgcgtggaaaatttgaagtatttgatcatgtttgccatgtttacctgttttatttgaggaactgtataatttggctctccttagaattcctcacacaaaaactcaaagaaacagtaacttcattatgtgatagctaacatcaaatgctcctccgttctatgcaggcaaggttcttgttggcaaagctgaacccatcggctacatataactcagcacatgatgttcctccaggttctgacatcatattcacggatgatgttagtttccaggtcttctgtgagcatcttcaaaggctggccgttcagtcctaaggacatgtatgcaaagttgtacaccgtatctgatagctatatttactgagtttggtaggtctgagttgtgggagatttctgctttccctttttttgacctcatgtgttcttattacatcgtgtcaggttttccgacatcagacaattttttcgggaaataatcttgaaagcatgtataagttgtccccataatattatttatccatcatatatacttctttatattgacctcactgtcatcttaaggtgtatagacaagtaagatttttgtggtcggatgttgtctcattttggcttccaatgtgttctggcgtggtgttcatgtttgttttcctttgcgacacaacgtcgatctgtgacttcattgtgatattgttagccatgcatctgccatgtatcttacaaacaagttaaaaacttttgaaggggacaacaatggtacttttagaaaacaatgttccatatctacggtcttccgtagtgaaaagatgttcaaaagcttcgatctttaacagtttaatttcattaattctaatagccttaaaattttcataaaaagtcgatgttgatagataaactatgatgagaaaacatcgaatctagttttaaaatatagccgtggcgatagtgaacattgtcctgttgagaatttcattgttgattttcagactgatttggtctaaccacttcaaatgtatttctgttcaatgcatgtaattgttagggcctcatcatttgcgtcataatgtatctgccgcggttaaaatttgaaattaaagttgattttagggtatttatggctaaggataaatggtctttacaacatggggaaaaatattgttttcttaaggccttccaaaattgaccattaatataagattgaaaaatttgatcattaatatcaccccaatacttacagtgtccaatagtttgttgaaaatgaagcttgggattcatcgactcaattacaagaaaatatattatcaaaaacgtaccaagctaagttatgagctaccttattacctatcttaaacagtgcgctaccttattataccttggacaatgcgagaattcatctttctcaattttgaggatagcattagtctatataaattgcccttgcaatgccaaacgaggagtcatatcgacaacatacattcactacttccgtacaatcagatttcgcttggatttgctacatcccaagtttacagccaaataaagaccaaccaacattggcattagccgcattacctctaccatcgcagttgaagggacgtatgtggtataagaacacatggcaactaagaaattggtatgcttcatcacatagtaaaatagcggctacgcttgattattcgtccgcatgaaaagctacatcaatattaagtttcacatatccatggaaatgttccatccattgttttttaagtcctctaggattgaatattattgatcttttattttagtgttatcttttttttccttgcatgaggactatacttcctcatttcattaagaagaagaggaacaaatacacgggagaggtcgaaaggatcatctccaaaacacaacacacaacaccaccaaacctcaactaaaacacatcgtgctatcaacctcacaaggagctccagcaaagcatgcgctccaactaaacaccataactactctcatttgctatagaacatgacctaaggatgccaccattaaaaacacagtcattatggtgcttccaaatatcc

SEQ ID NO: 14212 - DNA, 24018 bp, Oryza sativa
gattctttatgcatgccgtcttgatggctcacattaacgcagttactcccagtgtccgttacgcgaaatcatcatcatcattcacttattataatgtgccttcgatccacaaaagctcatgtcattcgtcgttctctaccatccttgtttcatccgagctttcacttctacaaggttgtgtgttctcctacgggatccataggtacgactcaaaatgcttccagttatttcattgttagggtgttgtattcttcttcgcctccttttcatctctttgttttttatatgtacagaacggtatttcgtgatgcgtcacccacagccttcctctagagtgtattttgcagctcctgtcgattttcgatctgcagagataatcccaatatgtagcacttccagcctttttttactgttaagtttatattcagttcaagcaattcccattgtgtgaattcagttcaagcaattcccattgtgtgaatatacttcagttgttatatttggtcttcattattgaatcccgggcttctcagaacatgaacatagactcaattgatcatccagtaactcttaataaagccattggaaaaacaagactttttactgtaggaatgaatactgattcatcttctaattctaagttccctatcagctaggtacttaaaaggagtttctcaattgatgatgctatgccaaatcctatgctgccatttgaaaaggaatatcatctgaacatgctatttattattggctcaatattccaactgagttaatttaggggcaatttcgtttctaaccctacttcgatgtctaatattgattttacccctacttttagggttttcgtttttgcccccacttttttggaaccgaactatcgttttacccctactttggatggtgaagttaacagtgttaagtaattggcaaaaggacatttataccctctcatatctctcttcattaattatatttttgccccattttatgcatgtagctttagaactttatttttgtgagtatatttaaaattaaatgaagcacattgactaatatctaaagggaacagataattacattttacaaaatgttgtcaaaattttgtttaagttctatcaaaatgctgatttttgtcaaaatttcatcaaattcagaatttatccaattttttatattagtcaaagcgcgtcatctaattttaaatatactcccaaaaataaagttccaaaactacatgtataaaatgggggcaaaaccacaattaatgaacatacatgagagggtataaatgtcattttgtcaattacttaacaccgttaacttcaccatccaaagtaagggtaaaataagcgtttggttcaaaaaaaaaagtgagggtaaaaacgaaaaccctaaacaataggggtaaaaatcaatattagacatcaaagtaggggcataaatgaaattgcccctaactttaactacctaactaattcaactttccaagagcaaagatcaactccaactcccaccaccaatgaaatatacaagtagcccaaggtctattgttctctcatatttatctattcatcatatccatataagactatacttactaactgctaatgacaaattcatttcagcacacctattgataacacaggagtatctaaagatagtacacctccagaatcatctgcaactgtcaacatatccacagaaaagaatatatgagaattgcatattctaactacttaattaaatacattcatttattcattaaatactttttttagtttgagtcagaccttaaaatttcatagaaattccctcagattaagtttcagtattgtttagcacaatttcaaattaattattgttgttcttattgacaaatgtgcaggccaaatttataacatggaaattattttggtttgtaacatatttttttgtagtcaagggatttcgatcatttatctgcaaagggatatactgttgtaacataaatctggtttctttaggtctacaagtgatataacgctgtaaaaactcatggtattactaggttgaggttgaatggcagtattgcactactgcagcaattgttaaatgaacatcacttgctgctttctttcctgaggtcatttctgttgcctgggctgcatcaagctcaattgtgaactgaatgtgcatcaatctaagaacatgagttcgccatgccaaatggataatatgtagaatagttaagcatatgcttaagccattttatttgtaatactcttcctaatattcccacaaaatagcatctatcattatcttagttgagtccaggttaaatatgtgtgttggttaaacagttcttgattctatgaatcaatctttctcggttgggacagtagctgcatgtagttaatcgatcaatgtgcaattttttctatccttgataattaaggatgtgcggttggtgataactaaattagcttcagtagtcccagtagatatactcggcacttttactttacataactgaagctactatttgctactactaaataactagatttataagctatagcaatttgttacagcaacacatctacaaaataaagcattgatttcagtaaggactccgttgacaaaactaaaaggtatacctctactgcacatagctcattcagttatttaaaatttactcttacaaacattttattcctttgcaataattttcttcttcatgggagtaccaaacaacttgatctaccttgttggtgatatgggcccggggtacgcacagtagagggaaataaccttcccatctggcggcgtggccgtgcggcctggcctttccccacctccatggagggagatcaggtagcgctgaggtggccaggggcctcggggtgccacgtcacccctctagggggcgtgaggcatgctgccccaaggccctcgcctggcctccacgtggcagggtaagtgggcggcgcaggagatgctgtcctgcgtcattaatgagcagtgccccaaccgtccctcgccgcatttaatgcggtgtgggcggatgcgcggcaccgctcgattgacgcatgtcaatcaaccttgaccagtctgtgaccggtcgcaggcgataggacgggcggtagtgcccccacgtcccaccctgtgtcaggcggagtcggggcaggtatgccccgtcccatcagcacactgccaagtgtgccccctgtgtgtgatgagcccaccaaagtctccatgcatttacgagggaatgacatggatgttccccgtgtaaggcggaggacggtgtcggaccccacttcgggacagacaaccactttacttccggttgaaggcacggatagtgatctgaccagggccatgtgggcccccctcccatggaggggtagatgtgaacggtgcatgtggtatccctttgaactataaaaaggaggaccttacccaccgagaaaggggacgactctcgatagcttgagctctagaggaagcatagctagggtttcccaggagctcaagatcccttgtaagaattccaccataataacacacacaggagtaggatgttacgcttggtagcggcctgaacctgtataatccctcgtctctcacacagatccgcaagcgatctagtagttagaccataagcggagatacgctcttgatcatcgcgccttatcccctggccaaactcacaaaggggggacgtgaggtttcacatcccccgctagagaggatcactcctcgacatacctattggcaaacgtcagaaggaagagtttgtacttctaaccctccttccaaattgcaaagtgaaaatataatgctaattccaatttcttatgaaccatttcaaacagcaaaaagatctaaccagcagtgagcgataagttaacacataaatctacataatatgcatggtacttgctctttacagtacttcagatacaatacatcatcatacaagcaaatgtcattatgattcattctaatgcattgtccaacgaaatttgcagctcaatacataatatacaacttaaagactacagacgcttccgaataatcatatgccttggttactattttcgcagtcacgctctattgtaatttgttttcgttgtcaggctatgtccaaactaaatactctaggtgcttccaaataatcacatccattgtgttaggattatggataccacatacctaatagtagttgactaaatctcgacaggacccaccacataccatgtcttatacggaaacaaccttcggatataggaggagttccgtataaggaaggatgaatagagttatacatggaaactacaaggactactcggattatatccatattggtttccctatttctacttggataaggggacacctatgggtataaatacaaggccccttaggaggagaggggacacggaacaatagatcaagacacaagatcaacatacaagccaacatgcgccaagacaagacgccgaatatcgacttcagagataagcatggttagtcccctacggtgtctacggatactatcaggagagaaatagcgttgtctttaatctcgccggatgcggattcgaggaggaaggctaccctgttgtcgactacgagtcagcacttcagaccgccaagtcgacaacagttagataggctaccccaaatattatactggtgtgattatggtgaataagagcaacgactggctttggccaacatgagtagggttattacctgacaattcagaggcccgaacctgtataaaaatcctcgtctccgtcttttttactacaatctcgcgtatatcctagtaccaacaattcccatactatgcaaataccggaatcgcgacatcaaacgtcgacacattgattattgttttctcattcccagttccctttcatgctaacaaaactttcgtgtatcctatcatataatcaaagtaatatttacatattatctttagaatccttttattttcaatacaaactattattcttttttttcctacaaagttccgcagcaacgcgcggggtaccttctagttaatagatagaattaagttgtgatgcaatggtcttcacgattcctttttaacttggtctcttttcgataggcttctctcaactgatcaacttcttttattaaccgaatccataaaaaaccgtaccaaatgttagcgttaacaaacatatgatcaaatgttatgtaaaaaatcaacgccgtcatacattttgaaaagaataatatataagaagtggccttttgtgttagctagctaagctaatactcctccgtcccaaaatataataacttatagtatttagaatttgtcccaaaatataacatcttcttcatcaatattctctccccaaccaatcacaactcttcaccattcaatttttccacctacctccacttctcaactaatcactagcgtccgatcatttaattttatttactttcttaataaccatgtcgaagacagagggagtagcaattatgtatcgagaaaatggcttatggaagatgcacacgtacaggtggaggccgcagagatagatggagctacaaggagcatatgtgtaccaaaaagagctacatgtatgtgtaataatccaaacaagcacgtagtacaaggagctagtagcacgcacatgcatgtagatgggtataaactcaatctctagctctcactggtacgtacacctcaaaaaggagcaaattaaacgagacgaacacacataacaggaagctagctggactgaccgggccgatcaataaccatacacacatgcatgcatggtgatcgatggacctagctagctcatcttttattccagaatacagatactactagtagtattggatacagaattcggctccacacacatcgacccaggtggcaaccggcgcgctgctgtatatatatgatcatcgatccgatcgatatagctcgatcacctcaccctgcacacgcacagtacatatatatagattagatgatatagatacttaattatcatacaaagccatgcgtaattatatatatttaacggaatatataggattagatgattaattacctagagcagtcgatggaagcgctgatggtgtaggggacgctgacgccgcacttggaggggatgctggcggcgttgccggcgttgagccccttgatgccacgggcggcgttcttgaggcagttgcaggcggtgcgccggtcagcggtggttctggcagcggacttgaggctcctcacgccgttgcagcaggccgcggaagggccggcgccgccgccgcgggcgtaggtgaggcaggggccaacggctgagttcacctggccgcaggtgatggccacggcggcgtgcggggcggcgaggagcagagctgccaccacggcgaccaacaccaactgtgcacgggccatctcgatcgatccagaggatgctagctagctgagctcagctgacttggctactgcgcttgatgctcggtgttggttaattaccttgctggttgctgctgcgagagctaggatgaatgaggagaatacgcgggaatgaaggggcttaagtagatatagagatgcatgtatgtgtggatgatgcatgaacgcaggaggagcaagcatggccggtgtatggtgtttagacggtgcgtctgtccatacattcattcaatgcgattgggagctagcttagcagcgggtggttgggtgttggtgggaatacaagagctatgtccctccatctacagtcgacagcattttatgccagttctaaaaccggcaccgatgactttcgatgaccgaagtcatcggtgccgtctctatggtgttggttgggatatctggcatctaaggggtttaacaagcactaagaggtttaacaagcaccaattaaagtttaagtaatagtgatggaataatccctaaattttactgacaacttcgtatcgctcatatttctgttgcctggaagctttttgggagtaaggtatatcaagtgtatatgaacaaagaaatagagagaactaaatagtcgaatcacttcgccatttaattttttattgttcttgttcgtgtatgacagcaaagccttttaagccttaccattaattttctaagatatttcaagaaattcaattcatatattttgcaggcatgattcaaatccagatgtgccaaggtgatgggcgtaaagcagccacagaacagatacatcatacattagtgtaaacagaggaaggaaatgaggtgcttacaggagtcagatcataggcagacatcattcaaacatatatttgtaagagatcaaccgacatgcatataatttgctaaaacaaagatgctccactggaaatcaggacctgaaagcttccattcttgcctactccttatccaaaagaatttctcccgacttctcacctgcaattatttatcatttttttagtgaatgtcaattatttatcattctatagatcaatcttaaaaaagagaccattatggatccatacattttgttttaggctaaacatgtgatccatcttttttccgccttctattaaactctgtcagtgatttactccagagaactttgttgtcttacagtggattgacaactcatgtgtgctgtgaacaatcaattggcaatttttgtaacctaggtggcaattgtgcagtgaacaatcaattgacaactcttataactatagatattcatttttttttctctaaggaatggtaaatgatcttttttttttctctaacgacagatattatacaaccacctccgaatatatatcaattgttgtcaaagatgtatatatcatcgtaaattaaacaaccacctttgaatatctacctgaaaaacaaattattgtcttttggcagatttggaattccatatatagcaaatggaaaatctaagtccttactatgtcttttttgtcccttcctcctcgttgatgtaacacgtgcatcggttatctccgatacctccctctaaaaagtaaactaaataaagttgagtaacaaccgtattcaacaagccaccactacaagatacattagtgcatatagggatttaagaatggcttagtttatttgcatcgagctggttgtcacaaaccatttcattgatccatggcttagcgattttaactgaaaacaaacgttatgtccacgttaatatccatcaatgcgagctgcatccacctccccaagctttctcctggttccgtttaccctcgtgttcaattttgacttggatgtatgccaacataatccatataccttcccaaatttcatataatcaagtttaaaacttctagactagtcaagagtagtagatgtcctgatgctccttcaagcgtgagcatagatattcgaatagatttatttttttcaccctacaatagatgtatgctttatcctcaatctgtagcgcacccaacacgtaagatttatcacggctcaggctttcgatttcccttgcattacagcacctgcgccaaagacaattaattctcattcatcactggtgtactttttctagtaacgtttgaatattcgttttattcaatttttttgtgtaaatatgaaaatatttatgtcatgcttaaagaacatttgatgatgaatcaagtcacaataaaataaaataagtaataattacataatttttttaaataaaacgaatggtcgttggataaaaagttaacggtatcatacaacaataaaatatggaggtagtagtatgtaattttcaccgtatattttctctgaatgggaagcagggttatacaacctatttacccgtgtacgcgttaattcgagtggattaattcctgttgggggcaaacgtggtcgcttgacacgcggaaacttctccaacctcgtcgccggaaatccttgaccaagcttcattcccacgagcttctcaactttccatccagtaacacgataacacggccatagtccctaacacggcggcggagtcaaataccatctcgcgctttcaacgtatacttggcattcgcccatcaagcacaagttaggctgatcagtgatcactattatcccacaatcaacacctttttcttttaggcttcggaatcatcaaaaattagctaccaaaaaagatgtgccaagtgctgacaagttccagccaagtacataatttattgatgaacaataattaaagcagaaacatgcaatgcgctttctgagccactgcactttgagagagcagactcacgcggcaaataaattagagtatcatagattgcacattttcagaaagtaccaactgttgtgaatattttgagattttaaatatacataaaaaatcgagaacagaccttaataaacattttttacatgtcgttctacagtttacacgtgccaaaagtggttactttgctcatcacaggattcagttcacaaatttcgcagaaaagaaacgtgccagggggaatcgatgggaactttgatagactgcaaattttcagaaagctagcattcttgaatatggataaaattcttaaaaaaaggcattcaattttttttttaggctgaccacttcttctgttgtacctgtcgttcaacaacgtacaaaagtataatcaaccatgtaagcgagctttacttttgtaaaaacacatttacaaaaggaaaccgattgtaaactgaatcttcttgaaaacaaaaccgattgtaaactgtaaaaggaaaactagacagcagacacactattcaattatgaattatcaattccttgcttatgttacgccgaggagaaaattgttcgtcgaagactaaactgtcatttaaattcttcaagtaaatatttgatgaattccagaattgcttcatctttatacgtttccgtgtcattgttatgttactcaaaaccaagctaatattatctaaggctaaataacgaggagttattatagtttagagctgaataatgttggttttaaacgcgggatcattttctaacttcggttaaattaaattcactttttctgtttctctatatgtggtttcatatccttaatacactgacactttttaaaaaaaagatgtgtgagaggaccttatacttgagataaatttaagttatgtgacaattgttaccacagataaaccattgctcacaaaatatatcaacagaaatagagatcaaatttgcccaaattccagaatccaatccggcctcatgtgataatattgaattcaaacggaccataaatcctacacatgagcttcattttgggcatatgcgtacttgatagtaatagtttggaggtgtttttccaactaatccaacctcacctccaaactacaaatgaaccaatgacaatggcagaaataagatgatgcaccatctgtaacagccctatgaacttgtaacttcatctataacccaggtctgagtgggtgtgtcccaacttggtagagcatgatcgtagggaccacatggtcatccttacatctatttacaaagttaggtatgcgttcactatttctcaggttctgctagattaacagttagttactactccgtccgtcgcaaaatataacaatttctagcctttaaaatttatcctaaaatataacaacttctccaccaacattctcttttcaaccaatcacaaccccccaccattcaattttcctacctaccttcacttctcctccaatcacaacactctcccatttaattatatcaacttttattaataacagtgaccaactataaaaatgtttatattttggaatggatggagtactattttgcctgtaattgcacgtatcagttagaccgcctagctacttgtctttggaaccccgcttttgtgagtaatttagattgcttattcattttattattggtagttctcaattgcttgtaggaacaaatgccattggggtttggttgatcgtgccctgacaagatcacgagcatccttggagttagtgtaatgatcactaagatgcatcatccctatatagttatagtcaagtcgttaacttattttccaaactatcatcaaaatatcaggacacaagattaggacacctaagagaacttcattcaggaaacaaagtaccaacacagaaaaaatcgctccaaaaaaaattacattcaaaatgaacaaaatcttctacattttcaccgatgctgccattgataaaagagaggaggaatatagaaccaagcatgaactccaacgcacaatgacttttgaagaccgcaataaaagcaaaatgtagatgcacagttgataaagagatgctaaattttacattggaaaatgatatttctgatatattttcaggcaccataaaacctcttaaaaataatataagaagagtgattgctttgctgatcacttagttcatcaaaagatttttcgatgctaaagatcagattagaattcgaggcttttatataaaaattcatataattaattaacgtataagaaacaatttagtttgcagagataattgaaaaagtttctcatagcaatgataacatttgctgagatcacagatttgtcaggcaaataaacgtgctagctaggggaatcaaatgggaactttgatatgatggtcaaagtacagacatctcattactacatatcaagaatcggccagagcccgttcccatttctttttccaagcacagaattatgccctgtccaaattcatcagggatctggcaacaacgcaagtacagagactaacaactgactagtagtctactacgtgcagctgaccaacagctaacaacccaagcgtcgtcaacgtgtcacacctcgtccgccgccgccgccgtcgcggtcgtcgccgtgatgccgctggcctcgccggccgaggaagcagcgacctggttccggcgctcgtcgagcaccttactcgccttgaggtaagcgatccttgcccagtcgtagcagtgcagcgcgatgtatactcccaagccggcgatgatgccgttggcgatggagaaggtgagcggcatgagcaccatggtgacgaacgccgggatggcctccttcatgtccgcccactcgatgtccttggccacgcgcatcatcatggcgccgacgagcaccagcgacggtccgacggcccacggcggcacgctcgtcagcacgggaccgaagaagagcgacgccaggaagcacgccgcgacggtgatggcggtgacccccgtccggccgccctcccgtatccccgccgtcgactcgacgtaggtcgtcaccgtggtgctcccgagcgcggcgctcagcaccgtcgacccagcgtcgaccaggaacgcacggtactcgccgtcgaacccctcgacggcgccgtccgtgaatccgccgtactcggccatggagtacattgtccccgtcgtggcgaggacgtcgacgtagaggagcgtgaacacggcgagcagcgcgttgccgtggcggaggccgccgaagctgagccgcccggcggtggtcgtgatcgtgtggaagtccaccaccttcttgaagtagtcgaagccggcattgcccgccgcggtgtccgggaacaccgtcacggcggtgcccctgatccacgacacgacggtgacgaacacgatgccgtagatcatgccgcccttgacgtccctggcgaggcaggtggccgtgatgaggaagccgacggcgccgagccagaatgtcgggctccgcatggagccgccgaggcaggcgccggtggcagggtcggtctcggagcacgcggtgagcgtcaccagcgtcgacgggctggcgccgacgaggccgacgccctggtgcgcctgcagccccgtgaacgccaggaacaagccgatgccgaccgccgtggcgaggcggatgttgcgcgggatcatccgagcgagcctcgaccggagcccgacggcggacaggatgaagaacacaatgccctccaccatcacgccggcgagcgccgtgctgtaagggattgaacccgagccatggaagccgaccatgttgtaggcgaagtaggcgttggcgcccatcccgggagctagaccaagcgggaggttagcgagcgcgcccatggcgaaggatccagccatggcggcgaccgccgtcgcgacgatcaggtcgctcttggtgcgcccaaggcactgctcgtacccggggttagacccaaccgtgcactcggggccgggcacggccgtggagttaccgacgaccaccggcgtgcagtcgctcacggtgcacggcccgccggagtcggtgaggatggcggcgttgacggagatgatgtacgccatggtgaggaacgtggcggcgccggcgcggagctccttggtgaatgagctcttgcgcgcctccagcttgaagtacctgccgacgcgtgtcgccgccacggcgcggttgacggcgtcctcggcctcggtgagcttacgccatggcgatgacctcttcatctttctttctttctttctctctctgtgtgttcagcccctattcgtgtcgactcttaggattaggagaggaggatctcttcttcttataggcgcgaatagagctaaagcttatttgccttgaacagaatgttttgggtggtgggcccacacttggtgtcctttgctgggaatggtgccagcacataatttaataggggccacttttcagagagctaatccctcttatccaaaatggaactcatcatgtttgattttttttcatgcagattagtgtgctttgacgactactgccgtatactgcatgataccacgagccatgctacgaaacattaatatctccaatctcaaaatattgatacttgtctacatacataaaataaatattattagtatatgttttaggacggagaggtagcttactaataatatgcaaaacaatactaatacatataggtaaaaagagcttacttctcgctcacaatctttctataatctttgaggtaaggtaggaaattaaggtgatatcgtggagcatcaaaggaacactgaagttaattaggagtcaattttgtaaaaatatagatactttgattaaactattgcaaaactacaaatttaatgtgcattcataaaaatacaaatttagcaataaagttataacaaaactatgtatttaaagaaataattatttattgtctatcaatcaacttaatcctgtttttccaaatttgtttatttgaccttgtttttttttcaaaattgaagataaatattaacttattctgtgaaaacaagataatcatgttaacaaaggggcaaattattttttttactcttgctcattaatttgaccatgctatataaaagtttttttatttgattctttgacatatttgtaataaatttagcatagctttgacaaatttagtttcaatttgacaaatttgacaaaaatcaaattaagaaaattgtacataattatggcttaaaatttaatagattcccacagcaaattgtctttttttttgtccattttgaattgcatccaatgaagaaaaaacagcaaaaagcaaaaacaaagttgagagccagtccaccgtcgcccatgctccctgccgcggtgccacctctccctctgcacgtcactgccaccctgctcccttcacacaccaccatcgatccctccattcgccgtctccgccaccaccgtcgctccctccgtgcgctgccacctccacttccaccgtgtgccactggccccgctccctctttgcgttgccatcacgtactccctccgccctggttaccatctgctacgccaatatccagagatgctggatgagacgaatagaggaaaaggaatttggggatagtatgtcgtgttcttagaggccactttgtcagtttagcatataaattcatgtttttatttttttctaaatgaaaccctgacattgtttgaaaatagggtcaaacggcaagtttgattttgaaaagggggggttaaataagcaaacttgaaaaatagtggttgagacatattttagatggaggaagtgataatttatctctacactataaaatagtgtagtattaaagtgagccactagacattaatgtctaatgctactcatctacttttttttctcgtttctagccattgaataagtagcacttcatctctttcccgttttctcccattcttgcttcctacgtattaatgaagagcatattagttattatattctaatggtccaacaaattcatattagttttattctatggcttaataaatatttttagatacttgccctatcctaatttctctgtaaaaaataatttttctatacaaggaaccctatagatcgcagatgaacagtaactgtcgcatatgcaaaaattgacatccattttcatagaagggaccttaaaaagagcgcatgcaaaaattctattttcgcagatgggcatgttaaggggccgtctgcgaaaatgagcttattttcacatgcggtcctcttaatgggccacatgcgaaaattgcagagctcttaagtggtccgcacgtaaaaataccctctcttctcgacaaatttttttctccctctactctcttttccctctcatcatttcaaaatttttctaactcctctaccatctctctcttcctctcctctcatgttattcactcctgcctctcctcagctctcctctctctctttctctcttctctctcttcctctccgagtggagcgggcttcggcgggcagggagagctgcaacgatggtgagggcggcggatccggcggcgccccctcgagagggctggattcaccgccctcgtgagcggttgcagcgacggcggacaatgagggcggcagattcggcgtctccatcctcgggagcggctgctgtgacggagggtagtgactacgtcgacgacgagggacactagacgaagttgattttggagttgagatttgatgagaatgtattttatatctacgcatatatatatatctctagtaatttttcatgaatttacaaaaactgatatgcatactactctcactatctcttagctctattatggcgcatatatcttatctatcttgagaaagccaaacaagtcatgtcctcttttttttagaagggtattttttaccaggcctctatatcctctctagaacctatcaggggagaaaaacgaaagagaaagaagggatacataattaagcgtgttttcgagtcctaagacgtaaaccactgagagacgatccatcgtgttcttctgtactcatgttttgtttatagatatggaataattgtatctaatggatgctacagtgtaaaacaatcatgtctttacagaatcttcttatcaacgtttctatttgtattgccaagcatatattatgcaacatacgtatatgactttttattacaacaagccaaaaattctaatgaacatgccatatatacctatgtttcgaaactcatcagcagacaaacattgcgagatggtactccccaataaaataaaataaaatatcgcgaattgacattctccgacaacacgaggacagtgtaccttttaacttgtagagaacctgctattcatttttgcgcatatatatacaaagcgttgacataagctgtaagcatcaggctaacatgcaaagatacgctatgattcattttgaaaaatgcgacacaaagcaatgtcaaattgtgtctacaacgctcacacctaggttgggaatctggaggacgcacatcttaatgtgattagtgcgacattttagagagaatttcttgttcaatatccgcaactttaaacatcaccaaaataaaatcatgtgatcccatgttggagagactgcttaatttgtcaaaaccgtcatacctttgttccctcatgcatgatgtggatgttttggagactttctgtaattcaaaacgtcaaaccttattggccaaatatgctgtcatacatcagttctttttaccaccgtatgttagaacacactacaaacgttatacttcgctctaggacaccacaaaacgctccctatttatgtcatagcataattcatcaattaatataaatcattttcaattcacacttatctccctaccctcttccatatcctccctccctaccatctcactcttagacgaccatcgcagtagcattagcatatatagtctactatctccaccagactaatttacaaacttggcctgaaactctcaacccttccctttctaacacctccatacaaaacgattcgatacacttctactctacattagtatccctcattataaatctatacctatactaatcagacacttttttggagctctcacgttaatcaggaagatcaagccattgattaaacaaaccataatatgtcaaccgttgattacaatctaatccaagttccacgcggtgggtcttttaaagcccatgtaacctatattgtcaagcccatcgatatgatccattcacgcacgcattcttttttctttttcttttgaacttgggtatttgtttctttttctaaaccgatgagtccatccatatttactgagatcgatctgatcagatgcagtggaagatacgggagggcacagcatagccatcgcgctggccggcagtggcaaacaacggagaaaggcaggaggaaacagtacatacaagcacatcgtatgccagttatgttctgctcgctcggccgcggcaaaggcgaatatatcaacgttatcggatctagcagcacacaatcactaaggcgaggttgacgtgcggccggtgagcgccggaaaagcacacaacgtcagccgaatgctaattgttgttttctccattgttaaggtttgattctaacttctaatttccagttcaattctctttacatgcatacttctcatctgtcacagcgtccaataggaattaatctacgtcatcaccatactgtatatatttttgatgttcagatgttgattcagcatcaacaagttcgcaatcacctgacaagccaatccatggtcatcgtaccataataattcatagaagtcttccatctatttgctttgacaaattcgctggcatttaggaagatccatagtggtcgccgcatgtactattcatgtaagtattccatcaatttgcatagtctaactttttatctgtatttgatctacttttaccattcttcttatattcactctctccttaaatataagcgatttcaagagattaggaatgaaggaaaaatgaagataaagtttaaaaaggggtgaaggggcagtagaacgatggttagggataagattgatcgaaaaatattaaatgagaggtggctttacaaagttctactcttaaatcccttatatttgtggatagaatttgaagtctaggatcaaaaatatttgtggatgaagggagtatatttgttttaaaatgtatttttttcctatgtgatatgaatttgctacccttattattatattgttaaaaacttttttcatatttatgttcaaaaatatgttcggactttcctaaactatccccgcaaaaaaaaactctctgtatattatttagttgattttttttgataatggaacgtaacattccggcctttactcaaatagctacagccaattattacagaactcacacggaaagtttacgatagcagaaacaaagctaagcaaagacaaactaatagacaccaacagaagaaaaagatcccctaactactgaaatctattagagaacctccacctgatattggcaaatagatgcataattatattatttagttgattcatcataaattttgtgttatacaggtggtcatgcaaaggcaaagggcatggaaaaaaacaatagatatgcatgtgcagtttttttcgataataatgcatgggtggaaaaaagcaatagatatgcatgcgttgcttcagtaatatacatgcatgcatgaaaaagacaaatggtgtgcagtgaaacatggtttattttcgtccctattttccaaaaccatggaaaaaagaataatcccatgcattttgctgatcctactttatcctaacatggcacacaatgaaaaattattggacacggaaccaatccatattaacattatggtaggacagtacagcagagttcttgatttggctcctagaactaatccattaatatttatacgtagtacatggtttcctcttactatatgttaatactatatgttatttgattttgatcctttattatgccatgttctcacgataaataagtatatatatgtgtatcatcctatatcactataatctgttgtatgtttcatccagttgaacaatttatgttttcattgatattcattacttcagaaaaatacatcattcctccaacaaattcagatgaagtacttttcttttaatcaatgttgagggataaacatgactaaaattgttttatttattattaatctaataatagtatattgggacattgtattaagaaaatatgccattggaagtcatactcaaaatgaattaaaaaaatatgaattttatcgttttaagtattctattgattaggaatcaatatttaacaatgtatatttcataaaactcttcttttaatataatctaagagccattgtaattagaaaagaccacatattcatacataactaaaattttaatatttatgatgatataaataaagagcccgtgcaacgcacgggttgacggctagtgtttactaattccttaggcccaagctagctacaccattggtaggcactatactttctttgctataaggcacaacccatcaatacaaaattaagataatttttgcaattcatataatttactattcacagctagcccaaatttccatctgcctgtgaagatggctaaggccatcttaggatcatagaccatatttgaaaacctatctctgcaggttggttcttaagaaaaccatccagaagaatagggacactttcgctaagagtttttaaggatcctcctatgaaaattatgatttgtagagatggtttcttaagagaactactcgtaaaaatatgatgattttcgcacatggttctcttaaagaaggatctgtaagtcaattttaaacagaagttcactttaaggaaccatacttaaaaatgggggaaaaactatttcaaggcaaagatatataattctttcatatgaagtaggatgatgaaaatttcatatggaggcaacttgttataaatgaacaatcatattaaaataaatatcctaataaggaatatggatacgaccatatgaaagaaaattttgtatgggtcatatacaactctggtttagcctcagtaggactttaaataaatttcctataaatttttaaagtttggttatttcaaaagaataaggaaaaacgtttcacaggtgaactgcgtatactaattggttagtaaagacgattctcctaacaaactgcctttaaaatgaaaagaagacccatatttttctaaaaaaaattaaacacgcatatgaacttgtttggagattaaatctatatgcaaattatatcactcggtcagatttaaaaccttttagttgaatgtgttttcatttgatatcgtttaggggcgaatattcatcacaagctcagatctactttttaaaaaatgaatatttgaaattttcaaaagacatcagatggaaacatgctctacaccaaaattgtagggcttgacaacatctacaactatgtcattgatgatctttttatttgattttgatgttactaggagtaagtgttgcaggttttaagtaccgtgaagtgaaaagaatttcatctatctctaattatcatgaagttctcgtaggtatagaacctcctatacaaaataactgtgttctagaagccctaaatcatatatggttcatacgccggtacaaatcggttgtaaatatgattttcccagtattgtgtaaatggttgccttggttcatagtatgtctagtatgattgggcagtcattcctctttttactgtaccaccgcactactcccttcgttctagaatgtaggaacctgggacatcatctagtccaatcactacgggagaagtgatctttgcaggtcggctgattttcataataatcccggttctaataagaaccgggactaaagattgtttttagtcccgcttaaatttttttttgatctctagtccttgttagtatctttagtcctggttcatcccctctcagaggcctgtcagggggctgaggatctctagtctcggttggtactaccaactgggactaaaattcaaccagtcttatataatccttaggacttatcctcaaatcctctaccgcaaagtctttctccccatcttcctcctctctccctctcctctctctcttatcctctcctctattcttgctcttatccactctttccttgcagaggcggcggtggtagtgaagaggcagtagcgaagcggcgcggggccggcagcggcggccggcgcaacggcgggccagcgctcgcggcaggcgggcaacgcctctgagacttttttttgagaatttgtgtttcggatctgagatgtatttgatttgtgtgtaatgtgaatatatgatgtatttgtgacgaattttttagaatttgtgatgtaatttttttaagaatttgtgatgtatttggagatgattgatttgaggatttggacaggatccttttgatctgtgacgtgataatcgatttgggatttcacgatttggggatgattgggaatggagtgaaatcaatattcaatgttaaaaacaatgaaaaaaagaaaaaaaaaggagcaaccgggcctagcctggcttcatttttagtcccgattggtatggatttttactcccggttatttcacccggaactaaagatgggcatctttagtcccggagtcgtagtcccagttgtataaccaggagtataggggttcccaatcatgtctaaagcccctttctccattagtgaaatctgaatatgacccatgttcagatatgttgaattaggtgatgtctactttgctatattttagaatggaggaagtatatcaagaaaaataaccacacgatcatctaccgtgcaaagccaacttccaccttttcagcactagttatctcacctccctgttgctagttgtgtctatctctcctatgttgtctgtggctctgtggtattttaattttacaggtaaagtaaagtatagggaactagcacacatgagacagctcggtgtggtagttggccaatgtgggccactggtaaaataataaatgtttacatggggaggatgcatagccacattgttgaatgccatttagcaaattatggccacgttgttgaatgtttattagcaaattatgactttgacggtatgtttcagcaaatgatacccaaacaaaatttcctccggatatactcatccattttctaagatatgacaccgttaacttttagatatacgtttgaccattcatcttgtttaaaccttgttacaaacataaaaatataaatcatacttaaataacatttgataataagtcaagtaacatcaaaataaataatagttacagaaatttttataataaactgaatggttaaatatatctaaaaatcaatggaggtatattgtttaacagagggagtatcaataacgcaacccaaaatagtcaaacggcagcattcactttggttaggccagtttcaaccttttttcatgagtggcttgggcaacgaagaaaatgaatccgaaaggtgatggactcattgataaaatttacgagctttatgcccttctgcctaatttccgaatgacttgacctaatggttaactggtaagtaaacccctattttcaaactaacaagcctaaaagggacatactatatgactgagcttaggcaaccaccatatgcacctacctaagcaacagacaaatggccacaactgtctaggaaattagcctgcttgccgcacatcatgtggagctagtgcattagttgagatgcacaatcttgcactaatcaacaattaattaatctatttttttgtgttataaactatggccatgtagatttttaggaggaagtaagtgatcttttaataatactgtgtggacaatatggttaattaataacctaatgcatggacaacatagttaataatttaatgcatggacaatatggttgtaataatttaatctatcaactggtacgtgcgtgttgttggttgctctgctgtttcggaggttgcggcctaagctggatcttcggctcgtgaacgtgatcagacgactttctatgtacgaaatgtcgttttaatattcgccaaggatacttagtgctagtctggctctaatcagttcgtattcaggtcagaattcgtcattgcagattccttcatatatatcatagtccccgtgcacttaaacaagacagcaaaaatatggtggatcttttcggttggaatgttgaacatgacaagtgcatacctgcccagctttgcatacaggccagttgtccggatactcttgagcaacataaagaaaggggtcttcgtgtgtagtgaaagcttacttgttagcatgaatttgggttttatcttctcctagatagaaacgtacgtggagttgtgtgtgccgctatatcttcacattaattattataaacccctccaaaaaaagagaaaaaattaaggcacttgattgccctcactgtacacccgtgtttccagatatctcacaggtatattatttgtgttcttttgatccatggacccttgttttttataatatttatgttattttaaggcacctgatgatgtaaaagatacaattgcttaatataatttttgtgcatttgtatggttcattttagggatgagaatgtgtcggataccaacgggtgcatccgcgacatttcttttcatttttcttatcgagaaacagaaatacatacaaaatatgaaacc

SEQ ID NO: 14213 - DNA, 13871 bp, Oryza sativa
ggatctcccaccgtggtccacctcgcgtcgattccttcgggattcttgatctacataagttgatgaaagctcgtgccaaatggcttcacttggcacgaacccggggaacctggttgacaagcaaagacgaagcagcggcgtccagagcgcgacggtgttccgagttacgcggtcgcgttcccggagatcggctgcactaaaagaggcgttcttggtggccgttagaaacggcattcagagggaattacagaacgcttattgaacggaaatggagctcaccggattgcgacggcgtcgaggacttctctcaccggcgccggagttggcacccccgttcccggcgaatccgaggcggggtacctcggttcttccgcgaaacgagacaggggcgagagagagtgagagttggtcggccggtcgggttaagtacggtcgccggcggagatggggaggaggagctcgccctcttccgcgctcaacgcgtgctcacacgcgtggcgcgcggggtctgagtcgtgggcccgtgtggagagggatgtgaggctgacaatggggtcccactaggcaagagagaggtgtagaaggaggaagtgttggacagggctgaacctagcctaaggcactgacaagtggggccaactcgatggaaactaggccagggagagagatatgggtagaagaccggtaaacttgatttttagattaattttcggaattattttctcctctaactttgtaactacataattcaatgtgtggaccaaattaattagtgctgattttactggaggtaaatgattacacctagattccattttatttggttgcactcaaaaataatgggtggactgctcacaaaaaataaacaaagatgggctattagaaagctagattgaatttttaggaggcttaaacagagaaggaaaattctagaaaaattacatttattcatgataactaatctagtatttgaataaattattttccatgttcacttatgtgcagttaaatgtacttttggatgaaatatggttttagccgattaaaatttaatttgatttcttttagttgtctgcttcgaccgattaatttgagatatcaacttgagtgttaacacgttaccaaattacggaggataagtttgtgctaatcattgtccacattaatttttccatgattttatcttgcacaaaatattttagagaattaagttgacctttatttgtatatgtgttcccacttcataattgcatctaatattattatagggattacattaaacttcttttagactgagaagatgatatttgagtttaatattaagtccacatgttatcacccaagattaacagattaactataggtttgtttagtgaagtaattcttttagattatgctcatgggacctattatggaatgcaagaccaaaactccaaatgcacaaagaactcgagcctaggcatgcattatgtacatgtatgcttgatgacatttctagtctaatgttgggaatgaaaagattttattttgttctcaaattttaatcatgcaatggattaagttggtcatcacctaaattaaaacggaaatttttggctctcaaaatttggagaagttaacctctaactagtttgacaagaaattttaagtcctaaaatttcgggtatgttacacaaatatgattatcgataaaatgaaagattgcccatgctgagtgagatacagattttgtattgcgcttttgacttttgatgttggtagttgtagatgtagggattcagttgatagttagccatagaactcgaacttgccatataccacgtgggatagccgtgtgcagtgcaatcatgcgttgcaatttgtcagtcacaatcactgggatgcatatgtgtggaataacttgaagaaaagacagattcaaggaggttacatagcctagatttgatttataaggacaatctccagagaatagcattgcttgggataagtaatggtcaatttcgcttaactgaaagaatagtattgttttagctgcatgattttttttgaaaagggcgtctaattattaaggacaaacaaagaagattacctttttgccttctgtactacaaggtttcgacagagaaaatgtgttttcttccagcacactaacatgatcagccaatgatgctatgagatttagatgagtcctcaagtcagctttcatttctgcatgttgttcctggatgccagtcagttttttctgcagttacctttttgccaattatttctattggattatgtatagtttatgtgacagtatttgttacccgagagcccagtcaggggttattttctcgatagtggcagggctcttgtagatcaactagaggggaacgcgcgctttgcgggctgcaccattggtgccattagagagaatcagtagacataagttctggtaggtagctaaaacaatgttctttgtaagttcagtgaaggacatgtataagtataacgatatgttgtatgcaaattgtggacagtaagtacataacaaaacctgccatttgtttgattacaggataggcagtacatggtagctttatagcagtagcattgcaacagttctgctagatgagcacatacaactacattacagatggctaaattctaatgtggtttggatgcttttgcattaattgccctttcccccatgaattcagaggattgcattactgctttactgcaagggccttcttgttgatgtgcaaacggaaggcacacatttttttttactacgatgaattgcttccacttatgcatagttactcgagaagtgctgcaaaaatacaatttttgtgtcaatactgggagtcaacaatcttgtggcattgaactactcaacaatattagtcctctcctaattttcttttcctgaatgtgaataaaataagttaatggagttatttttgtggcatatgttaaattgtaaggatgaatgcagtagtggtgtaatatgtgaattaacctaaggagcaccagcaggtactataccaattttagaccaatataaggaaatcaatcaaacatctcaatgacagggaaacacaaaaaggttttcaaaaccgaagtaatgatttatccatactaaaaacacaacaaacatgtaagcaacctaaattgttctcttagtaattttctcataatcatgaaagtgaaccaaataatttattcaagaacatatttatccagcaaataaagttgaaatggacaggattgtaaatgtcaatctatcaagttaaactattggttttgggttgtgcatcttttacatagattataggtatgcgattttaatacttaatacattgcaagcacaacatttttgtgagcagatactatcagtatgtttaaaggaatatcatgaaagttcaagctagtcaaatacataatttggttacaagggcaacactcaacgtcaactgaagctttatggtagcacgacatgttggttacctattgttgaccacctgaaatgatgatgagcagaaacaaaccaactctgcttccaccaattcctacacctataaaaaaagtaaattacttatgaaaagatcacatcatttagtatgtgtccaaattgtccagcacactatcgcacagcctatagcttaacaatatgtcacttacttaaaaagcaagctgccctgctgaaagctcagaatgagaaatggcactcagcagcagcaccaatagaatgttaaaaagagttaatatataagcaaaggcctaatcaaagtgcaaaattagcccatttggaaatgggctgaacaaataacttgtactatataaaataaatatgtagtttgttcgaaaggggaaaaaattgtcttgcaagcaactgtgccactgtcctagccatcatataaactacatcatactatgttttcaacttaatttgtagaaaagcagggacaggtaagcaaagcttttgctttaaagtcgcaatggacagattgattaattgtatacttgtttcaccagagagaaccagtagctaataatagaggttatatcttaaaaacttcatatagctagcttgtcttaaaaataattacatagtattttacaaacttttgaatgatattttcaattttaccttgaattaagggaggtagaggtaaaaaatagtactaaatagttggtggaaaacatatactccagatgaagggctatattaaatcttttgaagattgcttttgttccctttcctccaggctgctttttgtcctaataagatgcaatacaacaaacatgtggagtgcagtgtaagtgatagggaaatgattcattggcaagagaagggagaagagtgcataactgtatatcgtttgccatcagctatgtccaaatatgccagattggggcgatccatccctgcagctcttcaagcgaagaaccataaaattagtttaacagtgggcctataaaacgtaatctggtagttttcttctgtcaggctagcaacacattttatgataaatagactctacaaccccagaaataaacactccatatattaacgggcatatttaagaaaaaagaacattggaaaatccatttgttgttttaaatttcctgatgtctattaatatgggttttcatcctttgatgaacaaaagcacattagtccatcatggatttagagccaaaccacttccaagaacattttaggtgggcatatttgcaattgaatgaacacacaaaccctatagtgttttgttcttatgtatttacaaatacaattttggtcaaatttatacaatgaagcaagcataagaaagcaacaagaggcaagcacatgcaccttgtcaattgtggaggccttcttggagttgaaggtggacgtgcaagtgtggaggcaaagtggaaggacagcttgaagccaaccgctggtccacgattttctggaagtaccgctgcggtggatggaggcatccttgctctgccctgaactccctctccttttttactcttccatagctattagctgctgcgaaggaagcaattccataaacacatagctgctaccaatgaaaatattgttcagcaaaggatgaaaacagatagactacttaggaatttattgaacagtttcaaatatcacaccatatgatgagctaacaaaatagtaataatcaatcatcactaggtttagcaaaaagaaatttagctgcgaacttctgttccaattatttttctatattttcatgcaaatttagaaggaattgtattaattgcaccaaaaatagtcaatgatctgaaatcaggaaagatctacacatatacaaagcaaacctgaagacatttttttatcaagagtgcagcatcatttttttctagatggaagggtcggattaaatttaaaacggaagtgcagtatcacacagctggaagagtgacaagcatgattagtgccgcgccaacatcgagaatcagatttaacaaatactttccaccaaacatacgcagctcgaccactcgctggttggccctgcatacacctctgctgttgtactattaaatgaactcgccatccattcctaggaccagagtgggtagccatacagccatgttgaccacgagttaaaacatttagatcaaactgacaggtgacatttaggagctaatgcatctaagaactactttagttctaacttaattggtaaaaaatttaatcactcaccatattatctgaacataaaaaattgacacaaaacactaaaaccagaacttcagtcctatatttcaactgtattatcagcattgaatgaataaaatgtagtatgtacactgctagtaaatggataagaggagcactttttagtggctcctggttgttctaatggaatatagcttatagttctcagtaatggaaataaaaaattctgagtaattgaaaatccaagcaaatttaacacttgaaccacgtcaaggaaagaaaaggatacagaaacagatatatacctatgcaagatccccaaagcactttttgtaactttgcatgattaatctattgacaaatgcaatgcaggactttattcactatcacattagtaagataaaggaataaattgaatcactactggtcgtgaattggaagcccagcctgggcatagtaatacatattcgagaacaaaagatgcacaataaatttgaagttttcaaatttgaattgaatgacatctcagcaaatgtactacatccactacatagtagtctagcagtaattttcctcaaaagtaaggtacacatcattgaataaaaattgcttcctgaatttagagaaagatttcatgaacaaatgaaggtaatagacaacatggcttggttacaatgtgatctaggcatactacaaacaataaacagagagctctagactttgtgttggcctacggtatctgcagtagctagcttcaagttcttttcaacagaattatcctggtaaaatggttgtacagataatatagttactccctccatcccataatataacgcatggttaaagttgacacggtctccaaaactaatctttagcttataatttctcatatactataaggtttgtagccacaaaattataaccatatgaaagtaaatgtaaatctcaatctaatgatataatttttaacaaataaaatacatttcatattatactaaatggtggtcaaatgttttaaagtttaaatcttgaaatgcgcgcgcgccttatattatgggatggagggagtaccattttgtatggagcctaactcttatataattcaacataatgaaaaaactaaaattaaatgaaatcaccatgcaactttgagaacttaatcaataatgcatacttgtacactatgttcgtcaagcatttcattgagtatatgatatacacaagcatgtgtagaacatgagtgtccggttaacttaccttctatttcaaagagttctacacaagcgattgtaaccaagatcgagatcaaaccatcttgcctgtaagactgtaaagaaaataaaagcttttgaacaaaaaggagaagaaagatgtattacctatcattctaacaagggtcgtccgggtgggtgcacggcacttaatggcgccttggatgcgctctgcgagccgaggcgctgagctgccgtgaggaagagggtttgcagcctatgcccttcagccccgtaggcctgtgtcctctcgtcccttcatgaattcaccggctgctcagctcagctcatggagcatgggcacataatgtctctctctcggatcatcgtcttcaaaacctgtgttcgctacaggacgatgggattgggaacatgcagcgcagggaagaagtactctattaacgcgggattatgtaagtactagttatttttttaaaaaaaatagatcaatatgatttttttaaacaactttcatatataaacttttttaaaaaaaacacaccgtttaacagtttcaaaagtgtacgcgtggaaaacaatttttcatggcgttaccctgtaattttcactaggacccatacgcgaaaactgccagcaaaaacatatctaggggtgggaggccatggaccaccagcgaaaaccgatttttgctggcgaccacgctaagatgtccgccataaataaaaaactctattttttcgagcggacctcttaagtgtccgccagcgatcgctggtggtaggtaataaagaccgctaaaaaattttttgaggcgaataaaatccaccgcgcgcccaccgcctagtccatcctcgtccttatcccttctcgcagtctctcttcctctctcccttctcgcggtctttctccgcctctctcccttctccgtctctcctccctcccttctccaccgccgctagctcgtcgccaccccaccaacgccggctgccgtcgcctcagctccaccgccgcatatcgataaccgctagcgaagatcgatatttccctggccttttctttgtggcggctgcaatttccgctaggaaaaacctaaaatagccgccacaaaagatgattttcgtagcagtggagtgttgggaacttgctcttgcaaacacacggagtttctataagaaattgatctgtgttgtatatatatatttttaaagtggccaggggtttgtagtttagtttcgattatccccaaggataaagataaattagcgacaatgaatctaaatcaacatcccagcgccatttgtcactaaaaaactatgaggaaatggtttaattagaataaaaatccttggccaagaaataaatctaatagtattgccacactcaggaaaaattataaatctaatagtgaaaagcaaggcctcacatggaaattacaccgccagacaggccgaacactactacacagaaggttttctcgtgcggtcgaacggattttcgcgtgcggagcttcggcccgtctcgagcagttcgtctataaaaatcgttatttgtgcgtgcgggcggcgcaactgcacggaaaaataaaaaatcaaaataaaatcgaaaaaacgaaaccctaaccctagccgttgccgccttcccgtcatcgtcgccgtcgtcttcccgtagttgccgtcgccttcttgttgtcatcgctgttgtcggagggctgccgcccccatcacgccgccggatccgcgcggggggtggccgccgccgccggatccacgcagggggcggccgccgccgccttcgcgacgccagatccgcgcaaggcctccgccgccggatccgcgcggggggcggctgccatcgcctacgcccgccgcacgccgtcgtcgccttcgccgcgggctgccgccgtcgccgtcgacgcaggccgccgccctcgcctacacccgccgccatcaccgtcatcgtcgccttcgccgcgggcagccgccgtcgccgtcgccacaggccgccgccctacatccgtcacgtgaggagaggagagaggagtgaggagaggattggaagggcacgcatgaggagaggataggagaaagagcactgagagaataaaggagaggaatgggaccgaggcgtggaaaaaggaaaattttgaagtgggtaggagggaaagaagggatgattatttttccgtgcagctctcttaataggcccgcacggaaaaattggtttatttttctgtgtggttcatttaggaggaccacacgggaaaatcgattttcccgtgcgggtgatagcccgacacccggtcccctatttttccgtgcggttccacttacgaaccgcatggaaacaaaaggggacggcgtccagaaaaatcaatcctctagtaatggaagagccgcccatttgcacatgtgattttcgtaaaagaagagcatgtggaaatcaatttcataggtggttttcataaccgagaaaaaaaaagatacatcttacgaaggggtctaataacaaattaacaaattaaatccggtttcctcatgcctaaaagagcaactgttagcctctgagctatgatgcgaaggggtctaattacggaggggtctaataacaaattaacaatttaatttcatatattgatttagtttgtagcatcatagttattagaccgtaaatgatagtaaattaaatcaacaaattaaatccggtttcctcatgcccaaaagagcaactgcgagcctctgagctctgcggtcccctccccaatcttccccattcttccccaatccggtttccattggtcatcaccatccgcgcgattcgcacaggcttggagctcgccggccgcgctaccgagtccggcctccaacgaggaagggatgaagccagaggacgggaggaagagaagtgcgacggcagtggcgaggaaatgtcgtccgtcggtcccaaagcgaggaggacgaccacgccgagcgtgggaggagaggagagtcgggatcaccgccgtatcgccgccgtcgtcgagttgtcgtcatcgacgcccaccagatctgcgctgctgtcgtcgattcggtcggtccggcaccgccgcctctgccgtctcagcctcctcgaccgccgccgctccggatccaggccgtcgcgttggcctcctcatccaccgccgctcaagatccacgccgtcaccatggtctcctcgacatccgggcggcgctggtgttcgtcgtcgaggtgggggagagaccggcagcagtggagttcgtcgccgatgtggggagaggccggaggcggcggcggcgccggtggagctcgccgaggttgggtgggtggggaaagtggagaggggttgtgcttgtgcgattgtgtgggggtgcctgggtagcaaggtagggttgagattttgtatattttctccaccgtaaagtgttaactgtaaaatttatacttgtttataaattgaaaaaagtattagggctgaaatcaaaagtgataggggctgaaacgaaaaatcgaaggcacccatgagaccatttgcaatgtggggaaccaaaatttggatacggtgctttttagcctatgtggcattttagggcccatttgatttggaggaaaaacatagaaattgtagagaatttcaatcctatagtaaaatttcctatgaagccctttgaaacaaaggattgaattctatccaatcctttaaaattcctatggaatggacaattctataaagattttggaggaaatttagcaagagcttcaacctcttgctaactttcctttgagtctatctctctcatccaattcctgtgtttttcctgtgattcaatcaaacggtcatttctgtgtttttcctgcgttttacaatcctctattttacacttacattcctatcaaaatcctgcgttttttctattcctatattttctcaatcctgcgatttaaaggggccttagtttcctcgagtgggtagcttgcattgctactacccttattgcgctccagaacccataccggactgctccagtgaaccggtgccagcgttgttctctctgcaggcggctgcagcgacgtcttcgtccttgctgtcccagccagagctacaccgcgctagcctctgcccgtcaccatggcgctgtttacttcacgaaaaagaaattttttagatatcacgtttgaccgaatgtcagaagatgtttttttttatacgaatgaaaaaactaattctataactcgtctggaaatgacgagaagacgaatcttttgagcctaattaatccgtcattagcacatgtaaattactatagcatttatggttaattatagactaattagtctcaaaagatacatgaaacgaagaagaacggcaacaacttctcctgtgcctcgagtcctcgacaattgcagtcaccggccagaccccagtggatagccgcggtggtgatactccggtctgatttacaatcttgctatgggctgtctacgacgcatcgggaagctcctgatcactctaaacctggccggaggaggaagacacagcgggctgaatccaatcgttaacacgtgaatgaatggccgaggaatttccgatgacgtggcccatggaaggtcaagagatgcccgactccaaggtcaggttttgtcttatagagatagtggcccccatcaatggatcaacacgttatcagtcacttgctttccgctgagcgtacataacagaatagagcacgaaggcctaacgcaaatcgcaagggtaagaacggacctctcgccaacaaccattattggtacactacacgtcatcgccgtggcctctacttccgaagcaaaattgcccctccctctctcatttttaggggtggacaaaaaaaaccaaaccgaaaaaccgaaccgaactaattgggaccgagaccgaaaaattcggtcacaaattcggtcatcaattgtaactaaccgaattttatatggtcttttcggtcatttagttcggttaaccgaaataactgaactgaccgaatcactgtgaaagcccaacaccagccaatagcccattagctagaaaaccctaaccttccttcccacaccacacgatccttcccacttcccagtccccacatgcgccgcctctttctcgatctttctcctcctcctccccgcctcttctccgctttctcctcctcgcacgcgcctctccgccttcttctcgcgccgcgccaccgcctacctcgcaccgcgcctctccgcagaacttgcgccgtgccaccttctcctcctcgcgctgtgtcgccaccctctccccacacgtctgcgcgctcgcgacctcctcctcgcgctgtgtcgccgccctctccccacacgtctgcgcgcccacgacctgaggcctcgatgatggaaggctgatgggagacgcgagatggatgggatctggagttctggaccgtggagtggttgagatcgacgggatcaatggctagatggattttcttgatttgattttttttccatgaatcatgctctacttgctacttgctggtggcatcatcatattttagtccttcttcccaattgctttttcatcgatcttgtgcagagtattcttttttgggaattgctacacagctgccggctgaaaaaatttgttttatcagctgaattagagagcgttcgatttttctttttttttgcctggtttttttcatctggttttttacggacgatggaagcacctcttattttttaagtagtatacatatatatatatatatatatatatatatatatatatatatatatatatatatattattcattgtgttaagctaacaattaggtgaagagatgtcctataagattgatcaatataaaagcaaataatcgttccatatctctacattaaatgagagttgaaggtcatgaagatctagaatagcaaggtactgttagtgatcaaaagctaattttctttggtttttatttaatgggtttcgctacaattgtttttgccatgctactctggtgtgcacatttctcggtaagttagttcttactaagaaatgacccatagaccggttttctaccttggaagtggaattcgagggtcgctacaaaatctatgaaattggagactgataaaataagctagacaaaccaatagatctatacaaacgtgatgaaaataacaaatatatctaaaacaactgtacggttagagaaatatgaacttagccagaatatcggactcaaccgagaaggtcctaactaagccgataggaccctaaattgtgatacagttaaagatagaaatactatatcagataggcaacacttgagtcaacttgaatagaatatcagacttaactgaggaagttctagccacgccgatacaagcgaagttgacagaacttacttcctcgctagagattgaacttaaccaatgcagtcctactcgaaactaagaactcgcagggataaaaggtggcgatacgctgaaagtaattgtattgatcgatctatgaagatagattacacagatcctgggtgtacatatttatacccttgggttgatactagtcccgaccgaacaagatacaagtttcctaaagataaaagagaaaagatattagtcccgatgaataaaagttaaataaaagttactaaatcctgtcttatcctataatactatacaagtgatccccacttagtgtagttattaggattttgctgagttctagtgaagccacgtcactctttaatcccaaccgttcgatcgcgctgcaaacggtccgatccgttctatcctaccctaaccgctctgccttccttctccaccgagcgtagattctccgccgccgccgccgggcatactcctctccccacgcgcgtgactcctcccttccccaccagcccgcgctcgcttcctcccacatcgcgcgcaccaggcgtgg

SEQ ID NO: 14214 - DNA, 20336 bp, Oryza sativa
tgacatgtgggcccacatttcttttcatgtgaataactaatgggtcccacgcgtatcccttctttctatatagttaagaccgaaagctgatttctggttgagccacgtcacctgttaaatcttagtcattcgatgtaatctggacgctcgcagctgccaccgccagatgcagtcgcttctcctcccttctccttcaccccggcccgcgctcgcttctccgccccgcacgcgctcgcggtcgcttctcctccgtcccctgcgagatgcgcggcgggcccgccgcggatgcggtcgattccccttccctttgcgctttcttaggatgttcgctgtcctccgcttccccccgcaccgatcctccccctagcccgtcttcgccccccatcgcatcgcctcccgcaccatcaagattccggggccggagtcatgcccccagcgcagcaggtggaccctccgccccatggccgcatcgcctccccccagcgctgcagtcgcccctcccgctctgccctgcgacgtcgcaccctagcgccgcaggtgcctcacacccccagcagccgcctcccagcctcttcgcctccttggcttgtatggagaaagggaaccatcgttgggcgcacgctgaaacggaaaccgttcgatccccgagtcccatctattcatcttcagttttttgaaacagtacgtcgccgcttgctttatactggccttctttcccgtcctatttatgtatgatgatacacacaacagctgaagaaaagtggtacacagcagctggatcaatctgctcggccagctagtagcttctcctccatacaagcacatccttggattgatctgctctaggttgtccactgcttgccgatctcacatgttccagcatagcttctttccccattcagctaaatttttttataatacatattgtttgatgctaattgtgtagtcacactaatttcttcgtgattcaattatcaatttccaaccgatttcagtatcccaaattggtcccttcttttttccctgtataacagtatttgcactaacagtttaattattcccttcaatttcttcacaggattaactacttcgatttcgtcttgggtttattactggattaagtaatccacaaccgttttacccaggttgttgaactattatggggaaatttctttgacggtaatacgtaacaatataatcctttttcccctaactatacaatttctattattatgctcctttgttttccatatttatttgtcatattgtgattattctggttaccttgcatctatcaagcacctttgtattttaaggttttagtattctattatgttacatggaaagtttagtagtacacttgctgcactgaatccctacagataattcctatcactgaacaatgtttagtgaatcaataattcctatcactgaatgacatttagtgattcaatgattttatatgtatcttgtatacttggagtactaaatgataagatgaaatataactgcagataattcccaacttatcaaaagtttggtgatcctttagtcagccctgtaagcatgattcagtgaagccatggctcagatggctttggcaattctttcagtaaccatcaataatgtaagtgccagctacagtttgtataggtcccagtcttctttgatttgtttaccaaatattacctgacctgagttcacaatttaagtcataatagtatgatctcaaaattctcaaattaacttaaaatatgttacagtttattttacctcaaacttacattgattcatataacatgtttatcttcctcatgtactgagaaactgcataatttatcaacttttcatgaattatatttcctcttctgaggtagcatcatgtcttttgtatctttcatgaatcatatttcctcttctgaggtagcatcatgtctttgtatcttaggtgaatcctgtttttttagatatgatgatgatcttcaaacttccatctgtagtgtgtgtgtgtgtgtctatatatatatatgtaagacaaggactgcattgagtattttcagtattgttcttcttgcccccatagatttggaagctagcgtttgatcaatatactcctattttctgtcaggcactattgtggtgttttacatgagggggtctcaatgcactcaaagtgaagcattgctatcagattattccttgcaaaagttgctccactatcatccagaatttcagactgcagttggtattgcgtcagtttcccttctttgcttatttttttttatctcacaaagtgtacttggatttttaaattctatttcaatacaaatatcccgccgcaacgcgcggggtatcaactagtttattttaattctaatgccacttaagcgccacgtcaacgccacgtataaagaagacccggtcaataccgccacgtcagcaaaaccgcccttcaaaaccgtcttaagagtcaaattgcaccggtttcaatagttcaggggtcgagatatcctccggttttatggtttagggtcatagattagattcgggtcactattaagggagtcaaagtgaacttattccttataaaaatgttgtaggttttacaggtgttttcttaaggaaaaggtttgtaaaagaatgattttcacgagcggttctattaaggaacagaccttaaatacaacggcaatatattttaaggataaaatgtcgtaactctttcatatgaagttaattgatgacaaaatttgcccaaaaaaaaagtatagctctcaatgagatcaacattatgttaaattatttttttacatttgaaattgtttatggcctaaatattcgttacaagctctaatatatatttttacaagtggttctttaggaagataaaactttgagaattcattttgagtccaattgaaatgaacggaagttatctgagatccttacaatatttgtttcaaacagaaaaccaggccattcgcatggatggttcatgggcctggtttttgcccataagaaaagagccgttccagcatcctcggatccgcaatggctgaaatggatcgatgaaacgtcggggaacacgttctactagtggaaactattttgatccctcgagaggatgccccctcgttgtttacatgtcactcaaatgatttttaaaaaaattaaacaaaattgagaagatgtattaacatatgatatatcacttcacaaatatacaagttcaaattcaacttttacatctcgcaacgaaaaaaaacaaatttgacttatatattcgccttgccgccctccccgagagtggcagggtctgtttctgtaaatatttttgccgataatatttctgtaaatattaaaaaaataaaaatttaaaaatgaaaaaaaatcagtagtcttcctatcctgtcctatgcactctgtccatcaatccatggaagacgagtccaacaattaattaaattgcatgaattagagctgatatcagttaattaagtagatggaccggatatgaactatcatgtgcgtccggcgctctaggagtgatcgaacaaagcgtctcctaggagttagcacgtgtgggcccccagctttacacacgagaaaccccatgtgtcttacagtagcacgtgtgggcccccggctttacacaccagaaaccccatgtgtcttacagtaccatttcctaaatcagtagatggtacacacatggcacgcttgaatatctcaagctgacatcattatacaggttgaactgtacattaataatagaagggtagcctaaataggacccaaatagaccgagcatggtcataaacaataccaaatatccaaagaagtagatgagctaacggaagcgaagcagcggcggtccaacatactccacaggcatcgactggtgcacctaggtcccggctccacggtcttcgacatctcttcatcagctagttcccgaatggtcgactccaacttctttctaaaagatttagttaagcaagggtgagtaccaaccgtactcagcaagccaccactacagaatgtatttagtgcacacagggggttaaaggatggcttggtttatttgcaaaaagttagatttcacaaatcagttcacaaacctaagacctagcagttttaaatgaaaaacaacgttaagttgaagttgtcattaatccgcgaggattcatccacattcccaaagcctcgcttggtccggtttaccctcacatccagttttccacattcccaacatcacaatgaccttccctgtcacatcctgattttcgtttcaggatttataaattatttaataaattaataatagaatttatattaaatgttcattaatttacaagtgaagttaaatgtgggaaataaaatttcctaaatataaagcatggatggatttaatttttattaaattctccatggttaattatactctctggaattttctcggatttttcggagctcaattcctaattttaatcttacaaagagcatttcagtaattacccacatattaaattaatcattaaatggtctaattataattttgttaagtactttgagtgtccaagtattttcaagatttttcttggaattatttgagcataggaagtatttttaacaattcaaagatcatttcagtgattaatttaattggaaaagtatttaaaatccccttctccttttcgggccgaaataggaaaagttcagcttctatcctcggcccattctcccttcctttcggctggccttatccctcctccaaagtctgctttgtgtccctttttcaatcgggccaagaagtagaagcccagcaaaaagtctagtttgcctccctgctacagtgtcatcttcaatctccagccggctggagacagagcccgagccagccgcacagtacctgtatagccgcggttttcccctccaaatctgaccttttcccttgtgtttttctaaaattagttgaggggaaatattcctcttatcctcctctatctttacccccaaaaatcggagcaaatcgttgagtattttatccgaatcgaactcgttttcgagtttatctccaaaaccgagtttttgatttcccggatcgatttcttgcgggaggagtccgatctcttcaatccaaggctataaataggaccccctagtcctcctctttcgtttgccccctctcccgtggtctcccgtgcctcgtagcgccgccgccacgtgctccaccccgccgtcgtcgccggccgagctccatccgcgtcgcgccgccgcctccgtcgtcgccgccggtcgccgtcaccgccgtaaggtgcgccgaggtgtggagaagcccggccgctctctccccgctgtcgccggtcaccggagtcccgtcgccgccgtcgaccgaagccgtgccgccgctagacctcgtcgccggccgtcgtcgttcgtcgtttggttcgagggtgagtaccgttgggttcgtctcgtcgtcctctacgtgtacatgtcctccaaagtcgcagccgaccatccaatctccggcgaggtcgccatcttggtccggccattgatgaggtcctcatgatgtcatcatcgtttttctttttcctgttgttctaatagattaaatcttcggaaattcataactaaatcatcgtaactcggttttgagtggttcaagttgctaaattcatctaaaatcatgatctacatgtttgtttactttatatgtactgtttatttggtttttattagtctttttcttcgttttgcgtgttagcttgtcgtttccgtcgttgcgaaggttcgtgagtgcgtcggaagtgatcaagaagattacttgaagaccgattattgcaaggcaagtcacacagatcctaaacacaatcctttgagcatgttgatcctatatttaaattctctatttatttcaactgtgcatttattttcgaatgtcaccgggtggtgtgaacttattcctttgttatggccaatttgcattgattactttattccttgataccttgggttattataacttgactagttgggctttatatattggttcagctagatattagttatgattgcttagccatgcttagaaacattagcacactattgggataacttatgactcactattatttaaggatggcttaatgatagttcacgatggtcaatcgtgattggttaattaattacttgccaactaaaacttgataatggtgggttgtgagcacatggttttgagagtcgtgctcatgacaattaaggaccggttcgcgagctactgttgtgaaacatttatcgtgccaaccacaagccagcgtgggcaacggctttatcttttgtgtagcgtgattcattagagtgcgccagactgagaagtggcgagaagtccacgggggtcgctggggagtccatgccttgtttataagggggtgattatgatccaggaaaggtgcgctgtaatggattatgttgtgcaaggggtattgtcacaactcctttccgaggtaccgtggtggtattgaggcacatggtgacatgatgtggggttgtgtcttgtgggtacagtggtacacctctggccagagtaaaactattcgaatagccgtgcccgcggttatgggcgggttgagcaatgtttttcgtgattagtctcacacctctcacaataattatggatgttataactggtaacaatttgcttagctcctggtttggagttagatctgtacagccgggtatggttgttcaggatggttgggcctgtgcagcatgggtgtgctgttcagtgttgattaaaatttttaattaattactctactgttttactactcttaactctttgctaaatgctgctttcgcaaatgagcctatattatgccatcctttggtatccttgtgcacttgcatatttgctgtgtggcttgttgagtatgtcatatgctcattcttgcaataatcaatcaaacctcagttgaagataaaggatccagaaggagaagacgtttggcttataccccagttgagctgcctgtgggagtggagctgaagccgtcgctagatcgttattccgctgctgttttcttttctttgtaagtatgtaacgttattattaagatggatttgtatattaaattgtcagtttgtgtacctcggctgattcctggacgaggattttatgcacaaataagttcggaaattactagtgaatttccgggcgtgacattcccgcccatcgggcaaggtcacaacactttcctaatctaagcaatattaaaatctatgaggctagtcaagtgtagtacaagtcccggcgctcaataaccgcgagcacggctattcgagtagatttgatttactcacactgcagtggatgtacgcttttaatcccgcactccatgacttgcccaacacattagcctaatcccaacacatgagacttgtcacgccccggtttttcagtcattcttgcatttcggcactcgctccaaggactataaatccccattgcactcccggcacaacacaccacctcgagccggtagtgaggagagtcctggcgctcccgggatcacaagaggttacattacatataggtgaggtgtgttttaagttttgccgcggcattcaaacgatcgatccaatcgatccatcacacttcccacacaaacgtcaccacttcagaaccaccatggcagtggtgctgtcccacgagaatttcttagtccaccgggtctatacccactcgagaagtgtggtcgtactctgatcgtttcctgcataccttcttgactcggttcttaattgaccagggtcggcgactagccgtttccagaaccacccatattctatccatgccgcctcagtcgaaagcattttgtctaattaggtttttggttttcgcaaaggtttttgtgtcgcgggtggcgctcatgcctccacccgccttctggcaatcactctcgacgagtgaccaccgccaacacatccatatccaactattatggagtgtacaatcatctatatatataagccatactaagcaaatgtcaatatttgactacgtatgaataaaagactcaggcaacaaggatataataaaggtaacaatatcaatgatggttcacatacaactttaggtacgcattttataattagcatgcgactttatttataaacaaaacatttataaaatgggttcaatatgctcaaggaggggagcatactgacttgccttgcttttagaaatcgatatcttcaagaaatccacgcctgatgaatatccgcaatacccaatacgcggttagcacgagaaaaccatataacaacctccgaataaagtaccaaacagtagtgccattggatagatcccgattttagaaaaaaatccggaagttgaacggaatcaatcggagtcacggtttggaagatatggacttccgaagtttagatgatttataaaccgaggaaaaggatacccaaaataggattccttttattttggaggaaatattcctaaggtcattctctggaatggaggaggtatattggacttgggtggagatgaatactactgctgggctactgcccgaagcttggaggagggatataatacagacttttctgtgggattgattctctggcttaaccaaggaagtggggaatttttttcatttttcaatttaatttttttaatatttacagaaatattatatcggcggaaagatttacaaaaatagaccctgccgccctttatttgggcggcaagctgatgtggtacacgacgttatcacgacgccgtgtgcattttgcgtttaggcccttacagccctctgtaagggcggcaagaggttaaatgcaatttttgtcctaccaaaaaagcaattggctagttctttttgcatatgagccctttcccgcctttgggaatttggcgcggagaccccttgcaacccaaacatagggcggcaagggggccacgtgcaaaattcgcagtcccccaaaatgaccgtcctgtgtgccacgtcagcttgccgcccaaatggagggcggcagggtttattttttaaatcttttcgctaatataatatttctgtaagtattaaaaaataaatttaaaaatgaaaaaattcaggaagttggggaggtgatatagactttttgggtggccaaaggtttccaaggggtcaaacaggtgggtcccacggcccccttttcctttttcttttctttcgtattccttctctctctttcttatctactactccctccgtaagtttttgcttatagtgtttgaccactcgtcttattcaaaaaattttagaattattatttacttttttagaattattatttactttttattttttatatttgtataaattttttaaataagacgagtgttcaaacattacaagtaacaaaaaaaaaactcaaaattcatattatgggacggagggagtactctcggtttctcgtcacatctctctctcggtctctcctctgcctcttcacgcgtgcctgagaggaagacgccaacgacggcagtcggaacgggacggcgatggggggaagagagtggaataagggagcagcgccggtggggaaagggaggctggggcgctggctgctcgggctgggcggcgtggcaagaggcggcacgacggcgctcggcgcttggcgcggcggcacggccggcgtccgggagccagggacgacggcgacggcggaaaagaggaggtggcggcacgaggaggagactgcctcggcgctgtcggcggggctgtgcccggctgagctccggccggccagcgtggtggagggagggcggtggagatcagggagacggcaagaggaggccgtgtccgtggtcggcgacctggtgacggcgttcgtcccggcacggtgacgccgccacgcgcaagggcggaggcgtgcgggatgacttggccgcgcgcggggcggcgcttgcggcaggcggtactccactcggagcggcggtgacccagatcaaggtgacgatggcggcggaggttgcagtagcccctcggatgggcggtgatggaggcgttcgcgggagctgctcacgtggccgatgtggctgtgtgcggcggcaccggccccgagggtccttcggccgagcggaggtcgaggcggcgatgggaagtggaggagtgtggcggcaaagcgatggccgacgaggttgtggcgaagcggctgtggcccgtggcacacgggtccgagcggcgtggcgcccacaagctgctcgtccgtgcgccctagccgacgggtgatgatacgaaggtggcggcggggattggagtggcgacagtggaggatggtggagtgaggcggcttctctagccattgatttgcttggtgatgcggatggcttcgagggggaaggaaaggggaaggcagaggtgatgtggcgcgcgcccattgcttggacggcggcggcgtgggcccgggcgtcgacatcgacacagtggagcacgtgtcggcggtggatgggatggacggcgatgagatgccgacatccacagggtaaggcttactccgtccaagaaaaaaaaccctggatttcattatgtaacgtttaaccttcatttgaaaatttgaaaagaatatgaaaaaaattaaaaagacaagtcacgcataaagtattaatcatgtgttatcatttaacaacaatgaaaatactaattataaaaaaattcaagtaagacggacagctaaacgttggacatataaatctagggtttgtttttttttttacggaggaagtacagggtaagcttcgcctctgagattagagaactagctctccccttttcggtgtggactcggctcttctattcggcgtgaaccatcctcactgtgcttttggtgtttggggcagagattatgtggactgggtgcatggcgtaggaggggctgcgccagtgcggctccccggcggggattttggactttatgccatcttctccaacgcctcattcctaaatgccaccctcctgaacatcctcgctaatttgccactgggccccacaaaactgttgtttctatgccattttcctctaattttaacgccaccacaccggcagacgtggaattcggatggtgaaatgtccatcttgccccttggcgcgcgtggacagaaaaaggcgttgtttcttcgtcgtttcactccgcctcccctaaaaaacatgagcagccgcttacgaatccaccgagcagcgacggcggccaaaccgtgacagcaatcccaggtaggagatcgatagatccaccatcttcccctcttttggtttagtttggcatctgtttccctcacttttttctccggattcacttgtttttttttaagatctgatagtctagggtttgttgagaaggaggcatggttccgtctgagtggccatcgtggtaagatccaaaattcctgctttattctgtgttgctttcatgtgtccacacaccacaggggcaagacggccaattcaccatcgagattccacgtccgctgttgatgtggcgtcaaaatgggaagaaaatggcatagaatcaaccgttttgtggggtcaatggcaaattagcgaggatgttcaggaggatggcatttgggaatgaggcgttggggaagatggcataaagtacaaaatccctccccggcgtgcgtgcgttgaacgttagttcggggcggcgcacgacactgctcgtgctgccgcgtggtgcggcgcgacacggtgtgcggtgcgactcagcgcgggagcgcaatgcggcgcacgcaaggaggaggagcggtgcggcacgtcgcggtggctcggtgacctggtgcgccagccttgctcggctcggcattttgccgaccacgtggcgggcggcgtgtcggcctggccgactgaggcaaggaaggaggggaagaagactcggctacaatggggcaggggacgcagaacggacttatgctgtaatgagctgttgggttggctgagaacaggaaagcccaagcaataggagtatttgaatgactataacaaggaatttgtaactgggacttgaaattggaatttgtagattgcctgtaaacatgtaatggattgtatggttgtaaatggactgtataattggacaagtgactttgagccgagatttgggattgtgcacggactgtttaattttgggtatttggattggattcgaatcggcctctcagttgcccaagtatttaacttaggttttcttggcaaccgcttgaatgaaaggaccgctatatcgacggattttagaacgatgcttggcatacaaatccatcggacgcagtagagctccaaaggtagggatgatatcaatgataggattaggagcggcgtatggcacacaaacccatacgttgtggcaggattcaaaagttgatatagggtggaggatcaaagaattacgtacgacaattaaatatgccgaacgactttagggttttaagcgaaagccgcactcaaggacttttgagtagcatgaaactaggaaaggaggggatccgagggaggccaagttgaagagacgaagcaggtctcgattcaatcgcaaggttccaagggttggggaaaagaaatgatgttgcggcaaaagaacatgttccaggacttcgattagcttatcatcgaagcgcttagcaaaagggaaggacgtcgatcgaaggacatcctttaggaggaatgatttgactgcggtattccaacgattcaaggacaggacggatagagagttgagaggacataggagggatttcacaaggattgatggattaactgagatcttggtacaaacatatgaatgcacacaaataacacaagtcccattatgtgggtcggcttggcctttcaaggaggaaagctaagatttttccgtgagttcttttgaaataaaattcttttaagattttagttcgtaaattgagttttcctagtaaattccttcttgtctttcattgtaaaataatttccaaacacttataatttcaaaatagggttttcagaagttaactaatattagccctcatttgtaaaaatagttttctcgaggaaatatctctcaaagtatgttttctaaatatttagtatttatttttgtttatacatcaaatacatcaaataggttttatttcaccgaaaaggggtttcagaaagataaatagtattttttaaatattttcttaattaatatatttcataatcatggttctcttaacaaataatatttgaatctaaataaatttgtccctagatttctgtcctcgtggtccaagcgcaaccgaaaaatgggagataaaatccaataaaatccagcatgactgattttggagaagatttttgattatcccgaattttcaatttcgcaaatcaaaatagaaattttcagggtgtgacagaaactcatagaagtggggtcttgctggagagtcttgtgcatataaagattgagccataagttgatcaaccaccaaggtcctccaggattggtgatcggctgaccagtagctagcttagccgatacattgtgcaacaacgaatatactgagcctagcagatgcttgcccagagggatggagtggccagacacaagtgcttctgttatcgcctggggatttgtggtcgggccgacagtttttccacagtatatgaagcgttctagccacatgttgaggaatgcaacgtgatccctatcagtgacggtgcttgtcttcatgtggtgagccatgtaacctttccaacctccggcgtccttggttttcagttgataagtgggtttggtcatgaggtggaaaggattgtccagagccgatatgttaagtgatgttagcatgatgacatctatcaaggttggagtcatcgacccacgtccaaagagaaaggcgttcatggcgtcagaccagaagtgggcagcaactattaacattgattcatttttggccatgttgaagagggaaaagttaatgcactggtttatatcataaacttcccatatggtactcttagcttcagagacgcggaggtaccagttcctccatcaaggaatggggattggccaagatctgaaggcatttgaccactgtgatagatccaaatttgcatgtttgaagggcagacgacctatttttagattaatcggatctgtggggtatagatcgcccatcggtcttaaacatactaggacaggtctatcttccaaagcgatgataatcatatatctcagattttagatgaaaaaacagaaaagaggaaagaaaagcttgaaatcagaaaaatggcggaagatgagtaaagaagatgagaggatggaaaatggaatcggggattgtcctgatggaagccatgagagtcgactagagaagcttgctgcggtaaaaatcttgttcttgaggaggagttcttgaacttgggcagatgggatcttgagagcgggctctgtttggaaatggcgaaagtgaaggaagaagaaagggggcagtcgagtggggctttataggcttgcggtgggagataaggctcgattttcgaggcgtcgtttgtgcaagacacaagagaccaatcgctgtgtggcgcaagaattgaggaaagggtgcaatcatgacttgaaagaatttcggaacaaatccatattttattccgaaattggggggcatgtgctgacaccttttttacatcaaactggtcaaaatgtagtcaaagatggagcaagccgatgaagctgacatagccaataaaactgctgaggccgatgaagcatgcagccgatggagccgacgtagcgtgtagccagtaaaggactgaaggattagtcgacgtatggcattgtggggccacgaagagttcggcttgtattaggagagtctttattttaggaaattgtaattccttttcggtcaagttttgtaagtcgtagtcgacaaggagtctttagtttaaactataaataatagcctgatggctttgtaaaaagtctttacctaccaatcaaacaaacaagttcttacttttcattgcaatttattttcaaaccctagttttagtagttcatcaacgagttctttcaagttaagcagggctgcatcatcttgatctccggcttgcctgtaagttccgcttttatctggtgcatctagatttaaacttccgggtgtatcgctgtagtttgatctagtttctcctaagagttatcgtatatactagatttagggcttaaacgcatcgttttgtcttgatctagttgttacacaatttatcgaacgtgtctgtcctgccaatcaaagttgtcttataggctttctttgctctgttttatccatacgttcaccaagttatcgatatttgttaaatcttaatagattaattatttaaattttttaagctttagcttttatcacaatttatccagtccacttacgagcttctcatcggcttcaaagcttttaagcgcatagccgatctagacttggatttggactttaaactacgcatcggctgattctagccgatataattttcgaagacagttcggaatcatagccgatctgtgaattttacactctttatcccttgtcaattacaggtcaaattgactgttatgccccgaacctcaagatttgcaggctcatcattggagtgaagcaaacctctgaccccgaacctatgtcgcgtgatgcttacgtgaacaatcatcgcctgatttttgcgtcaataactcactgtttgatatgatgccacggtactgcgggcacgacgacgtacggtgcgcgttcgcacagggaggacatgcacaagctggcatttgtgtacatagcctgcctgccgcaatggtttccaagttggaaataaacggtgctctatcaattaaggccagtctcactgcacagtttcactacacggttacctagaccagaaactaggtaactgagccaaaggagtttcatggtgatgaaactcctctcacataccactacgtcaaaacccaataaagaagacacaatttagtgacgcgaatttgtcacacgtctcaaatatgacttcagtgacgtatcggtacaagacgcgtcactaattagttcaccccggtcatatgccagcccaggggaggcatatcacagatgtgtctccacaaaacgcatcactggagttgacatagtgacggctcttgttgagacgcgtctctgacatgtgggtcttccagagatgggtatagtatgagcatataccagagtcgcagttttacaatccgcgtcactattgtggataatattagtgacgcgttattacgatccgcgtctctacctcgggtaaccctatacaagtgatgcgtttggtagaaccgcatcactaacgtcagcttttggcgcgtgggcccattttcttcccgcgcgccgccggtgcatccatcccggccggcgctgtcctgtccttccatctcgtcgccgcccgtacgtccatccatttgccagcagcgatgcccaccaccatgcaccacccatccgagccaaggctgctccctccacgccaccaccgtcggtaggtgctagtttctccctccgcgccggcggcggtggcaggctgctcctctgcgccgcctcgtccatcaatccgccggccgaccagtacttcatctggtgctttgctgaaggaaattgatgatattcatattcaatgtataagttgccatgtgctgaatatgattgttgatgtaatgaaagattgcccttgttgactgatatactgattttgtattgctcttttgagttttgatgttggtagttttgtaaatgtagggattcagtagatagttggtcatagaatttagtatataccaagtggtaggtctgttgatgcatcatgcatgagatcatccaatacttgggtagcgagtagattacactagtacagatccttccatttgtgatggcccctaacaagacaggaatttgcgggaggaagtaatctcaatcgggccgaagtttcgcccgattgagatatggtcgcacagccatgatagatcggcataaaactaaaacccgtcacggatgacacttatctgtgacgggccataattgaggcccgattgagatgagggttccatatctcaattgggccctaaaagaagcccgtcacaaatgactgtcatctgtgacgggcaccaaccagaggcccgattgagataagtttaatgcccgtcatagatgacactcttctttgacggtcttttattaaggcccgatagagattacttgtatgtccgtcatggttgattgttttaggaccgttacagatatttgttgcacagtataaatacccccctccacctagtgtaactgtatcccactgttcactattttggtgggaggctgcagggggcgatttttttgtcttttttccaaggaaaacaaaaaattcccaaaagtgatcaaaatggagcaatcaagtgagtaatattaatcattaattgagcaatttcatcacgtcttacttttgcaatactgatcttataagatatgcctctgatttgttttttttattttgtagcaattgatcgaagttgggtgtatgcgaaaaatttgaaacgtcattctacggagtacagaaagggcgtaataaattttatgaacgccgtggaggaggatcggaaaagaagaaacagtgattacatgtgttgtccatgtgtagattgcaagaatgagaatatgtttgatagcggagaggatgtacatggtcatctgatacaacgaggattcatggacggctatacatgttgggtgaagcatggagagctagaattaggaagtggagcagcaacagacagaagtggtgcgcataatcaggaagatgaagatgagcatgacatgtttataccttctccattgggcggtgaaacggttgatgtggattacgatctactgcaagacatattacgtgaccttgaggacccagcccagaacgagagagattccatgaagttcagtaggttggtcagtgattccgagacgcctctgtatgctggatgcaaagcaaatcacactaagttgtcagttaccttggacctaatgaagctgaaggcaagtagtggattgacagacaaaagtttcacagatcttttaggaattttgaaggctatgcttcctgctgagaacacattgcccgagacgacatacgaagcaaagcaggttttgtgtccactggggttagaggtccgtagaattcacgcttgtccaaatgactgcatattgtaacacaagcaatatgcggacttggatgcttgtcctgtctgcaaggcttcttgatacaagtgaaagaaaagtgctgacgaaggaaagaagtcaaagaggggtggtccggcaaaggttgtgtggtatctacctatcattgatcgtttcaagagaatctttgccaacccgaacgaagcgaagttagtacattggcacgccacggagagaaggaatgacggtatgcttagacacccagtggattcgattgaatggaggaatatcgatcgaaaatacaaagactttgctgccgaccctagaaacatgaggatatgtctgtgtacggatggcatgaatcctttcggtgacatgagtagtactcacagcacttggccagttcttattgcgaactataacctcccgccatggttatgctttaaacggaaatatattatgttgtacttgttaatccaaggtccgaggcaacccggcaatgatatcgatgtattcctagaacctgttatcaatgatcttgagattctttggaaagaagatgtggaaacttgggatgcatatggtcaggagaacttcaagctaagagttctattgttctgcaccattaatgactaccctgcactcggtaatctttccggacaaactataaaaggaaagaaggcatgctccgattgcaaggaacatacacgaagccggtggctgaagaaatcacgaaagatggtatacatgggtcatcggaggtggctcctgctacgtcacacatttagaagaaagaagaaaatttttaatggtaagagagaacttcagcctgctcccaaagatttgtccggagatgaggtcaacaatatggttaaggacataagcaatgagtttgggaagaaaagaaaacgtggcaagacaaaggagaagggtatgtggaagaaaaaatccttattttggtggctaccttactggaaagatcttgatgtccgtcattgcattgatctcatgcacgtagaaaagaatgtgtgtgagagtttggttggcctgatgttgaatattcctgggaagataaaggacgggttgaacacgcaccttgatctacaggacatgaatattcgtagtgaactccaacccatatgagatgcagagacaggtagagtagatattctacataaaagggtgggatacgccgatgaaccatttgtacttgcaaaacaggtcgagtagatattctacataaaagacccttcaaacaagaagatgcacatcgtgagggatggcaagcgccgaattgtaggagttgacaacgtcgtcgatgaagaagaatacaaccagaatcttcatgtaagacctcacattgaccttgacgatgatccccaagagcctgcggcatatgctcgttcagatcatacggaaggtataaccttgtgaccgatgcatttgtacttatctattgtaatgaatgaagtattttgttttattacaaagacttgatatgtgtactcatttatatggctaattttgttttattacaaatgttgtttaaatatttcaaatattcaaattgaatttcatgctattgggaatatagttatacataaaagtaaccaaaataaaagttgtagatcttgaaaggctctacgactttgctgtttatggcttttccatttgaaatcatttaatatttacaaatgccgtttaaatttgtcatatattcaaattcaatttcaaactattgggaaaaaagttatatagaaaaatgaccaaaataaaagttgtagatcttgaaaggctctacaagtttgttgttgaccatatttatatttgaaatcatttactatcctaaaatgtgttatgactaataaaataaattattacacaccagctatatattttgcactcacaaatacaaatactttaaatggaaaaaatggaaaaatagtcatcggtgatgggccttagtttaagcctgatagagattaatctatctctatcgggcattaccgtagggcccgtcactgatgactcatcggtgacggggtgcatactaatgcccgattgagatgacaatcaggcccgtcactga

SEQ ID NO: 14215 - DNA, 3986 bp, Oryza sativa
tcaaattcaatttcaggctgttggaaacaaagttatagagacaaatgaccaaaataaaagttgtagatcttgatgagaggatcaacttttttgttatgcctttctcatttgaaatcatttactatttacaaaagctgttttaatttgtcatattttcaaaatcaattttaagctgttggaaacaaagttatatagacaaatgaccaaaataaaagttgtagctcttgaaaggctctacaattttgttgttgaccatatttcaatttcaaatcatttactatctgaaaatgtattatgactaataaattgaattattatatagcagctatatattttgcactcacaaatataaagaattgatgggaaaaatggaaaatagtcatcggtgacgggccttagtttaagcccgatagagattaatctatctttatcgtgcattgtcgagggcccgtcgaagatgagtcatccgtgacgggcctaaatgtcatctcaatcgggcattagtatggagcccgtcaccgatgagtcatctgtgatgggccctacggcaatgcccgattgagatgactcatcactatactataactagggtttctcagatcggatctaaaatttttctaagtcccgctacagttcccgcctccttagaaccctagcaccgccgtcgtcctccattgccgagcccgccgccgtcgccatcgagcccgcggtcaccgccatcgagcctcctccgccctccattcgaactgccgccgcctcctcaccgacaacccccaccgagcccggtgacatccttcctcatcgtcgtcgcctcctcctctccgacgaccgacgccacctccaccgagcacgccgccgcctccaccgaccccggcaacgccctctaccgagcccggcgccgccgccatcgagactatccgccgccgccaactcctccttcgccgactcctccctcgctgagcccgaggccgccgcctccaccgagcctccgacgcccgatgccgcctccaccgagcctggcgcagccaccaacgacctcggcgacgccctccaccgagcccgccgccgccaccgagcctgccgcctccaccgagcccggcgccgatgcccaggtgagtcctccatcgcgcatgaatgatgaatagatgaatgtggttcgattgatgaatgtgatgaataaatgattagatgaatgtgtttgaatacttgcatgtgtatggatagatgaatgtggatgaatagatgattagagaggaatgtggatgaatagatgaaatatttaatttatttatatgtgatattcaattcattttacatgtggatgaatagatgattagatgaatgtgtttgaatagatgaatgtttatggatagatgaatgtggatgaatagatgattagaaatggatgtggatgaatagatgaatagatgaaatgtttaatttatttatatgtgatattcaattcagtttattagatttgtgagacgtgcaatttagtttatttatgtgaataagtgattttagaactttggattctaagccattgaagcattgaattctgtattttcgttattttgaaaaaaaagtagacgatgtctcagcaaggcgaaccaatgtcgacgacaactagtgggtcctcaagggcacgtactcctaggacagggaacaaaatccctaaggaacggttccgcataacgacagtgaaccaagtagggttgccgacaggtccaaggaaaatattgagccgatttaggtctatctgcggggtcatagggaggcagaaattaagtattctgcaagatgacattaagcaagtgccggccgcagagaaggatagtgcttggctagcgttcaaggagagcttcgattatcctgtagagcacgagaaccttatcaggcaggctgcttttaaggtcatgggcaacgcttggaagaacttcaagagtaagctagtcggcgagttcgtcttcaacccggcgaatcctgatccaacagagaaatttccttggatcacggaacaggtctgggaggaattccatgtgaagaagtcgacccccgagtccatagctagaagcgaggcatatcgcttgcttcagagcaagaaccagcatccgcaccggcttggcaccgccggatatgccggtaaggaagaggaatggcagcatgaggatgaagaagcggaggaatcgaacacaccgctcgtgtttggcgatatcccacaccctcgggctaggaactgggccagggccaggtaccagaagaatgctgatggcacaatcttcatgccaaatgcagaagatcaacgagtgtacgaagctatagtaagtgtctagtcaaactagatgttcgcattgtttcccatcttgcagtttatttaaccccactaaattgtaatgcagaaggaattggttgtcgagcaacaagcctcgcaagaggccagctctcaaagacgtgaggatgacctcctcacgaaagcgttgggcaacaaggaacaccgtggacggacacggggagttgggtcctccgttccctggaagtatagatttccagactacgcgtggcagtacaagaaacgaacttccatcaaggcagagaaagatgcacgccttgaagccaagatccgggcgtcgatcagagcgaagctgacatctgaattcgacgaaaagctcaagtcgatgagggcaaatattaggcaagagatccgagaagagcaacagaacccgcaggccgccgctgctgctgcgcatgaagagttaggaagtcccacccaaaaacgcagcagttgcgcatcaactgagttggcggaaaatccaacatcggtcgacagcgccgtcgaccacacaatggtaaaagtttcgtacacaatgcatgaaagggttaaccaaatccatatgatatataataatctaaagaaattgatgaatctatcgcaggaaccaaccagctacacctgcacaggtagggtgattgcgaactttacggtttcaagaggccgaggaccttggttccagccgaccccagagacaagagtgcgtgactgtgcaaaagttcaagtagactcggttaagcccaaatacgagctgttcccactgaggtacccaccgaacgacgaggtcctctcactaggaaatgcccgtggtacctcatccaatggcccaaggacctcattgagataagggttacagcgagtccaaccactgcaccaggcggtcgtccgccaaagagacccgcctttgctccttcagcccctcctgctcaagatcgtcctgcacaatcttacgatgacattaatatagtacaagcccggtgacatcccacaccctcggtaagaacgcatatgattggaccccaattcaactagcgatagatgaagcgtagacccaatacgtgcaaagaggaggcctcaggaagacaggacatgacaccctcatccacaaaaaagacttcccggtgaagcaacaaataggtgaccagtgcggattccatgtgtgccacaacatgcgccttctgtacagagaaaaggtgaagactttggctgagtttgaggtcggtggtctcaattgtgatagactaactacattttagtacttatatatgatcgatcaactaatctggaattatgacaatgtagggcacaataaccaagtctctgcctaccagctttgaggagattcgcgaggagatagccagcttcatcctccgcgaaataattaaccccaaaggaatgtttaggcttaaactaaaatgatgagcaatgttgaacttttatgtctagagaatgatgaacacttattatgcaactgtgatgatgtaactgtgatgcttatatttatgtatatatttcatatgtttatgttaagacttgctaaataaatatttgatccaattaactcggttttgcaggtgaaatacgataaatatttgaatggatgtgaaatatgtgaatggatatgaaatatgagatggttgtgaatgtgtggttgtgt

SEQ ID NO: 14216 - DNA, 637 bp, Oryza sativa
tctgccgccaccttcaccacgcgccgccgcctcgcgccccgagccaccgcgggccgtcgccatcgtcgcctgccgccgcgccgccgtcgccatcgccgcctgtcgccgtcgccatcccatcgccgctgccgcgccgtcgccgtcgcgtcccgcctcgcgccgcgcgtgcgtcccatcaccgcctcgcgcccagagccaccgcgcgccgtcgccatcgtcgcctgccgccgcgccaccgtcgccatcgccgcctgtcgccgtcgccatctcattgccgttgccgcgccgtcgccgtcgcgtcccgcctcgcgccgcgcgtgcgtaccatcgccgcctcgcgccgcgcgccaccactgccgcgccgtcgccgtcgccatcccgtcgccgcgtgcgcgttccatcgccgcctcgagccgtgccgctgccgcgccgtgcgccgtcccgtcgcctcgcgccgcgcatccgctgcctcgcgcccagcgccgctgccacgtgccgcgccgccttgcgccctgagccgcgccgcgccgtcgtcatctccgcccgcgcgccgcgcgccgtcacatcgccgccgtcgcctcacccccctccaccgcccttcccttctcttccctctcccccttatcctctctttccc

SEQ ID NO: 14217 - DNA, 672 bp, Oryza sativa
ataggctgaggaggctgtgtattcaccgtggttgtttagcttccaagtgatctagtcttcttgatccgtaaattgcacacttcgaatggcgctccaaacggcaatgacttggtcgattagctccgttgtccacccttcggttgttggtagagcaaggtcaagcagccattggtccatctgagcggcctgttggagagtcctgctcttttttctggaggctacgtagactagtggtgcgacatcctttagtcttctcccctatagccaagccaagtcccagaaacttgcttttgctccgtcgccaacttgtattgttgttgcagcagcaaacaacagcatgtctgtttcatcgcaaggcgtttctaaccccacccaagccttttctggtgacttccattcgtgctagagccatttcagacggagggcccttgcaaatttcttgagatttaggatgccaagccctctcgaggcagtaggtaggcaggtacgcgtccaatttaccttgcacttcccccagtgacggtttcattcccaacccacagaaattgccttcgttgtttgtccagaatttcaagggattccttagatgctttcaagcccgtcagcaagaagattggttgggacgtaaggacgacttttaccaaggttgatcgacctgcgagaccaacatgc

SEQ ID NO: 14218 - DNA, 599 bp, Oryza sativa
agtaagtgtcaaagaaatcttcgccttctttctgagtatagcccttttcaacaagctgagccttgtacttttcaatagtaccgtcaggcgtaaacttcttcttgaacacccaattgcaccccataggtctacacccatagggtcgctctgttacctcccaagtcccgttagcgataatggaatccatttcactacggacaacctccttccagtagtctgcatcaggagatgcatatgcttctgaaattgactgcggagtgtcattcacgaggtacacagtgaaatcatcaccaaaagacttagccatcctttatctctcactcctccgacgagcttcactgccatcctccttaatgacatgttcatgtgtatgttcattttgttctggtggtgtgattgaactgggaattatttcagagggttggctagaagtactatgtgtatccttcattggaaaaaaaagctctcaaagaaggtagcgtcacgagacaccataactgtaccaacatgcataaaatgtacctcagatttaactattaaaaatctataggcagtactgtgatgagcatatcccaggaagacactgccacagtcttagg

SEQ ID NO: 14219 - DNA, 739 bp, Oryza sativa
gacaggaatacacttatctagacactagcacagagaattccaaacgagcaaatataatcttttactaagcatttgcatttctaaagaaaggtatgttgcagtgtaatcactagcataatttgtgtagttcgcactaattccctgccccttccaagaagaatacttaacagcagttgagagtctaaaggccagttatgtttccagatcataaacaagagcttaaactttaaacacatcgggagagattgtgtgcgccaaagaagcttaagagaaaaaaaacgttgaacaagcatgctaagtgaagctaatgtaaactactatacagaaaatgggagctcctgaaagcattagtatacttttttaatgtaactgatttcatatgtttaacagatgaaagttggcattgacttttgtaacaacctgaacgctggaaagcatcccacataatgtcttcgtgctcttggatgccaaagagacacaagggtgcagcttggatgccaaatacttgccatagtaactatccggtattgctttggcgcaaaaagtcctgcaacaatagagtattagagatactggcatacccagaagaaagaacagaacaagaaattcaacataaacccctttgaagagaccttcggatgcatatatagccagaatctaattccctgccatagattgcaagaaccaagcttcgcacacatacaatcttccattggcagccaacactgtagttttaaga

SEQ ID NO: 14220 - DNA, 10753 bp, Oryza sativa
tgttattaatgcaaatcctatgataagcctgtacttattcttaggtttatagatgtttctactacaaaaggtattattgttgttaaaactgaactacaagcttgaatggcaaatatatatttaaaatgttagactccttattcatattgtgtgataatgtatatgttaggaggactcaaagccaggacagagccgcagaggctcctgagctcatgatgcttaattttcggacaactaatatctcaaaaaaaaaattcctgtgagaagctgacatctcaattgatgttctttctactgtgaatacaagttaatagtttcatgatttaaaaatgagcatatatatggttgaggaaagaaaaaactaactacatttagcaaggtatgtggttcacactttatagatgaatactttttattgcgtgatgggaaataagtactcatgctttataccttattcagaaccgagagaaatcaagcctgaatgccactgacttggtttgttaccaaatctagaagaacaactttgattaaagaccaggttggcgtaatctcaggtgaactgaccatggagggctgaaagcagtgatcaatagtttaaacacattttctgcaatggtaaagcaaacattaagaggaagaatgctgaaagggaaggaagacagtgataacttgaaaggcactatctccaactggtccagttccttatattaattcatactactccaggttatggactgaatctgaatcttccaaggaaaaatcatcaatggagacatagtattactgcatttcttcttggacttggccaggagcattcttttcagcatgttcttcttggacttggccaggagcattcttttcagcatgttgttcccctaaattctgaagaagtacgttattctcatgctgcatattattcttttcagcatgttgttcccctaaattcaagaagtacattattctcatgctgcatatttggtatctccatatgcaaatcctcaatttgctaccacaaaatgggtaaatcctcatccataggaagaacatcagtgaactcccaattaagcacagaagtgtgcagagtccatgactctccattacctcccatattaacaggattttccataacaattcttctaggcacttcactagggtctgtataaagacattttgccagaactctgccaagaatactatctctttgatgccaatggattaacttcccagaactctgccaagaacactattttgtgatgccaatgtataaacttcccaaaagcgtttacaatcctatgaatgtgagtctcatttatgtaatccgaaggaatccctaaaatcattatccaactctcctgattgaagggacagtttctccgataggctaaattatcaggtcttataaagtgtgcttggaaagcccctttatttagcatcaaatgctggccggctatcaaagtatccctgtgcaattcagaaggaacttagatcagacataaaaagtggaaacctgagggcgcagaggacatgcatgttgaactgattgttgatggcgtgcaccacttgatggatcagttgcaacattttatatatgtaacaagatccacctcaaccgtaattctgaatagacttaatgtttgttatacaatgtataatttccaactaaacaatttaaataccattattgtgagtaactaaacatcaattttacaccaggtgggactagggccccagtcaattttataccgagcgggatagggggtcttagcgcccagttacatcgagcgggtacaagatcatagaatattcaagttgctactgatgtagtctatgtcctattaaagaaagttatactctctaatagaatttttttgtgtatcttaactttggtcttgagagtagtataatatgtcgatagtttacagggataagtaaaaaatatagctgttttctcccacctatcgacccactcaaacttggtatagaggctagatcttgaaaacaaatatgaaaaaaacggttcaacttagatgagcattgggccaaaccataattatagctatattttgttagcttctcttcttgtgtggcaaatcttcaagataactttgttactttctttgacacattagtagcgataagtgtttctttgacacattagtagcgataagtgacataacattcttgtttagtaaccagttataaatgtcataaaactagttcacaagtatagataatatgttcattgcatgtaggatactaaattgaatattttcactaaaaattgcaattctaagactacaaaagttgtaataaaaaaattcaaatacttctcagatgactggaaacaatattagacaataacaatataagactggatacaaatataatataagacatgtttcctcgactggatacactaacaatacacaaatacaaatacaaatacaaatgtaaatagtttttcgtcataaataaaatatttttcaacagacagtgaagtgagggaaataatgtattcatttgttgtttcatagaatgctaatggtaaaggattacaactgaccatgtttatgtagaaaaaatatctcaacactaatatgacttgtttcttgaaattaggtgtgtaagccgtgtaaacagtttatgtgtcatctagacaaatgctttctatagtagctttgcaaatacactactttttagaagtacaataataaattttgtctagcaaacatgttccagtatagtctctaaacatatcaagtgaatcaggacattcgtaaaaaataatgtgatatttgttactgcggcatgacaaccatgagggccacgacatggtaacgcgatgcacctacagatgaatgtgctgcaatcctgtggctgtgacaacagctgcatgcagtaatcaagattatgtttttgtatcgtgaatagagatggcaacggtgaattcaccgtcgggggtcatgcccgcgtccccgccaccgcggtgaaaatatttcaccgtccccgtccccgtcaaccacgacggggctataatttctccagccccgatcaccacgcggtgaatttttccccgtggtgaacccgtccccggttaaacaatatattcacagtcacagattgtagtatactcaccttgcatcgtcgctattgtagctttaggggggaggtggctgaaggccgaagccatggtcggcagatggcggcggcgacggcagttcccattggcgcggcgacggcgactcccggcggcacggcgacgacggctcccattgaagatggctgcaggctggcggcgcatcgacggagcctgccggccgctcctggtgaagatggcttcaggcgtcgcgcggcccggcggcgcgtcgacgaaggcggccggcgacggcagcttcagtctcccggcgagaaggcagcgagtggcggtgcgcgtggtggctggcgaacggcgccggaggtggctggcgaacggcggcgcgcgcggctcccggcggactggcgaccggcgacgcacgtgactcggtcgggtggctggtgtggatctggatctggatgggtggaaaatttggagtttgacctgttgacttagggttagattatatatgtgtctgttaaatgggcttcaatattatgggccaatacatctaaaaagtctataattcctcccttgtacagtacagtcgggtcaccgtccccgcccccgtcatcccgatggtgagaggtttttaaccattttattccccatggtgagtagatattaaccatccccgtcacgtaataggtgaattcactgcggggaaacggtgaacgggccccattttcatctctaatcgtgaatggactaacaccaccatcatgtgcatgatttcctctgcaacaagccccagttttgccgtcactttccatcacgacgtgttgttttcaaccattagatagcttaattaagctctaattaacaatccactagtagtttcatattaaaaaaaaaacaatctatataagtcctccctccgtcctaaaaagactcaattcctggggtttttatgtctaacgtttgaccgtccgtcttatatgaaatttttttatgattaatattttcatattgttagatgataaaacatgaataatacttatgcatgatttatctttttatttttgtcataactttttcaaataaaacgaacggttaaacattagacacggaagcctaaaaattgatttttttttttacggagagagttgcacctttttcgtgagtccaatgaaccgtcagcatgcagagatccgtatccaaacgacccctagctactcaatttttaattatttcgagaattctgcccatggtttgctggcaaatcaaatcgcctcgaaagaaaaaaaaagtcatgctgaaaggatcataaggattagaaaaattaccatggaaaaccgagagtacatgtacatacagacggccccggtaaagaaagcggcggatgagtcgaccgacgacgccaggcggaaaaccagcggatcgtctgctgtttgtttctcgtcaaaccagcggcaacgtcccacaacatctgcgcgcgtggaacctggttctgctggcccttttgcaccatgcgccttcgcctttctgtatatcgcgtggtcccgtttctcgtggtctttcttctctatttttttcttaactccactacacttagtactaacagaacagagagtagtatatattcagtccttttcacttagggcttatttagggagcttaaaattctgagaaacatttgttgagaagctagctgatgagaatttagagaagctgggagcttattttccagattctataactacagattctcaaaatctgggtaaaaagctagattgtttggaaagcttctggcaactgaagattttagaagaagctgcagctgctataagctcccccaaacagactcttaataagttgtattacctcctcttcttttatattattcattttataaatcattttattctttaagtcaaaatttttactaaatttatataaaaaatataacaatatttttaacatcagaaaaaaatatcataactacatttttcttttctaaataaaaattttagtaaatttataaaaaatataacaatatttttaacaccagacaaaaaaactatcaaaacatgtttaatgttagaagtaataaaactaatttagtgatataagtattgctatttgtttataaacttgataaaactttaaaaaagtttgaaaaaaagatttgtagtatgaaatggaggaagtatatggtacattggatatgtgtatgacgtcgatattacggataattgttgtacgattgtgtgaataccttaatctgaccaaaatttgttctgagctcatattctcagcgcatcctatttatacttgtatactcccattccggtatatgagattctactaaaatttagtccctttggttccatatacttgtcattggttacttttgtttttttaactttgacaactcgtttttttctgacaaaatgagaaaaacatattgtaccacacaaacaaaagaaatataactttcactaatcatacattaatcgtttaaacgctagtactgatcaaagctgaaacagtagtgacaagtaaatgaggatggaagtagcctaaaatcggatcagggatgatcggataccacatttcccacatttcccatatctgaactcatttttattgcggaatcaccaaattaggtcagggcatagatactatcaaaaatggatagaaatataaatattatcggcaacaaacatgaaagtttcatactcaagatagatatggataatatctattacaaatacttaattgggtatcaagtcaaagcaataacattatataccacatttgtaatagccatttatccattccatatatccaaaaatacaaccatattaagatggaagtatagtggcaatggttgttggagggtccgttgcttggcaatggaaatctcgccctcgctgagcccaaatatcgattgacaaagagacaaatcattttataaggacaaagtgcaacattactcgtgttatggtgtacaacctataataacaccttaatcgagggatcgaaacgtaattacgtaaagcaaacccctccgcggcgccgcgcctcgtttgtttatataaacagcagcatattaacctgcgaaaccagtcagccgtctgtctcatcgatcgattgattcctcgtgtctccgtatattcgatcaccgcgattcatccttcttgcaggtaaagattctacgaggttttgacgaagttgattgtttcttttgattctcgcaagaaaagatgcgcccttttttttcccttttcctgttcttttctggccattcctcggtcagtcgttctgtccccgagagctgctttcttgggggcattcagttgttgctggggccgggatgggcgcacggggtgggtgggggcaatggccgtcggcgtgccgagcggaggagcggcgggagcgacgtcggcgtttcgtcgaacacttggcgggcgtccaggactccgggtggcgtatggcctggttggtggtagccagggcccaggggtttaggtcggtttcacagcaaactgcaggttgggttaggatggtgagattttcagaatcttttcgaggagaggagttgacagagtctgaaagttcagaactgaaacctgaagagaaaatcgggtcctgactcctgacaggagtgcaaaatgggcgtgtaggtgcaggctattctatttcttcctgttttgttcttttgctcacttcttcacatcgaggtcgaatcaacaacaattttaagcttttgtttcttttagtttctgacatggtccttgttttctcttcagaagaaagaatcatggcatgtgctgcttcgagtgtaaaaggttctctcaacgttggaggagctaaggcattcagcaataatttgtttcgtgattacttgaaatcttcggtgtcttatcccgtttcagagatttcttctcccatcagagcgcaacatgtagcatatggttcgaatctcattgttaggggttctaagagcagggactttagctcgaagctcgcatcgacaaacggcagctcgaagatttctggtatgatactcctggagaaatttaatttcatattcgtgtatgctatcacttttcaaacacttttcttgcattttaaaatttgctagatatggtttatgaggaaatttcaaatttacctgatgccctgatgcattcagagggttgacaaattacttaagcaaaagttcttttttttttcaaattgtcatttaaattttatatgttcgtttgtcacatttttaaatgctagatatggtttatgaggaaatttcaaattaacctgatgccctgatggctgatgcactctgagggttgacaaattacttgagcaaaagcacttcttttcagacaaattaacaacagaaaagcctgttaattaaattatatatattgctttgttacagaagagagggtaactgtattggtcattggtggaggaggaagggagcatgctctttgttatgccttggagcgctctccatcctgtgatgcagtcttctgtgcccctggtaactctggcattgctcaatctggagatgctacatgtataccggacctggacatatcgaacagcgacgcggtcatctcgttctgtcgcaactggggagtcgggttggttgtagttgggcctgaagcaccccttgttgctggccttgcaaatgagcttgtcaaagctgggatacctacttttggtccttcatcagaggctgcagcgttagaagggtcaaaagacttcatgaagaagttgtgtgataagtaccacattcccaccgcaaaggtactttctctttaattttgtggatttctataacatattttctcacttggatgaacttgtttgagagatgatttattcatttgctttgaaatataacacaagtataatctgaataagaaacacatattcttgtttgtcttggtatatggtttctaatttctattgttattttctaatacttaaactatatttatgttttaattattagattctgagtcccaaatacacatatacttgttacttgttgctattcatatatatacatccttattcctcacttaatgatctctattactgtttgttttcatatcaagttccatgtgcaggattaatgagccattttagctattgtaattgttaagaaattttatcactgtttaactaagtcggttctactgcacagtaccaatctttcacagatccttcagatgctaagaaatatgttgaggagcaaggagcccctattgttgttaaagccgatggattggcagctgggaaaggtgtagttgttgctatgactttggaaaaggcatttgaagcaatagactctatgctggttgaaggttcattcggttctgctgggtcacgggtaatagttgaagaatatttagagggggaggaggtttctttctttgctctagtggatggagaaactgctttgcctcttgaatcagcccaggaccataaaagagttggtgatggcgatgttggtccaaatacaggtggtatgggtgcatactcccctgcaccaatagtgacggaaaaactcaagtgcaaagtgatggagagcatcattgtcccgactgttaaaggtatggcaactgaaggatgcaagttcgtcggtgtgttgtatgctgggatcatgattgagaagaaatcgggactgccaaagcttattgaatacaatgtgcgatttggtgatccagaatgtcaggttggtaatcctttatatatgacgttagcttttgaacataaatcatcctaatttgcagttttgcatgctgcaatttagctttagaaacagatactgtcgttatgatgttattttaacttcttcacaagcagtggcggagctagtaatttaaccttgtggggtcgattaataccagtttatatttaagtggggtcatttttctaagttttctggatttatatataaaaatcaaggtttttaaagggggtttttaaaaacctgtggggtcagacaaccccagaggatatgtatggatctgccactgttcacaagcaacatttgatgaaaggatgctcttttagaggcacaaaaatagccaacatgaagatagcatatttcatatttatatttgaaatttattattacagaacatcacagtccagctcatattgggatgatttctattgcttgtttttctcctctggacaatatctgcagtgcagatgtgcaattacaatagcatatttttcatcctttaatatgtacttcctctgtcccaaaatgaagacatttttgaggttggcacgggtattaagaaagtaggtgagaatgattggaggaagtgtgtgattggttgaaaagagaaagtaggtgaagaagaatggttgtgattggttgagaggaggaggtaggtgaagaaatagcttcattttgggacaagacactgtgctagaaatagctacattttgggacggagggaatattggcatagaaggttgcaatgttgggatttaaagcctaagagtagttcaaacttgtcccataaaaaaagggagggaaatttggacttgcattacaggtgctttaaaagtgagtttaattcaaaggccctcacattttgcattgtcaaaattgagctcccacaaaacaaacataagtcgaggaaatgcttgaaactacagtttgaatatggaactcatatactgtttcatttcactttgtcattaggtactgtgtgcagaacaccagtacttgcatgtgcagattttaagggagctactgattacatctcaaactgaaagacaaaattgcatcctagttaagcagcattgtgcttatagtggaggaatttcaatatttactgtttaattttgtttttgaaataatctagctgtattgttagcctgttcatgtcatcattctaacaatacattttccttttttcccaggttctgatgatgcggttacaatccgacctcgcacaggtcttgcttgctgcatgtaggggagaactggggtcagtctcactaacctggtcgcctgaattggcaactgtggttgtgatggcaagtgaaggttaccctggtgtttacaagaaggggacagtaataaaaaatatcgatgaagctgagcaggtctctcctgcagttaagatctttcatgctggaactgccctagatcgagatggaaacttcgtcgcggcaggaggccgtgttcttggtgtaaccgcgaaaggtaaggacattgaggaagcaagggcaaaagcatatgacgctctcgacgttgtcgactggccagaaggatttttcaggcatgacattggttggagagcacagaaatatcggcgcatggttgcacactgataggcatgtactgtaaatctgtaactatgttatgtttgtgatgttaatgggaatacagcgacaggggaatgggcataatatttaagtagtggatgcatggagatggaagtaattggcagcttggattagttccttgatcgaggaacacgttcttctcatcactagtttctttttggtagtacatgtgtttatattttcaccttctgtattgtaataagaactggtgtggaccaatgatgaatgcaacttgcttatcaatatactccctcccttttttaatagatggcgccgttgactttttct

SEQ ID NO: 14221 - DNA, 3776 bp, Oryza sativa
cactgcaacaggagcttcttggggtgctattatccattcctgcaatagcggatgccgacgagctgagacgaagcaacaacacgttaaggtcagcagcatctcccgcccgttgccatctcttccgcccccaactgtcgctcccatccccccccaccgtcgctcccagccaccacggtcgctcccaccccccaccgctgctctagttgtcgccactggcctaaggggaagagaaaggagagagaaagagaaagagagataaggggaagagggagagagagaggaggaagaaggagaggagagatgatgacatgttggacccacatgttagtgggtcccacgatgtttttgtgtgaataataaatgagtcccacacatatttttttaattctaacgtcaaataagcgccacgtcaacgccatatcgacaaagaccatatcaacacctccacgtaggtgccacatcagcaaaaccgtcctccaaaaccgttaagggagtcaaattataccggttctaataattgggggtcgagatatctagtaccgtggttcaaggaaacgaatcatattcgccaaccacttaagggagccaaagtgaacttattcctacaagaaagtaacaaacagcacacatcatagaagctcatggaagatatatgggccacaagcccaaacattctgaaaataggcccaagtacccaacaacagaaacctgaaccagaatttatctttgttttttttccctggacaagtctaccagacagcccaatgttattattcccggttagagttaacatgaggagaaagggtagataaatttacaagagaatccgcgaatttcataggagtataaagcaagatattttcataaattgaaatattatcagtccacagaccagtccacacgagcatgcaatgcaagtaaaataacaaacatgatgttggatatattagtcttctctttcacaatggtggttcttgtataatggttttgaggatccttctttgtgaagcttgaaacaggacttcatcaatttgcatctattcatccttgtgcttctaatcatcttcgtctgatccaggttcttcaaaataatacaaaatatcactacccattttttaatatacggcgcagttaacttttttcctgaaactttgactaacaatgtttattcaattacttagttaagtgaagtgaaacaagtacaactaaatctgccatcaaaatcactttaagcatgtcttgtatgtttgtatatttgcacaaatatttctaaaaaagatgaatagtcagccgaattacaaaagtcaattacattatatatttaaaaaaacagccttcttcggaagcatcagaaagatagcagcatctttattcagttattcttactccaactaatgaatctttgaaattctgacatttaatttgcattatcatagccttcttcggaagcacagaaagatccaacgtcagctttcttggtagtggtagctgaaataaacatcaaactgtgcacctatgacatttatataatgttccaagagcaaaacaaattatagatacgatagatacctctctgatggcatcagtcatgatggttcttccaatacctttaccgtgtgactaccacgtctaagaaaaaccacttaaccagtatacaattcaaaaatcttcaacaaagcatgttagcagaaatagtttcacatggaagcatttagttcccattcttttttctagtcatttagcatttatttcaactcatggtgatgacagaaatagctgcatcacagcacatgtcataatagaaaaaaagggaaaaaaaatgaaaagatatgtttcctcattgttttggtaaacgaattgaaataggtcatcgtaagtgctgaataaccttcaaaaaatactactagtaatcagtaagatgtcacattatcatatttttcaagtgctttttagtgtctttatccctcttcatgccatttgtagttatgattttaattgtaactaacattatgtaaattcttattttagattcatgtggcaaccatagaaatgacaactgcaatctgcattcttagatttctactgttggtacaatttgccactggattatctacagatttatagagtttgaactgtgaaggcaaaaactataaatcaaacaacatatacagagagaacattgactttttattgagaacattacctctgaaagtatcagctagtgatactctgtttgccaaggtcatcaccaactcaactaaagagcaggtgtatacacagtgtcgtggcgacactgatattagtacctgtaagaggtgtatcaccaaggccattaaggacatacaacaagtatattcttcaaagagggatagtatagcattttacaacttttgccacctcggaatttctggaaaagattttaagtttgatattcaacatgacatggaaaatatagctttataggacaaccctggttatatcagtcagggcaggtcgtttagtgagacagtcatgttatttgttgatgatgtggcaagaaagataacagacctatcaaaaagatttgctacaggacgagagaaggtcctagggaatgaatataactacaccatattcggcctcgcacagtgctcacctgagttaaacagtttagagtgcaagatttgtttggagatctagcctctagttcgcattttagtatgtcaacaggtgggacaagagcaacaatatggtgtaacttgcgttatgagggatatcctttcttcacgggccctccaatgttggaccaactcatctatcaagctacagtcaagcctaaaggtatgagatgcaaaatttatttatgtttgaaagtttatttatgcatgatactctattgctatacattgattgaaatatttttagtttacattcgttcaaaaggtactaggggccctacaattttgctttcatttttggtaccgaactcactatgtgttatattagactcattccgtgtttaaaagtatgtttatacatgctgatctattgccatacactgattaaactattgttagtttatattggtttgacactatctactaggggccttggtagtataccaaactcaccgtgctttatatttacattcttgtttgtaaatagatgtgttattttcattcttgctaatgaaattgtaatacccattaaattaacaattgacaatcacatgcaggaacaaatcataagaaccatacaactattctaatagtggctatagtggtgccgagcgttgtggtaatcatagtagtcctagcaccactatttcttttgaggaagaaacatgtactgaagaaacgaacaaagctctcgagtaagcacttctaaaagaatgaccaatgatatgtactatatatacttcaatcccaaatagaacttatgagcattgtttcacatataggtgtagaactatctgggagcaaaaatattgaaggctttgttgattctagaggtgaaaaagatgcagaactaactgagagcaaggaaattgaaggctttggtgattctggagatgaaaatgatgcagaactaactaggagcaaacagattggagactttggtgattctggaggtgaaaaagacgcagatccaactaggagtaaagagagaaggtcctagggagtaaatataactacaccatattcggcctcgcacagttctcgcctgagttaaacagttcagagtgcaagattttctaaggctgatcttgtacccgctcaatgtaactagaggggtgc

SEQ ID NO: 14222 - DNA, 4751 bp, Oryza sativa
tacataaaatttttgaataagacgaatggtcaaacatgtgagaaaaagtcaacgtcatcatctattaaaaaatgaagggagtattttgatattgaagaacatatccatttatatttttcctattatatttagatatagtaaggctctaataatgataaatctcaaggacaaagcaaatcatttatttataactcttttgacaatgcatctatataatttagccacctttgacaataagagtcaatggcaaatctaggataaaaatagaggtgatgctaatactacataacgcaaaaattattggaaattgtatttcctgaaaaatatggtcttaaatatccgtgcttcgttttgaaaaaaaaaaaaacgttcgtcttgttgaattattcaattcgatgtgccatgcatgcacagctcaacgaagtaatgctgaaaaaggaaaacaagagctcctggtagatgataatatctgtttgttctcactggtttgctaatcgagctgtgtttaattatcagaagatagatgggggcacgaagcacaccgtagaactatagaggagttatgagttatctcctcctagccgctgcctgtttcaatgtatcttttctgactgtcctaatgttccctacaagccttgagcttacgggcggatacttgggaccgcaagctggacctggggcttttgcgccccaagcccaatagtgaattcccccctgatgggctgtaaaaataacatagaatattttttactctagagacactttagtgatacttttagtatatttcgttaaatttatcttgtagagtcgtcattttaactctttaaaaatgcatcatatgtagatatattttcttaagacatttaaacctgtgtagagctacttttaaaattattaatatatacgtagtaactagttataaaacacaaagacaaggcacatatgttcaactgataatatgagatgagatggctcgtacgtgggaaatatgtgttttttaaggtaaaaagagatcttgtattaatgattaaacatagggttacattcttgcactactacataactcattttcccgtgcaggcatatacatttttccgtgtggtcgtttggtcctcctgcacccagttatttgcgaaaatcagtattttcgcgtgtgggcggaacgattatcccgtgtggtcatattataccacccgcacagaataaaaaaaccaaaaataaaaaaaaaacaaaaatcgccgtcgacccgtcggcccgcgtgcaaccggccgccgcaactcatcgtcgcgccgccgcacgcacgaacacaccaggccgccaccgctgcggccagctaggctgccccggtcgtcgcctcaaccagccacggccgcccggtagccgccgcgaccagccacgaccacccggtcgcgtcattgttgagcccgcccgccgccgctcctcaccgctgtgggggacggccaccgctgctgtcgccgccacagtcgtgccggttgctgccgccgccagatctatgcgggggacggccactgccgccagatccgggcatgtgggggccagttgccgtcgcccctcgtcgccgcctcgactggtcgccgccgcgcccactctccgctgcctcgcctcatcgacagcgaaagtcaggagagccggagaggagaggagtgaaagtagggagaggagaggagaggaagtgagagagatagaggggtaaagtgaaaataaaaaggaagagagagagaggaggtgtgaaaattttgaacgcccgcagaggataatgcattttcccgtgcgggcgacagcccggcgccagttcccctattttcccgtgaggttccacttacggaccgcatggaaacagaagggggcggcgtccagaagaatctatctggtagtagtgttggttcaataaattgattatctcaggagcactgctgatagttattaagtaccaattttgaccgccaactagcacaatgaataaagggaaaatatacatttcttacatgtatatcaataacaaataatgtagttgtattaggattagagaattaacatagatctagggattatagatcaaagtgaaggaaaatgaagtcattatgcaaagaaacacacttcgggcgaatcacgtgcgagcatgaggattgatgggcccacaagtcagtgcaaaccgacataaaatggggccaaaccaccaagaaccgtcattggggcccacatgtcatcctctcatcaaaggcagtggcaaatggcggtggccatggttcggctgatccaggctttgcgcccctagcaccgagcttccacgtgacgactcctccttcactcctgatggcggttatgcctgtttcccagtatacaactgacttaactaccgtcattaggaggctataaaaggaggagcctacttcaccattgttatggcttagcgacatattttttttggctggaaggtatgcatctttcttactttattttccattaattcttcttttgtattatcaattatttcttgaagaagcgaaaaatcggtgtatgtaaagttgcttagtattattcacctcttacttgagacttgtccgagcagtcagctccctagctagcacaatctaattccttgcttttccacaattgaaggggaacctacaatatatctatctattatatactaaaagcccattaaacttcctagaaacgcttcaaaccgccatgtgtcaccctacaaacgttcctaagtcaccatgtggcactctaataatttataaaaaaaatctagaaaaagaaaaacatctaaccgtcagtttacatttaaaacggtggacctgataatactaaccattagatcaaaactaaagcccctacacccttcccttctggccggccccacacatgtgtacgtacgtacaaatcctccgtatgcacgatctatccaattcctccccgtcattctcttttttccctaattaaagcagttcaaagatatacaccataatttgttaccataaatgattatatcagtttatccatggacttttagcaaggtagtgagcgtgcaatcactagctgtttatatacaggagcggtctcaatcctactgtaaataaataattatttttaggtgtctcatatttatgggaaaaaagaacatgtttgaaatatgagtttaaggatgagttgtcaattatataagatagcataatggtgacccattatatgtatacgtttctattttcctcacactatctttattttctagctaacggttttatacataaacatcaataattagattgttaaaaatttatgaatttttaactactcaatttgtagtttgatcaatattgaccatgccttgatatataataaatacatcatttaaaagccgtatcatgtaagaaccaatggaaattaaagattatttgaaaattgataacatatgtcatgtcaattaaacaacctctccattaatgattatataaaaattaataacatatatcttgtcatcaattaaacaacctccatagtgcttctaagtaatcacgtgtcatggctaataaattattttaaaaatcctaaaatttctaagacaaaagaaaataatgggaacatcgattacatttaaatttctccacataatacatacatacatacatacatacatacatacatacatacatacatacatacatacatacatacatacatacatacatacatacatacatacatacatacatatacatacatacatacatatacatatatacatacatacatatacatatatacatatacatatatacatatacatatatatatatacatatacatatacatatatacatatatatatatatatatatatatatatatatattaaatttgttaggtgctccatagtgtccgggctccatggctatccaccatccaaatgctttaagatccgtgcaacgcactagtagataacatattaatattagcgggtctaacccgataagatattgcatgcacatactttccatatccatttttaaagtattgcgtgcatgtgtttgcaaatttagtatcctcaccaatcatgcgaggcactttccattttctatatccactttttcgaaatattacgtgcaattgtttccaaatttcgtgccctataatcatgcccaccaattataattagcactttgtattttctatcacattttccatacaatgtttgtatgcagatacttacctattgaaacatgattcttgaaaaatgatgacatctaatcatgtccgctaattgcaattattaccttccattttcaaggttactttccattttctatatacatatataaccggcgacggtattccatattttgatttttcttggctatgctggtaggctcacggtcgaagggctatccaccaaacaccactgagctacctcgctgacgacatttgctcgcaagctctgtgatcttcatcgccacgctgtgaagagggcggacgaccccaagcttgtttgtcgctgccgcagcagtacgtttcgcttggcaccatcctcaggtacgtgatatgtatgtatctcagttgttatctctcgcatagtttacattcacatgcagtccccgttatgcacggatgatttgccattttgtttcgtggtatctactaactgagcacatgatgaatcacctggaatctaaattttacattttttgttgacatgttgcttaatttagattgttctaggtatataa

SEQ ID NO: 14223 - DNA, 15463 bp, Oryza sativa
cgaccgcctcctctcatcctcgtgcagcaccttctccatgtccagcgcctcggccgcggcgccagcatcgtcgtcgtcaggcgtcgggatgaacggcggaagaaggcgtgccgcttcacgccgtgggcgcagagccgcctgcccgggtccttctccaggaggaggccgatgaggtcgcgcagcggcgtcggcttgccgctctcccgccggctccgtctccggaacggcgtgcgcccgtacaacatctcgtacagcaccacgccgaggccccaccagtcgacggcgtagtcgtgcctgctcccagccacgatctccggcaccacgtagtcctctgtccccacgaacgagttcgacttcgccgccgacgagcagcacgtggacgacgaggaggacgaggccatcctggacgcggacccgccgtcgcgctcgcccgccgcccgcccatcgcccatggccgcctgcccatcgcgctcactcgaagaagaagaagagaaagagaagagaagaaaagaaaagaaaaaacgatgtgtaactgatatgtgggtcccacgtactttttttaatttttttttgctgaataggatgccacgtcagcgaaaccacccacatatactgccatgagaccttctttgaacggtttgtgtgagtttagggtatacattttttgttttgtggtttagggacctcaaaaaatctcgctgttaagttgagggtcctcgggtgaacttattccattgaaatctgatccaattggaaaatccaaaccattcggcccatttagcccaaaccaagactactactgtcatctacggccaagtggatgtacactgtactgttcatattgccctaccaaataattattgactaatctaaaccaatccaaaagggcaggagaaaaaaaaatgtcagcatcttgctaagagagaatcttctatagtttgtgcttggaatatcccctacctgccacatctgttccctcgctcatgtctcctccaaagccttttgattagatatccattatgaaattcgagcatttctagttgctatcatcactaatgataaggtcaccgataattaatttcctttgatgaaactggttccagatgctctcaatttctcctttaatgaaaagaaaaactacatgtcgctgtcccaaatgttctatggattggattcttccatgtcgtacctattgtgatgactttgacctaatctaatcataaacccgtcctattagagccacaaaaatgtgaaaataaaatgtttttatcagtatcataatttccaattaggtcgtcacatatattttcaccgtagaagttcagctagcttagtccaacaaagcaaagaaaacaaaggtggcgtgcatttgtaaactaccacggagataactacttccccattagtaaacgacacgctaattaaattaattaattaattaatgcgctctttacctaactttttggatttgtttaccaagctaatctatcttaaattcttaaatcacctgtactaaatttctccagaaaaatatcactaagctacaaagacacagccctttggagttgtttactaagttaatctcatcttaaattcttggttgtgttcgttattccagattgggaacttatccctttccatgacaaacataatgactcgttagaacataagtattaagtatgaaaagtttgaaaagcaactttattgtagaaaatttgttaaaaaaagtatagttttgttgttcgaaaaacgtgtgcgtggaaaacgaagattaaaggttgataaaaggcctatttagatctcggcaaaacttttcaccttgtcacatagaatatttggatacatgtatagagtattaaatataggaaaaaaaattaattacacagattgcgtgtaaattacgagacgaatcttttaaacctaattgctccatgatttgacaacgtagtgtctcgctgtttacagatggattctataatttgttttattattagtctacatttaatactttaaatgtgtgtccgtatatctgatttgacacgctaaaactttttgccacttaatctaatcacagctaaagatgagaaacgaactcagctaatcactcatactaaatttctctctcaaaataaatcgctaagctatacaaagagacaagaacccttctaagcaaagcagccagctaggaggaggagaaaacccaatcaaaatcaacccacgagctcttcctcccacctccatggccgccacccaccccctcctcctcctcctcctcgccgccgccgccgtcgtcgtcctcgtcgtagcggcgacaccggcggcggcgagcggcaacgggacgtcgacgccgacggcgtacgagatgctggagaggtacgacttcccgcgggggatcctgccggtgggggtggaggggtacgagctccgggaggacgggagcttcgaggtgtacttcccgcgggactgcgagttcatgctggcgaggacgtggctggtccggtacggcgcccgcatcgccggcgccgccgcctccggccggctcacgtcgctccagggcgtctacgtcaaggtgctcttcgtctggctccccgtcggcgaggtcgaccgctccggcgacactctcagcttctacatcggccccgtctccacctccttccccctctccgacttcgcccacagcccgcactgccgcggttacgaccacctccccgccgccgccgccgccgccgctgccgccttgtgattgggtagagatgggtagttcattaattaatctgggtgatttggctggggtaattacgtgtaattaatcacaggtgctcctggttgattggctattgatgcgaatggaatttacgccactatgggatttattttgagtatatcatttggtggcttctttatgaacaagtgttggatgcagatgctgtttgtttgtctggggttttttttttccttggtttttttggtagagattgatcattgggcttgtcacattcgaccatttcttccgtttgctctttggatttcatttcgattccatgccattcagataagaggtaaacaacagataagtgtactgtgattgaatggaaaatgcagtgagctcctcatctgctcaaggttatttgacggtgcggggtgaaagagctgtgattggttgagaagagatgtgattggttgagaagagaaattagatgatgcatttgaatggtcgaagatggtaattgattgagaagagaatttagacgataaagttgttatattttgaaacaaatttcaaatgggaagttgtcatagtttgtttctgttagcatccaaagctctatattctgtttttagaatttcaccaaataacacttccaaatagcaggtgtaaaacaaatttccagttttccgatgccatggcgttcagagatgagaatatgcaaggagcacctcattttcactcacaaggttattttgggtggtcaacacaagaaaactgtctttggatgattcctgattgggtacgttgtttttaacttctataatagcacaagaaatatcagttcactttagtagctgcaaataaagttgcttccattaaaagcaacaagaactagatccagttagcggctaatctcacatacaaactctaaacttcctcatttttttaagcatgtactttaaactgctaaatagtattttttttctaaacattctatatagaatatgcttaaaaatcaaataaatttatttttcaagtttataataattattattaattaattggtaatgagttttctcgttttacgtgcacgaataatctttcttcaaactcacaaaagaatgcagtctaaggatacattatatactgtactttctccacttcttctccccaactcacatttctgtactttatccacttctctccgaacacatattttccaatctgctaaatgatatatttttaaaaaaaattcataagatcgttgcttaaaaaattatattaatttattttttaagtattttatctaataatacttaattaataatataataacacattgctttattttacatattagggaggaagggttcccaaccttccaaaaaaatgtttcaaaaaaaactaagggggcagaaagagattttcacatgtttcagaaaaaaaaaagagattttcacatgttcccaatatgaaacgtagagtgataaattggtactccctccgtttcaagttataagacgttttgactttgtcaaagtcaaacttctctaagcttgactaattttatagaaaaaaagtagtaatatttttaacccaagactaatatattataaaaatttattcaattataaatttaataaaattatgttggttctacttgagttagttattcttagagtagtttgactttaatcaaagtaagacgtctcgtaaactgaaacgaagggagtaacatctacttttcccctttcctttctagggacctaccaagttattatcacaaaaaaaaaacaatgtaaaatcttgtgtatagacatggaaacgatgtattcaacaagctgtcttccgtgcacaggaatttaagctgacagaaaccaagacgccgcaaccttgctgtataaaactgcagaccactggcaggcttggtgttaacacagaatgtccgactatgctgcaccgagtaaacatatactacaagaataattagtgacagaatgtttttctttgcccaattacgctacagatattgaagattatatcaaaaacatgcatctattatttgtcaccgtacagtggacttacaagcagatctaactttgcaccgagtataaattgagtactgaatctgttcttggtatagtcttcttaataactctttcaagcgtgtgcactgctgtaaggagggtgtgctgcagattctgatagaaaatggtacacatcaccaggccttgagcacccagagtccagagaactaacccaaaaccagaaatctccaaacatttgatgacgatacgaccaacatatctgacaattggaagtgaaaaagcttatgtcaattgtcaattctatcatttgatattgcggtattgcctgcaacaaatgaagtttccaagataatctcatgacgactcatatactgaatttaggtggtgtttgggaagaagggactaaagtaccttagtactatctgatgttcttaaggcttttatagagaccacgtgaatggagatgtacagaattagaaaaaggtgacagaaaggtactatacagaaaagggaaataacaacatacaattcatttcttcactccaaagatttgagcagccggaataagccagctgcttcccttatccgtgagaactcaatgcagaaagcttgtacctcgatgaagaggtcttgaactgcaaagaatcatgcacaaaacttataaataagtaaaagatttcaataaatatagcatgcaaccaaagaaagataaatgaggctggaataaacgagttaaatggctttagatggcttaaaaactctatgaattacaaatttcagcaatcaattataccatattaacacatgttgcttctttcactaaatatagaaaagagtttaatcaaacaaaaactgaatttactttatgacgatcaatatgaacagttggcaacttggttactatcaatccacaaacaatttaacatacttgaatgattctttgtgaccactgtcacaaatccaaaaaaaaaatcctaatcatttacggttcacagaccaaacagcatatccacaatcaagatgaatactgagaaccaacttgagcaaattaaaggatcattcaagaaaaaggggcacgtctatggctagtaacagtgtaacacacaagagttttcaaagcaaagtaattccttgttttttttcaaaaaatgatgttttagacacatgcacacattaagaaaatgcaaaagttaacccccatatcatattcatgtaaaatttgtcttctctttctggtacactcttaatcttatcttagtgtttttggagacgttattgtacattaaggatagtaattagtgaaggtaaagaaatcaaaaggtttgtattatgaactttaaagtatcagtattttggatcaagaaagcagatatgtaaatgtttataatcaacataataatcaaatgataacagatcaatgactaaactgtatatatgagacaaaaaatgtatctgttccatagtccgcacacaacagtgcactcaccgtttatgatcttgtttcggatgagagactgaaggaaaacacaaactagtctcaccaacctgttctgcatgtatttatcctgcacataataaaataatcatactgaaggaacttcaagaaagtaacgcatttaacaagtgaggcagccacaaaatgcaaattacccatcacccaatgagcaaaaaaaaaaaaacaagatacagtaataaaattgtaacataaggatttttatcagagaatagagaaaccagtaggcaaacaatgctcttcccaacttagcaagcaagctactggatcaaaggacttaaccgaacaaatagaggagatggcagttgattggagcatgccattatataaagcacataaattattttgcaacaatctaaagcatgcaataagatctgccaattgcacgtacatttacttacaggcaccatcactacacaagtgcttcagttcaccaaaaaagtcagtaaaacaagtatttctacgaggaaatgctaaatctgaacttatcaaagaaacaaacaagcagaggctacatatttccatggaaaacgtagcccaggttaaatcaccaactggatcaaacagactgacataaagcattaaacaatctttgtttaaccatcagcttgaagtaagccacaaaactacagtaccctgctaacaaattctccaacaaatttaatttgaacgagcaaaataacaaacagaccttaacgttctgacatgattggatgcaattcgagatgtactcatggacaaactctgtcgggagttctacagcagtagtaagcctgtttacaacttccatagaatgcaggctcatctccatatgcacaagaacatctaagtaactgaaaaagaaaagggtcacaattaaaatatattaaaaaaaagtgttggtgatcatattgactagcaaagaaaagaaacagacatacccatcaatgtcaggagagttcatcaatttcgaaagaatttcaacagcaatgagtggattgtgttcaacaaggtcctaaaaccatgcataaattctcagatataagatatgatgaaatatggtaaaataagtaaacaacatttttagcaaccaaaaacacaacatttggcatgggtgcatacagggagcttttgtggagtcatcccgcaatgatacaccaacttcgagtcctttgccagttctattacgacttgctgtgagaagctgtgcattaattacgcttgtaccatatgaaaatatatagtaccaaaatgtatgcatgtccatggggaagggggtaatgaaaatacttgttaccataaaagcaccagcacctatgctaaacaaatatatattataaaaaagacaaaacaccaattaatagtgcttatacattcatgtttattagtgatccatagatgcaagatagctagcataaatacaagaatgtagcagagaacctcttgttgggaaggtgcaagtggaccttttaaggctcttgcaatcaaatctcgaatagcagcacctcgacttgtgtcagcacacatgctataatcccataatagctcgtgattgttgtcagggttcaaccattgtagctgtatgttcgatacaagcacagttgcacttagaaacagaacgggtacacagatgcaactcttggctggctaagacactctgttacctctccatcaagtatgtgaagtcttgggggtgtgggtcgtatccattgcggacccaatcttccccatgatttttcttggagtaaaccagcaagagcaaaatctctatcatcagaagcagattttggtttggttccaggtaatgatatgctaggcctaataaaaaaaaccaattttgtaagagaagaccaagaagaaaaatatgacgaattctagcaccacataacaatttcaggaggagttagctgagcctacatactctgacgaatttacacagctttgaggtacatctggatccggtatagcacatctaacagttcctgcactaaaactactggtctgaggctgagactgtacactattactgctgaatagcttctcaagctgttctcgtggaagtaaggcctaaacaaataaatgaacctttttattaatcaaactgatcttgaaacaattttatattatggaatcagaatttaacactctacctgagatgcagaatcagacccatttatgtaatctacagctgactgcttcagcacctgagacatacaaaccaatgccaaaataagcatacatatgtcagcacatgaaaggagcaataaaatcgccataatgtcctacaaccaatatgatttactaatgtttgtagataggccacacctcaatgttattgtttccacttgctgaagtcaacaaaagttggacaaatgcccgttccgatttttctgatgtttcatcacaggctgcctgttgatataataaaactataacttcaagcatgataaacaataacaatagaaacataagactctaacatagtaaataattctgcaaaacatatatattaaataattcttcaaatgccctagtgtacagaaaaaaaaaacagatatttaagtgttcagttctgtgttcttcatgtattgccatcatatgttacgaacaaagaaatagtatccaagttgataaaaggcaaagatccaacttccacagaaattattgaaccaagctggtgtagatgctacataaactatccaacccagctgcaagttgcaatagacatttattcaacatggtgttagtccgataagcagccgtggaggcatatcccactggtcagaaagaaatctatacaaaactatatagactagcaaatccatgatcttgacaccaaggcaaatatgctacaaaattattagggttacattttggaatactactccctcggtcccagaatataagaaagtgttagagttggacatggttattaagaaagtgggtggaattaaataggaagaggttgtgattggttgagaagtggaggtaggtgggaaaagtgagtggtggagggttgtgattggttgggaagggaatgttggtgaagaagttgttataatttgggacaaacctgagtgctaaaagctgttatattttgggacggagggagtactaccaaacatacaatgatacaaacattggcatgcacaattgaacttagtgttatgggatcaaaatcaaatgtcagatcctatgcaggtaaagcagagcaatgtaagaccctaattgacagtttccaaagtacaactgtttttgtagagctagaactagcaagccagatgcgatgtcaatttatgtagcgatcaataggagatcagaaaaagaacccagacgttaaagaaagttataggtctttcataacccttttctgtcaacaagatgtgtagaaccacgaatgaagaaaagatttggacaaaatgatactgttatgacatcaatctctagagtctaaaatgacaaccaaaaaatccagcaaaagagaaaccaggggcagcataaataattcattaggagcccagcttgcacatggcgcaggaatataaagatctatgatatatcctggccaaatggggcctgacagtcttcaaagctacaagttccgattctaaattactacaacaattcgcagttgcagaatcacctcagtaaaagcctcacaacattaacaattaaatttcattactgatcaaaaactaaaacaaaaacaataatattcttgtaatgtatgtatactagtagtctattatgcagtataacttaagggacagggatgggcaacctggctgaaggttaggcaagcacccagcatcacaaaggaaagcaaatgatagacgaacaagcttgtctgaattgacctatgtgtctactagtatttcaacacaactcaaagttaccagcatgcgtggtgttttaccagtttatatagcttcctcgcagcctatgctcatgtatttacttcttgaaaattaaagcaatcttgaaacatatcaaatgaccttgtaatttcacccattctgaattacatagagtgaagggggaattgggaacccttccatttcatgatgatccaaaatacaaaaaaatgaagaaaaaagtttattgcttacatttaataaaagtggaacatatgggtttgccggctccgaggaataactctggtgaagaatagcaaatgcaatcaaccgaccagtaggatgaagcatcttcttgtcctagtcaaaacgaaacaaaatatatcaaagtctgaacttcatttttcctgtgaaataaatttcagaactaaaagaatctttacaaaaacatgcatcctccaaatatctcttagcatggtcaagaataaacagacaaacagcataatcaagaaaagaattgcaaatgcatggtgaaataaagacaaatacacttttattgcccattacaaaggtcaaataaaaacaacaatgtgtctttggtcgagaaactggataacacactataaaggagaaggggttgcagttcttgtctaatggttaaaagcttagtgtccatcttcatcagaacataggaatgcattaacaaactcattaaatgatttctccagagaaagttccttatatggcatggaaggtttcctctgtcccctaattgttcactctaaattgttctttttcctacaatgcgagcacattcaaaaccattaccctcacattctactttcgcaagagtaatggtttaaatctacagtagtaaagaaaagaacaactttggtgtggtaaaccataaccacaaataagggatcatccgatgggcgatggcacaaaaggaactacatctttctttgataatctgcattgttttgttttcacacaaaaaatatgacttgtcatctctgttagaatccgtgcagataaatagatctctttctgacatgtgtttaaacagtgcagtttcattgataatcgagaatagagtcagctcaaatgcatgttgccagcagggataaatcgaaaacgctgaatttatctagctcctgttatgttgggaggaagagttcttccatgatatgtgtggttcagcattgcttttggaacgagaagtaaaggtactatcaggatcagactattgcatgaaatagtggaagttgagaataaggaacagatccatggtctcctctatttgtttttactcaacaccagacacttgataaatagtaattaaaaccaatcaagtaagcaatgctcacaccactgcttgttagtattcacttctgaaacagctgacaagtttgatagatcacaaagagcatgtttattaaatcgatcgaattataccaagaatgaagcaggtttatggattaaaaatgttaataatgtttctttaatcacactgattgttcacttgaaatggaaccctaattaagtgctaacctactcaagaacaaatgaaacccaaatatttggcgattcggtgacatcacaaaattgaccaactaagacaatggaccatacgcactcatacggagtgtagcatgagtccatccctacgttgtgtattgcaacccagatcctcatagacacaaaatcagcaaggcaatggagtcaaaattttcatcatctgcaaacatgaatccatccaaacctgatcaaactaacaacacaaggccataaagaaatttaaaaattctgcatctccgctctgctaaagcaaaacaatgccactaaatctagaagttgagcaacccatccgagatcaagcaattcgtaaccccaaaggttattaccaatagtacccaaatatagtgagctaagttcctccaaaaccccacaaatctgtgcctaacctaacattctctagcccaatccaaggcctaacccccagcaagtgaaaccccgaacgaagccaccaccgtaatttcacgtcgggaccaactggagcaacctcccagacatcgtaacacgcccataaccactaaatctaacttcccaccacgaaccctaagccgatggaaccaaaccgctccccgatccgtttccgcccgcgaagatcctggacgcaatctgacgaaagcaagcaaagcggtgggagggcagcaggagggagggccgagaagggcgtggggagaggggcagggggggatggggatggggatggggcgtggcccctttacctcgaggaggaacccgagcgcggcgccgacgcggaggcggcgctcgagggggaaccgcgcgaggaagtcggcggcgatgtcggcgagcgggcgggaggcggcggcgagcagcgagaggaggttggaccgctcgtccggctgcagcttcggggcgggagccagcgccgacatggtggcggtggcggtcgccggcgtcgtggcggccggcggcgaaatgttccgttcgcttttttggttttgggtttgtgttttttttccccctttgggcgagggattcgggggtgcagtggggttaggcgacttgggatgtggttcggatcggacgggtgcggctgtattcataatcgtacaggtcagctttgtttttttttccttttttattaaccatttttttaaaaaaagtttttttttaaagaaaaacggtataaatgtaggcgcccacagcgcgtgcacactcacctctataaacgcacacattgacaagttaacatggagtctcgctatcagcggtatgtcgcctaccctgaaagaaaattatccataaatacgagcactcgtgtcaaatctagaatttaaactcggataagctggttccaccacaaagaacttaacaagttgaactatgctcacttcgaacaaaaatgtagatatattgctaagccgaaaatattagtggagccttgagtactcataatttgaatttatcatagaaaatcgtaataaaatggcacttgccacttttgtctagctgagtttcatcattgtcaatggttaatatgttcattccctaaacctatggtaccaaagcattgaaaccgcacccttttttactctctctactctctctattagtggatggatgcctgacgagtagtcggggtggttccaaagttgggtaaatctcgttgtttctcctcagcccccacccccaccctcccacccccaccctcccaccacccaacctatcagagaggtgctggcatccaccatctttgtcctagtagcgactggtagttgtcgggctgttctctgacatccgacgatcgacccgtggcttcttggtgcaccaatgccatttgaagcttagggaacaacatatctgcaacaaaggtgaggcatgtggtggaggtgttgccggttgatcgatcctctctgacaagttctctacaactacgatgtttcctccatgatctttgtcatcgattcttcaatgtgtggttttgttcttctatcatggtaagattgtcgcaaccttccttcttggaggcccttgctaggtttgcatccaggctacatcaactacaaccacccttgctttctcgattgtcatcgttggttgaatcacacatgttaccagagcaaaggaagaactacctcgccttccacacaacaacaagacagaatcggtcactctcatattcttgaattctccgctttcccacttatagttggccagtgctaagctgggttggcccgagcacggccatactgtagccagcccaagcacggcacacgcattttgcccgtgtcatgcttgggccaacaactccacctatagaccggcatggcacgacatgacccaactggcccatctatttttccttacaaatttcataatgttccctatttttccatttttatcatatattactcatatttttccttatttttcctcctttttactaaattttccccatactttccctactttctccatttttttccttctatgttcttttatttcgctttttctactaatgggtcgtaatagtagtcatgcctgtctgacatggtgcgggtcctcattgcgtcgtggcctttgcctgccatcaggcccttgctgtgttgggctaggccacctgtttggcctactatactccctctcatacaatcttcttcgtgcctctggcaatggattcttaacaggtagctgaagttcaaatgtgtgccaacaacgccacaacatccacatcctagaggcccataaaggtttgtgaattggcttctcgtgctattctccggtggtgctgtcggtgtgttcatcaagttggccaaaatagagagaagtagacccgaagacctgatgtaggatcgagatgtcgactagaggggggtgaataggcgatttaaaattaaatgacacctaatcaaaactaacctaatttgctaggctcggtgagggacaagtctaactaagcaattaagttatgttttgcaatcctagggtgaaagtggctcaagtatatcactaggaaagtaaaacacttcctaagtctagtttagcaatcctagggtgataagatctctagtatatctctaggaatgtaaattgcacaaatgtaaatgcaacaagtaaatgagacaaggagacaagagatttttcaccgaggttcagaaactcgccggtttcctactccccgttgaggtgagcccaactccaccgctcaaccacgaagccaccgcacgcccccttcgtcaaggggtgggcaaggcgggagccggcccacagagaggactacccaagcctcgatcactcggggtagttcttccttcactccgaaggtggtgaactccaaaccactcacaaaccggcaccgggcctcctccataatcttctcggagaggtcaccgggcaactcctccacaagccgtctaggaggcggcaacctccaagagtaacaagcgatgacgcggctcggagatgatcaagtgccacactagctctacaatggaagcaatgcacttgactcttggctagaacaaccttgaaacacactaagtggatgaacataaagctcaagtgggtgtatgagaaatgcaaggggtgtatacaattgaattgggtgccaagagagaccccttgctgctggtgggggagtatttatactcccacccaccaaaactagccgttgaggacgaaatcccccaactcagtgctctgccggtctgaccggaggtgtgtggccggtcagactgtgctactctacaccagctagttttctagccattgtagccctgtcaatgggtcctactgccctggtcggtcagactgacatggggtggcc

SEQ ID NO: 14224 - DNA, 39665 bp, Oryza sativa
cccccaaacagtctaaattttcacctagactgtgaaatgatgtagctgtataatccagaaaatgaactagaagccataagctggatttgtcagcttctccagattgtcacctgctgcttctcaaaatactaagctcccccaaatagggccaagtcttgcctgcgtcgacaactcaaccatggttactaattaactttacatttgtgttggtgtcatggtgtgtgataatattgacagtacgtttttctctgtgtacacacataattttggagatgacaaaattagcatgcactcatctttatatgctcagtcgtatctctactttagaagaatgtggaattgaaggatggggcttaaacttctatgccttatgttgatcacctgcagctatatcctccacccccactccccccccccaaaaaaaaaaagagaataagttcacctgatatcccaaaactttacgtcgagtttgtctgaggtccccaatctccaataccagaaattctaccgctcaactattacaaaccgtgtaaaataggtctcaaggcagtatggaccaaatttaaccccggttttactaatgtggcatacagcaagccccacatgttagtgcgccgttagggcgttattacactgagtcatctctcttgttgggttggcgcgagtttttccccttctctctctcttcgaaaaccctaggttaggcggtagcatggtggtggcagcgatggcggcaaggagaggagtgcatgcgaggagatggcgagttcgtatagtgaatgctcttcgacttcctcccatcccaccaatcgtgctcccatcccgcctcatgttgggcccttcgagtaccacccggtggtgatgtgcaagggtggtgcgaaagcggcacggtggatctcgtggggagtcgacaacccaagtcgtcggtaccacaaatgtcacaatcaggttagtgttcttcgatttgttttgtttggttgttgttatgggagttgggatttagcttgtggtgaatttgcatgtcgaactttcagggcgccggctgcaatttgtttgattggtatgatcccccatctagcagtttcatgagagagccgttgtatgatcttcgagatgtcgtgttgtcactaagagggagaaggctgagcttgagcattttgttgatgaattgaggacgaaggaagaagagcagtgtgcagagattactgcagcaaggcatgaactagcagctttgaggcttgtggcatctaaggatgaagcaaaaattattggactgaagccaagtaggctagagaaacagagatatgtgcttctaatgttactgttgacatgtgtgtttatgttgtttgttttggtgttagtgaagaactgagctgtaatatgttagcatggtaagatgtatggtggattggtggttgttgttatgtctgaaatttcagtgaatgcatcaatatgttcttttgtttgtcatgaaatttgagtgaatgcagcaatatgtttgatatgagatgaaacatattactcatcttatgtatgtgcagaaatatttgacataagttgaaatgccatcaagtatgactgaagattcatttgagatgggctaagagtttttcaaagctacaaatattacatgtgagtttggcacacatattatgtggccattagttagccatcccatacacagcacatgacatgcccaagagtttggcaatgcatcacaaaatagctgctcaagtgtgcagaaatacatcacatcttatcagattcccatggaaaagaaacatcagtcgactaggggttgatttctttgtcttggcactagcaggttcttgaacttgaacaaacacacatgcttttccagaagtgatcctcactaaagcagttctagagctctgagaatgtggcactatggcctgaagattcacactggctgaaccaccttgtcgggttaatacccttgcactggctgctaccttcaccattgggttggttttgtttggtgcctacaagcagaagatacaattagaccaggtgaatgagagtaatagtttagtccaggaaatggtacagacctttttcacaggaggtgatctcctccaagtctggcaagcagatgtgctagtactgagttcaactgcctttcttttcctgctttggccaatgctgctaggtactgagttgttggatgcattggcagcattggtagtgtgccgagaagctgttgtgctagttcctgcatcagtgtacttgtgacagcttgatttgttatgcccagatttcttataggtcctgcacctgatagttgttccaaacttagaaaccttttttggtttagctagttcattgagctcccttctccttttactcctaggcttccctggcaccttgatataccctagcacattcagtgcctctctaccatcctctggccaactagactttccctcaatttgctctttcttctaataacctcaccatcactgccaatctcatcaaatgactcctcatcatcattctcagcgtagggggtgctattttcatctggtttagccctaccatgcatagcaagaagacttctgtacccctcaaacaccacatcattcaggttataagcctttctagtcttcatcttcctcttgacctctttgtaatgtctctctatctccctagcctcagcatcatcatcagatggagaatcatctccagctacctaattattgtgatcctcactgtcaaatggcatcaaagtggccagaggtgatgagttgtctatgtaaacaacaagcattttgtcactagcatcagcatcttcttgcactgctttgtcctttagttttgctctcatttcattggcaccattaggttcttcttacacagcttagcccttcccttcggctctaagcttgccatccttatcttcctcatcctcatattcttcatccacatccaattacatttcagcctcaccatcactatcttcatctaaacctacatcaataacaatagactccttggctacaccaccctcactgatacaatcaaacatgaacttgttgacgaaaaatccacgctcagccgatggtgtcggaactgtgttggcgcgaactaagtcgatgaacacaacgacctgggagatctgcttagctccagtccaggtccaaaaattgatgagatatgggcgtgccagtcggtttgatcctgcaactgacaagatatataaattgaagatcaaagagccgatcggctgataagccgatggagtagttccagccgatgccgatgccagccgatgcctatagggttttgaacaatcgactatatatccaatgtaaattatgatacttaagtaaacaacgatatatagacaatcgacttatgataataaaacaacaatataatccaatagaaaccaatcggctaacaatgatataatagaataagtgatccgatggttaaagcatacattggtttgaggtccaatgtcattaaatccaaatgattaaataaacaatgaaacctcgattatcattggctaaatccaatttctatgcaatccttataagccgatgcaacgtctagataacttatcggctgaaaccccgatgaaacccttattggcaatcaaaggtaggttagtttttatggttctaagcacgagtaaggtcgatgcaactcaaagtatgcaaaaaaaaaacataaatttcagagacgtcagacagacttgacaaaaagttcagagatgtcaggggaacttattccccctcccacctcccccccccccccaaaaaaaagaggaatgtggaatgtgctccacatgtggactctcggagtttgtgcggtattattaggggtggaaacgagccgagccaatcctggctcggcttgcagtggctcgcaacaaactagtcttgccttggctcggctcagttagggaaacaagctaaaacttgagctcggcccggatcctttcctggctcgagccagctcgagctagcttgcaagccttcctattgaaacacttcttcatatatattttgtaattattagaaaaagcaagaacaaatcatcaacatgtaaaatttaaataagtttatatattcaattcttcaaaatcttaatgataaatttcaagttgtcaaataataactccataaaaagttaagtaatcgatataaacacataatgggctaggctcgcgagccagctcgtgcttggctcatttcagcaacgagttgaaaaggaggcttgggctggctcgtttggttaacgatccgagccaagccaaccaagctcgagccaagtgttacgccccgaagtttccccctttgtagctttaaaatccgtttaataaattgcctgaagaaatggtttaatttaacctagagatgaaccttaatcaataaatgcgattaataattggaaagggcatggtgggatttttcttgagttcaccatgccacaatacattaacaggatttttagcggaattttcagagcctcgaaaataattttaaccaattataatcaattctatgcaatatataaatcccaggaaaatccttttcctttttcctctttttcttttctctatcttcctttcttgggccgtcggctcactccttaggcgccttccctatccttgctgggccggcccatggccgtgtcccattcggcgccgcatccttccgtcttagggtcaccaactagttggggccacctgttggccccttcttccacctccagccagcggcaaccgccgctgctgtccaccttctccgccttccgtgccccactccacaccgcgcccacatcactgcccactactccgattttcccgcacgcgcgcctccccgcaatggccgaatttggcttcgaatcccctcctctctctctgcacctccccatgtcgccggcgcaataggccaccctcctggccacgtccgcctctccctcacctataaaacgcctcccccgagccccattctctttttccgcgctcaccgccttctcccgcgctcttcccacgccaacccgagctccgccgcccaccgtcgatctctgaccgccgctaaccgccgctagagctgccgccacgccatgccaacactgcctctagcttcgccgctgcgagagctacctcggccgccgcctcccgtcgccggaaccccaccaaaaccccatttccctcgtcctccggtgagcccgccatttttctccatctctggccagcgatgcaagccgtcgtggtcgtcctctccactactaatccctctccgctctctccttaggtgtcgtcggcgcctgtccgccccttcgcgtcggtgggtcgtcgctgccgccttcatctcccgctccggccgccatgctcgccggggaaaaccccctccccctcctttcttctccctctcccatgtgcgccgctgcttcgggcatgcgccaccgccttccgctccgccgatcgccactggtgaccgtgccgccgccctcgccatagccggtcggccagcttgaagccgaggccgagcctggcaactgcttcctgccgccgtccgatcggccaaaggccgatctggaacgtcggtcccgtggatcggcggtggaccgcccacgtggtcccggtccacggtggaccgacgtcctggtgccgctatcaaatggggcccactagctggcgccactcccccctccccgagccactgacatgcggggcccgcttgccggcaccgccccctcctttgctgacgtcagtcctaggtattaccgtgcaataaatcaattaaggcttttccatttatagtaaaaacacagataatcttctaaaaatcataactaattcatccgagctccgtttaagtccatttaagtctcaataaattcataaaaatccctagaatccattaaaatggttttatttcctgtttcagtagacttatagcatgttttgcttgtgtgctttgtttgtcacatagattccggtcgtttcgtcgctccgcgatacctcaagttcgttgtagaagtctcataagtgcgagagcaaggcaagtcatgcattacaattgatcatattgtacttggtttacaaatgtcccgctttctattaaatgttgcattattttacaatgtcatgtgggatggatcctattactcggccatatattgtttcccttatgtcattgataacttgggtattaatttgattagatgttggtttaggaaatggttagccatgcttagatccactagttcacataatgtgataattacattattagacacttagtaccatgacgagctgcgtgctcgagacatccgaccatgtttcattagtcgtaattatccaattaaaatgtgactgaatggtgggctgtgggtgcatggttttgctggtcgtacccatagcatttaagtaccggttcacgggaaaccctggaagacttattgtgcttaccacaagcgggagtgggtaactgcttaacttgtagtatagcttgaccctttcctaggcaccggtggcgagggtgggcgtgatggagttgggtcagccggggtgtccggttgtccagcttccagattcaccgcagcgcacagggagactgcccactgcctgtttaggagtgggggtgaaacctcatcatggtgtggatggttaggggagggttatgcgatgggtctcgtcacgatttccccctttgcagtaacatagtggtactgcaggacatggcaacatgtgtggaatcgtgtcttgtgggtacagttgtacagctctgaccaaagtaaaactattcgaatagccgtgcccgcgattatgggcgatcaaccagattcaccgtgattagtcccatccctaatagttggcttgatgaattggtgttgtttaggtggttggttgggtctgttgcaacgtggtgtagcgttggacaatgatgattaatattgcttaatttacctcaacagctttactgcttttaaatgcctgctttatgcaaatgaacctttagcctcctttggatacatcttgcatcatacctcctcttccggtatgatttactgagtacagtgggtagtactcggtctctctcttccccacaccagagctggagttttctcagctggagctttctcgaagaagtcgacttcgtcgctgccgtcaaggatgcccgtggagtggagtcgtcacgccgccgagtcaaggatccatgcgagaggcagcaattaataaggtgcaattaataggggcaaattagtctttaatgttaaaatggtaaaactttaccatacatctgaacaccaacttgtaaaattccaatatcaaatcttttgccaccaaaacttttgcaaaaaaaaaaaaataccggagcaaatttatctaaacatggccttgttcatttcatcgttcttcgttagttgtcatatacaaatatccataaatgacacagcagttattgtactgaggtaacctaagaaaaacaagattgctcttcggttgggttaatcttaatttcagggtgtgtttagtttacgaaaagaaaatttttagatgtcacatcagacgtttgaccggatatcggaaggagtttttggacatgaatgaaaaaacgaatttcatcctggaaaccaagagatgaatttattaagcctaattaatccgccattagcatttataggttactataaaatttttggctaatcatggcctaattaggctcaaaagattcgtctcgtgatttccaagcaaactgtataattagttttttaaatttatatttaatgttttatgcatgtgttaaagattcgatgcgaacttttttggaaaaaaacttttaggaactaaacacggccattaatagagagcgtttgtttggtttcggtggactggaatttgattgcgggcagcccaacgaaaaattgataccatcgaggtcaggcccatgggttaacccttccccggagcttggagcaccgtcgccatcgctcgcgtcctgcccgccgacgccgccaccgccgctcgccggagtccccccgcgctagattgggccgaccaatcggctccaccgtcctgtgccctctgcagcagcctccgcctgatctggtaatctctcgcctctgttcttggattgctgctgcttcttgcgtcatgcgcgattcatcccctccccctcactccaatcccacactaatctgcgtctgagcttggaatccggtgagtcccatatcttcaacccctcgctggattctagtggtggagctggatatatctcaatcgataaaccctagtattaacttgctttattcctcattttgtaataaataaataaataaataaacaaataatcttgactcatcctaatccagagttatttttgtgtaaaaatgctagtggtctccattcactgcatcgccattgatgggtagaagggggtaagaaaggcaggtcagtggtgggtcacaaccagaggcctaaacccggttccaatttggagggggtacaaacgcgcaagcggcggaagcaagatgatccaagtaagaatgaattactagctagttaactcgcattccctcaaccttaatttcctctacatgacagcgattgttgattgatttcatagtagtatatgatattgctgatgcgagttatatgcgataatgctcaacaaattcagaagataatgatggaagctttcattcagcagcagctaatgagagtgatgagagtggacctgttcaaggaaagggtgcgaggagtcgtgtccctattgggccaaatcatcaggctaagttaccagattgtacatttggcaagaaagacggaaatgttgctgaggactctgctgatagtctctcatgtctttatctcggtagtgataggactgaaaacatcagcaacaatcaggctcctgtgcggtaagtccaacattattgttcaatttcctgtcctttctagtatcctttgatatctcatacagtgtaatgtgcagcagctctgttcttcatccaaccgatagtatgccaactgatgccatgccactgctgttgactccaacattggggcctcccattgatgctcctcagccagaaacgacagcggtcgttcatgagtccgctggagaggcatcgaccacgtcatttgactggtcgaagttaacagagatggggtaccgggcggtggaggtgatccagacttggagcagcgaagtcaagcttcttaaaaccatattcgtggaagagaaagacaggaatgagcatcttaagaccatgctcggggaggagaaagacaagaatgagcactataagaccatgctcgcgaaggagaaagacaaggccgagcaccataagaacatgctcgaggaggagaaagacaataacaagcgccttaagaccatgctcgtggaggagaaagacaagaacaaacaccataagatcatactcgaggaggaaaaggacaagaacgagcgtcttaagaccatgctctcagaggagaaagtcaagaacgagcaccttaagagcatgctcgcggaggagaaagacaagaacgagcgtcttcagctcagacttcacggggaggaaaaagataagaatgagctcctaaagaccatgctcgcggagaagaaagacaagaatgatcgccttcaactcagttttccaaagaacgaacaccttccacttggtcttcagagagtgcataccaggttggacgaatgcatagccttgatcgacagaattactcagaaagacacggtttttctggaaatgttatagaaggtggaataaagaagaactgaaggtgtgagtcgtagatttgaagtatggcaactttgcagttgagcaagctggctgtagtgtattgtaaaaaatggtcgtgtatcgcttgatttctgctatgttgccgttcagcacaggcacagcagtcttggcagcaaccaaagcgattttttgtaggaaattaaacttgggtatcaatgtgaaaagggaagtgctgaatttttggcaactaaagtaaacaacttttagaactaaaattcttctgcgtggtcaaaatttacaccaacttacatgcttgcaccacatcaaacatacgttctgcctgagaggaccatgtactccctctgtgccacaaaaagtcgaattctggagggaagagtttgtcccaaaaaaatcgactcttgcagaaaaccaaaaacatcccacaaaaagtcgaattttagaggggggagtttgtcccacaaaatatagactcctgcgcagaaaaccaaaaacgtcgtcttggtgtacatcgatgggcccatgacctctctctcctctcctcacattcacatcactcgagccttatcccctccccgggccctggcatctcgttctcttgcgagttcgcactcctccaaaatcccgcatccagttcccctcctcactccgtccatctctcccgctcctccccgcaccttcctccctgctccatgctgctcccgcttctcccgcctctcctgcttctccgtgtccacctagttgcggccacgcggatgcggcggcggagggttacgagcaaatagatctgatgcgggaggcggatctggtagaagggttcggctctccagcggcgttcatggcagtggcggagcggtatatggctttgattcaagagacgcgagccaaggggaggaagcatgttgtcttgcagttctgatccaggaggcggcggcgaccgcgacggcgggtggaggtgactcggatgcgacagcggcttcggaggtgtgtaaggcggtggatatgatgcacaaggcggaggcgatagatggatgcggtgctgttggcggatctgatgcagatttattttcttcgttgttcttggttcttctatgttcttgcttgtgaatccagagcatttcttctttttttttcttttcaaattggagaaatgtctcttctttatgtagtataaaaatccaacttaattttgtcccttttttatgagacagatgcctcctatatgtactggagtacttattaatagtgagggtattttggtatttccactttagtccttaacttgtattgggaattatgaatcgactctttccgggacggatggagccttaatcagaggacaatcaatcctccccaagaatcaaaatatgaaggcggcaagtgttaggattagagatatgaggggtgtttttctgctaaaagtggagtaggcactaggcagcccctgcagttaaatgcccctctaaacaaatgtccccaaaatctagcacagttggtacaagaagctacaggccttcccgcaaaaaaaaaaaaaaaaaaagaagctacaggcctaccccgtacggcagaagagtcacgcactcacgctctgtttttccccatccctcaagaagatcgattcctcctccactggtcctctccccttcctccaatcctccccttatctgcgcaggatctcggaagcaggtaagtctcatcgatctctcccccctcactggattcttgatttctcttgtgatagagccggataaatctcaacccataaaccctagtagagtataaactttgttccattaactttgtttcattgattcattccctgcaagcttcgcttgtggtcctaatccggagttgtttggcgtcaaaatgctggtggtgatcttccagaccggaggagcagggcccgattcatatccatcatcggtatcgatggcgagaggcagagggggcaggacgaagggaggttcagtgggtcacagcggcaagaggggcaggcccagcgccatggcggaggagccggagggaggagcagcgcgcaagcggaggaagcaggatgacccaagtaagaacgagctcgtgttagttactactcagctttcatttcttccacattgatttgatctccacatgtatattaattaacatatatgatgttatatttctgtggaaattgttttggtatataggagtacaagatagtagcagcaaattgttgattgatttgattctagtaccttcttttatcccttaagctctatcgaaattgattggtattcagaagacagcaattgttgattgattcgatgttagtattatagaaattgattggtatgcagacgacagtaattgttaattgattcaatgttagtatacggtaatgctgatgtaagttttataagataattatgctcaccacgcagaggattctgatggaagctttcattcaccagctaatgagagtggtgacactggacctgttcaaggagagggcgtgaggagatgtcccaattgggccaaatcatcaggctaagttaccagattgtacatttggcaagaaaaagagcagtgtcgccgaggactctgctgatagtctctcatttctttatctcggtagtgattggatcgaaaacaaaagcaacaagcaggctcctgtgcggtaagtcctactttactgtcgaatttcctctccagtatcctttgatttctcatatagtataatgtgcagcaggtttggtccttgtccagccgatagtaatgccatgccgctgctgactccatcatcgggacctcccactaatcctcctcggccagaaacaacagtagttgttcatgagtccgcgggaggggccttgagctcgtcatttgactggtcaaagttggcagagatggcgcagcaggcagcagaggggatccacacttggagcagtgaagtcgagcgccttaagaccaacctcacagaggagaaaaacaagaatgagtgccttaagatcatgctcgtggacgagaaagacaacaatgagtgccttaagaccaaccttgcggaggagaaagataagaacgggctccttaagaccatgcttgcggagagaaagacaaatatgagcgccttaagaccatgctcgcggatgaggaagacaagaacaagtgccttaggccaaccttgcagaggagaaagacaagaacgagcaccttaaggccacacttgtggaggaggaggacaaaattgggcaccttaagaccatgctcacagaggagagagacaagtgtgagcgccttaagaccatgctcgctgatgagaaagacgagaacgagcgccttaagatcaaccttgcagaggaggaagacgaggatgagccacttaaaggcatgctcgtgggtgagaaagacaaaaatgagtgccttaagaccatgcgcagcagctctggtccctgcccatcctttacattgactgatgccatgccactgctgactccaacatctggacctgccgttgacactccttggccagaaatgacaacagccattcgtgactccgcaggaggggccccgaccacgccatttgactggtcgaagttaacagagatggctcaacaggcggtagaggtgatcctgacacagacgagtgaagtggagcaccttagagccacgcttgtggaggaggcgaacaaaatcggggaccttaagactatgcttgtggaggagaaagacaagaacgagcaccataagacaatgctcgaggaggagaaggacaagaacgagcgccttaacaccatgctcgtggaggagaaagaaaagaacgagcgccttcaacttagtcttcaccaagcaaacaccaagttggggcaatctatgccctatgccgatgttttgggcattttggataagtcgattgacaaagcatttcagaaacgtgacatgaaaaaatcgtcatggaaaaagttgtagataaagtatggtacgatctgtgtaattggatatgcagctgtagtattttgtcatggttgtgcatcgctagatttctgctaatctgccgttcggcacagcagtctgggcagcaaccaaagcctggattatacctagccgcgtccgatagtccaagaccgagatgaaggagaaagtaatccaggtggtcagtgctctgatactttttctggagtgttaggtccatagttcaccttgttatggatacttgtgtgctgtactatgtacagccctgtatcaggattggtggcttcgagtaactattttttgttagtaactttagaacaaaatttgttgaccgaaaattttcgttgccaaatatttttcttgagttgacagttaattgaacttggacaatcaattctccccaagaatcaaaatgataatccttctggggaatgaaaagtattttctttgagttaagctgttctaggcttcacatgaaagattctttactgattgaagattgcaattctatgtttaatccttttcttggctagccaagcttttttcttcatgcataagaagcataaaccagtatatcagaaagagtgcaatagattatacttttctcgacaagaaagtgacttgtagaacatgtaaaattggatggtcatttatgttctgggctaaagcctgaagatgattcaaactgaagattgagctcaagcctgaaaattgtacgactccaattgatagttggggttgcaattcagagttggaggaagtgtagaggaaagggatctctaaatgggataaggcttccaatattcctcaagtgaaaataggtacctccaacattgtattttacttccagtctataagctactttgatccacaatttacggaccatttttctgttttcagtttcatactggttggtgctacacgtttcttatttattacgcatcctttcctttctactgttctttagtcaaatggtatttagcagtgctttttactgctctttgtttcttttcgttttattctgcaaacttgccattgtgttgtcttatgcctgttaagtgtcagcccctttctttaattttatctataaacatgacttcaaatttgtttctgtgattatttgcaaaaaaaaaaaaaattctgtgaaagtcttgagaaggataaacatttcccttgcaaaggaatttccattgtaattgtgtatttcacaaacagtgagggttaaatgttgtatccacattttctttctgggcctctgtaagcagttgtctatgctactgtctttgccttaagatcatattttatattttccaatgttcttaactttcgttgtataaccaattaatttactcctgacactcatcgatggataaactacaaaacctctgcatgtttaatcatgggaaaggaatgcagcaaaaggacttaaaatatgctgtggtaagtcattttgaagaaacatgaacaatctatgtgctcccttttacttttttttttagataatgagaatcaattcattgaaatgaaattacacccggcaaacgcatcaactagggatgcacacaacctgaaaatgaaaaaataattaagatatatacttttcttaacaggaattaacttctaggacttgaaaatggcagtcatcttagtagattaccaagttgaattccagaggaattcgtcatggcacggcgcacaccatcgagtgccaattcaggagatgaattaaactggccaagaattgcagcagatatgcacatcagtaacatcgccaaatgttaattacaaatttataggtcttaatcttctgcgtgcatgtcaatctctatgactgtatcttcatggatgagttcacctcgtccatcaataatcttctgaagccggcatgtaaattataactatatccagagacttatgagagcatgcatgaagcagtcctctgatttttggttttgtattcacctgactgtctgaagtgttggttaatttaccataattatcttatagataaggacagtgaaagctatagttagactgccacatcatgcatatagaccagttctctgattcatgtgcttattactgtaacgtttcttatcttgtagtttgccggattagtagttttgatgcagtcactccaattgcgatggtttgcaaaagcatagacgctacagttttgattattttgcctcaggtagaaacaagaaacatggatttaggtggacacagtcttttcttagcctgttcttgttatgttgcttcttgattggtattgatatggtccataaattttttttttgccctttgtaattatttgcggtaagcctatattgtcatcagatcactgaactcttcaaatctatcgtaatgtatatattcattcatgattcatggcatacatgcaagcgtgtgaatgaactagcttgtgtattactaatggtgcctttgttgattaggatatacttaaaattaatttatttatgttctttttctctgctaattggcaattctctttaatttgctattttctgtacaataactttttaataataggtagagatccggcatctatatccacaagtggatatatacaacccaaaagttataatcaggggtacttagaccctaagcttaacaattgaggagaaaaagaaaaagagttgctcccttcgttttatattataagtcgtttgatttttttcctcaaatttttttaagtttgattaaatttatagaaaaatacagtactctatctgtttcatattataaattgtttgacttttttcctagaagttgtttagattgatgctattttcaatcatactatttttgacaaagttgtaaaaaaatatctacatttagtttattgtcaaactttggtaaatacataagaaatcatgtcaaaattttggtaatattgccaacttggtaatgtttattttggttacaatctgaacaacctcatggtcaaacttagtttgaccaagtttatagctagaaaaatatagtagtaatttcaacacaaaacaaataaattatcaaaatatattcaatattagatttaatgaaactaatttaatattttagatgttactaattttttctacaaacttagtcaaacttaatagaaaaaaagtcaaatgacttataatataaaacggagggagtagtagactaagagcagttataatagcaagctataagccagctataaccacatatcaagaagaacagagaggagagagaagaaagcgggctacagatttatagtcggctgcaacacggactccaaaacatgtgtgtatgagaggtgggaccggatattaatggtatagtatatttttatagttaactattgtatgaatgggctattatattagctatagtcgttgttttggagccaacggttagttatactattaaacttagcaagtttaatagtatagccaactactagctccaaatcatatataaccaatgtaatagctaattcatacaatagttgcttactatactattaatacctggtcccacctgtcatatacacattacgttttggagtccgtgctacagctaggcacagatctgtagcccactgctcttctgtctcttcttttatcttttaaaaatatgtttatagctagcttatagtatgctattatacctgctcttaaggggaaaaaagttgaagaccttgctaatccttgcaacaatgatacaccacatcgctcgtttatctagaaatattgatgttagaattgtcctttctaacatcaattattgtataagtgcattttgaaagagtataaacgaaagcattgaattgggctcacttatctggggccatttgttgttgttggtagatgtgttgcttaccctggaattgttcagcacttcagctatatcttggtgcttactcatttctcttttttatggtttgtccacttattagtgtcacagttagatagctcactcaagaagactcggtataatgatagttacgtacttacacccattttttttcagactgaaacattctacatcgctatagccatgcattggactggtccaaatttaattaggcatgcatgaccacttttaattgtctcacacttgagatatttagcgaatcttcttgtgatgtgtcattatctagtcatatgaatttttaatttgcatcatataactgcaaaaatgaaaaactgtagttctttttttcgagaggctactgcaatcagctgaacaccaaggttgcaggtaaggttgcttacttgctttgcatcgctttcgttctcacagatccatcacaaaaaggtttatgtataaatagctaattaacacgttgcgtcaggaaaaaggtacacctagaataagtccactgtttgctggaactgccggatttatcataaaaaaatcacatcttttttcagctacagaaaacataaaggtggtagcctgagatactgacgatctttgcatgaccgggcagactcttatatttgtttgattgctaagtctgattgctcccttaatcagacagtaaaaaagatgttttgtaaaaaaaaaatacgttgttcagtaacctaaggtgcagccatttggtaactatgacattgacaggtaagagcaacattattgcaaatatagttggggactatacaaattatagtgctcttacacgtactgtagcaattaaaacagcatgtgaaaaaaatgttatatttctgtaagtcggttttagaaatcgacagattactcaaaaatgttactatttgagtatgctatgaaaaaaatgttactattcttttgagtaggctacaaaatccacagaaatttggcaagcaggggcacctctttccttcctgcctcttgcttcaatgatgtcaccctctaattgattgtcgtcgtgctctcaccatgcacttagggcaatagcaatgcgtccttcattattatgtccttcatttcgtttggcccgggctgccaagtagacctcaagaacttcaaaagacacaagacccacagtgcattttggccttaaactggatccataaaaatctgaagacaagaattccccatctttatcttcgttgcgtagactccaccaccgacgccatttaccgcctcgttttcttctcggttcccacggtgccgctcccctttgccacattaccgacacagctcctccccctctcccccgctccccttctccagaagcgacgctactctccctctcccactggcgacgcctctcttcctccctagctctaccgctccccctcgccatctccgcagcttgactgagctggagacgactcgacgacggacactccatgcccctcctcgccagatccgggataagagtcgccaaatctggccttggaaggtggcggtggcacgatgacagctgtccaacgccccccttcacggcaggggcagcctcgacgatggcggggcggcctcaacgaaggtggttgcagctcgacgacggtgggggtgaggggatggccgtggcttcacgttttggggcacggtctcgccaacgcgatttcgcccatctcctcacgtgtcacggggcttcgtcttgacaggttccgatgaggtacgggtgatcaaatgaagctccccgttcttcgcaggggctcgctccacaccgacgtgactaggaatcccaagctagtgaggtgaggccgaacaccacctcactatattgtgaatggccttatggtgacagagacatcatcattgaggattcttacgatgaattgtgattatccacgttatttcagttgtaaccattgggtcatttctttgcgagtaaattttaaataactataaccattctatcaaaattatcaattcactataattttctttagatatttgagaaaactaaaacaatagtatatgattttattataaagatacaactttgcgtttttgataagtttattccgacctatcatacctgcaatatgtttgctggtgttagtggggtccacatcatcatacacacaaagagggctaaaggtaccattttgtgataaaatcatttgctatttgttgtgattttgtgaaatacacataaaaaattatagcaaaataattgttttgacgaattaattatatttttatgaaaattactctttctttataggttgaaacacacaaaaataatatttcagtgagagaaatgttagttagccagctcagtcggcagcacagcacgtcaccatccagtttcccgtccgcgtcgatcaactccaaccacgtacgtacgcaaccaatatgcaagccacggagttccagctcggagagccacatgtcatcaaaccaaggaaagaatccacaattccgcatgccatgtcagcgagattgagacgcagtccggaggttggtttcaactgcaaggtctgatcttgtattctcgtttttcatgctcatgctaaacggtactacttgttattaaaaaacattgtatacatgtttttttagaaaattatattaaactatattttagccttttaaagttaatacttcattagttatatgctaataaactatctcgtttttagtgtgcaagaaataagtttacaactcatcttcccgaacaaagccttatatttactccctctgttataaaatataagtatttttggagtagtgctaagttaaactttttaaattttaactattaatagtgataaattaagaaagattaattatgcagatttgatgttactatatttattattaaacgaaatatcataatatgtaactctttttatttaaaacattttacttttatagatattgttggttaaaatagtatctcggagaccatgtcgatgtctaaaaatatttatattttaggatggagggagtatctatttccgttttatctcgctacgtcgactgatttggcgtcgcacgcgcgccgaccaaacgtactgaacctgaccacgacgacgacgacgacgacgacgtcttctgcacacgctaccggaggacgcgcctgcgccgcggctttgctttgccgaagctgccttccagcgtgcgctgctgccgactgatgatatatatctcgatctctcctgaaatatatacctgacgatgttgaacgattccaatcatttgccctgaacatttcctcatgaatattttcaccaccggcagatatattgatcggtcagtccacctgtaatctattttccacacctgaccattttctacggtaataattcggttttactttttccaatcgtctatatattatggatattatgggtaattgttatgaaactattatctcctgccagagataaatatggactcataccaaatatatggaaacgtatcctaatagaactcttcctattatgggtatatatattgagagagagggcttgagagtttggttgatgtatccacatctgagaaagcaataaagctgtgatgcctctccctatatccatgttcattgttcatctactatatgattgtgtgcatgagatcgtcgttttctactccggatcagcgagctaggccactagttattcaatacgttatcggcacgagattgctcgtacgctaatccgggtaagtgttctagtagatcaattgatttcggtactaatcagattgatctgttatctgtgtactgctcgtcgccggccaacacgaccgcccgcccgtgcgcacctgcacgccgcgctcgacgcgtggctaatggtcgccggttacgacgccgcaccggagcatgcacggcagcaggacgcatccagccgcgcgtgcccaaggcaaccagccgggcggctctaccacacgcagtacgcaaccctgcggctaggatccaggagcaaaggatcaagcagacaaacatacatgcacatgaatgttcagattggtttatgaaccaatctaatacatgcacgtatcgatctttaccaagcctataacaacatgggtgtgcaacgacgtgtcgacagtgctgggctatacacagctacaccatcacgcaactcgtcgacgccgcgtcgccgatacgctatgcggacgtgcataggcggatcggctacctttacatcggataaacgagataagtatcagtttcatctattctaatactctgcagtagcgagagtaatatgttagatcatgcctctagtcgttttattttctcgcatgaatagatgtatttgtccggcctttgcgccgactcttctcttgttatatcgccgaccacgaagtttgacaccacgcgcccaaatgcgcttaccatgcacacaagaaggtgcacatacataatccgttgaattgaacgacggattgttgtcccgaacgacgacacctaacactcggtaacacacgacaccacctagaagttgtcgtctttctagttaacatagtcgttaatctatgaatatattaacacactcgtcatcaccgatcttatggatcagcgcgcttgggacactctgtcggttgtgacttgtatgttaataatccatcatattgctatctgtatgaagtagatggtaacaaatccgagtcatcggcacctgcatgcgccgccgtcgccgtctgcacgtagcaacaccctgacgccaccgcatgacgtcttcccctatgtcaatggttgccgaatcaatccagagacattccctcgttgatccgccatctgaaacgccgactcgacggcctttcgaggccatccgtaacgcaattgacggccgccgcccgtagcgacgccgaggagcttacgcatgcctcccctcgccgccggtacgcacggcatgcctcccgcgctaccgcacgcggccgggacgagggttgaagccgccgtgagcgcccgccgccgatagccgtccgccatgccggcctgtatgccgagccgagtttcgtcgacacgtaacatggagctatgattgtcggacgccggtcatggcctgatgccaacgaatgccggtgtcggtgctactagatgttgcaccgccgctccgcctctaaccatggcaacttgccatactcgtccatctctaccgagggctcactagcaagtttgccattggttccatccatcgtctccattgaagaatggcaattggatcatacctcacccacttcttgtgggagaaggtcgtaatagcccattgggcaacatatgagatgggctggccaaattttcaagctagccagtataaggaggtgggccaagtagaaattggcctattaaaaggagtcggcacgaaccatgattttggtccgaaaacggtattttatttcaaaagtccttagtttccaaggcattatgcgaaactcggaaattatgcggaaaagtcctatggggcattagaaaaactaccgggaatatacattcgccatttatactttgaaccttcatgaattgggtttacgccaaatagagaagaattaatgatttataccttagtcccgtatttctaagtatttgctttaactatttagttagtttcttgaataaccataatcaatcctagaaacattgtttttaggcaaaagaacttccatgaacttgtgaaacctttattttaacaccccttttggaagcataatattatatggtttatttcctggcaattgtttatttggggtaattgattgttctgtgggttagtagttctgtaaattacacatacctttgaatagcagaaaatcatgttaattgctaggattgtaataaaaggtgtgtatagaaaaccattctttactattttgtactcgttttgtgcactttatttactagaagtaaaccggtagaatgttgcataaaaggacatcatgtaagtagttgcatgtagcaaatacatttgttgggcaaatgagtaatagaattattcatatatcttctctttgtctaattgtcgccacatttgtagaaggcataattatatattctccgtatagaataaatgtatacactcatcatgaagagagtatattattgacttagaaatatatattagtgcgtgactatcatagaagataaactaaaagtaatttatattaattgtttccaagtagatacaatgtcatcgaatttgcgaatatctagacgagaagtctatatgccaatatgccctgtaccaaaattatctatcaaaagactatgtacctatgcagtgtctatagttcatttgattgataatgttatggccatcttccacgtataaatgactttacaaatgaagtattgtttttatggatgtatgtaaattattttgagtcaattggtcatttgcatttgaagcaattttggcctagatgcaacatgtttagttgttagaattgatacacaagaagttgtattactgtcaacatgtgcatttgcacgcacatatatgacttatactattaatatgttcatgaaaaacgtgcatactcaaaatttgtggaaggaaaggaatttggtgtatttgaatttgatgttcaactcagggggagacgaatagtaatgacagtaatcttgcattcgttcttttcaggtcgtattttacaatacatgagttacattatagtttagattaagttcaatatgaagaacatggttaagctcatgtagagcttctttatcttttgctttaggcatagaagcttctgcattagataactgaatatttttttatataggtcatctcacattacctatattgcttttttttacctgtagtaattagttaaccttttgtggaataaaattgtgaattatatgtctaacattgaatgtaaatatttgtcttgcctattatttgaagtatttttggcggatgtattcttattatccactaagcctcaatcaaccatgtaggttagtagttctaagtgcattgacgccatattggcatacatgtaaagttgtttacttatgcacatgaacaattagaatatttatgtttaagcattgaagcttaaatatatccacctgcaaccacattatttcttttagaaaagttgtaccatgaagttacaacaaatatgtgggtttcacgacaactattttgtaaattttcttatgattggcgtgaaaaggggaggaatatgtgtattttgcaaattaatttcagaatatttgcaataaagaagcataagaaattctggatatgtggcaggcaaattggtgtgttataggtcaaatgctagaagcaaaaatagcccaaactattagcgaatcttatttgcgataattataaatgattgtcacacaacgaagtgtgttatttattggccattgaaaattgcatattcatcaaggaagtatgaaattgcatgtagctatttaaaagctattggtttacttgtagtaaacaatatcctaaataattaatgaccttttggattcaaatgattctgaatgatcaaatgacaccacatttactttggcataatgaataaaagttagacatgtcacctaattaatttattggcatattcaagaagaataaatattctcgtagaataatgtttgggtgatttgaaaagttccatgatggttaaactatgttcatagattaatgttttattgttatagttatgttcttgaagacatcatgaagttatataatactaacacatccatcttgtgatcatatctatgttgcataaatataaacacgaagtttattgatccaacttaattcaagaattgaatataatatgagtaattggatcaagtcttgggcaaataaaaagggctagaaaatagagtaattttgtcgactagtggatatttgtttgggcgtcattgtcgcagaataataaccctctatgaattgggataacctacagtattagggatgtgcaatttttcatgccattgcattaatttttatgttagctcactacatataatgtctttaccccctttattttgtataagtgcgtgttcaatcaatgaacatttccctcgtatatcaccaccatagcatacatatatgggcctccacatgaagttggggatacaaatggaccgaattccattaatccagtgcctatgataggggatttttgtgatatgctattagataaagatcgaatatcagcatcagggggagaaaagcccatgtgttaaagatgccttatattttcaagaagaaaaaagatctttacaagtaagaataacgcacaagccaaactaaactagaaggtttagtttattctcctgtaagccagaagcgggagcttgccagataattatgaattaaaggagtaattagaagttatgtttacttgtagtaaactttctgctaacagtggtataccccgggttttgaatagtatatccacaaatgcagagtgacatgttagtcaatgttctaaaatctacggggacgcctgcggattctaagatctaacaactattgtcaatgtacccattaataactccttacaactcctgtagagtaatcaccatgaaggtgaattgcctcatgaagaggttcataatgaagatgaaaacccagaattaaagtgcgcacatctatctaattctgggatgcggaacaaccatacatcatatgtttgggaaatgactaagatatggtttataatgaattaacctcacggaatgagtatgtggagaaaagaatagttgtcgacaacatcgcctctatgattgctaatatttttgtaatgagaatccggatccggaaccaaagtccatggcagatttgcatagtagcactcatatcgggtctattgaagaaagcaatgaggttgaaccatagtcgctaaataagtctatgtgaacatagaagttcagacttaataggaaatgaagtggtgaaaagcgacggttcatttggtcatggaaaagactgatattctcctactataaatgtattaaattctgttatatatatcactggcaaaaggcatgaatggataaatgatatgcagtttatgggttatgaaaatccatatgaagttttcactagaaagaaaacaatttcgcaacatatatataaatctcatactaattagtgtcatgaagcacactatattctcatgaagagaattgcaagactcgtagaagagtttatgatgactcacgaagagtttttctcctagaagtgagaatatttctcatagcagaaaaaatgacttccggaagaataagtcgatccctataggactacgctaatgtatgaattaccggttaatctctatataacaccgataactcgtactcccatgaagtggacaaacccgttcaaacgaatgaattggaaaatcacatccactagcatgcaagtgggtcggtagttttctacatactatgaaggtgtaagaatttatatatcatgaagatatacttattgatggtatttggcaatcttattaattcccctaatgccaaaatatagaccggtttagtcactctaagtggtttaagctaattgttgaagattagtgagacaatcaaattggtaatgattgataaatccactaagagaaagttgcataatatttaacctcttgtattgagctaattattttatacataccgcatatgtgtatcgttgcaacttattttcccatagtcctccgtaaggataaaactttgtttgtattgcacatttgaataagtggttatacatattgctcctatacgttgatttatttctcatgttcatagtagaacttatgaaataagtaaacgaaagattaaacattgtggtaattttattatcattattttacacattaataaaaatatggttatgacattggaacatagaagtttcaatggatgtctaattgagggggagcatatatgctaaacattgattatcatacttaagacttggcagtcttatatttgttttaccaagaattaatcaaattaatcattgttttgataatttaccttgaaggttactaccgctatattgttgtgttaatctaagttgattaatataataaagcatatagatcattagctatttatgaagaatagtcgatcttaaagattatgcgatcaagaagatcgtgtgttgtactctttttcccttagtgagtttttacttgaatatttctcacgcaaggtttttaacgaggcagcaagtgtaatataactagcgtgtacgatgtactcttttctcctatccttttctcctactgggtttttggatggagtttttaatgagacatgtgtatagcatggtattcacccaagggggagtgttatgaaactattatctcctgctagagataaatatgggctcataccaaatatatggaaacgtatcctaataggactcttcctattatgggtatatatattgagagagagggcttgagaggttggttgatgtatccacatctgagaaagcaataaagctgtgatgcctctccctatatccgtgttcattgttcatctactatatgattgtgtgcatgagatcgtcgtcttctactccggatcagcgagctaggccactacttattcaatagttataagtggctatgccagcctgcagatatcgcaagagaaagtttgactatgcataactggttgctagcttcaaaaattaacatgacatttatagttaatttaatagtttactcacatatataatagctataaatatatactacattattaatatctaacccaccgagccctaggactgatgaggacatcctccactattacccgctggcaaagacgcaaaaggcgggcggtgacagtgtgagcctctgaataatcccaccttgcttagcttgggaggaggaagccaccttaaaagggagagccacccttcccctattggactagtcttttagggagattgggcattttcccgagtgggtgtgtctatgaactgttggggtccgggcaaccttaagttattggacctcagccaaccccacttgggccggattgttatcaaggacgatggcggtgtcttcgacgttgcgatcttcctagagacgtcgtttccgaacaataatttccaaccaatctcttgtgcagacttttgtcctctccaatctcttgtgcagacttttgtcctcttgcggtggtgcttctgactgccacaagatgaccatgttgacgtctgcgtgtgtgggagaatggatccatcttctctctcgccctttccctctccaacccaaagacatggatgaagtcgagtgtagttgggatctgtttgttcttgggggttctttttgtctaggcgtgtggtgtggctgttttttttttcatttgtaggggttctttttaccgtagacgtgtgtgtggttgtttttttttctttcctgattatagcctcataaagctatatatggtctttttttcaactaatcaatataaaaccgcgcactatcttgtgtggttcgttttttaaaaaaagaacatctggactaccaaacgtgtatagtctcttagcgccgcttactaattttgttgcacttagctcttatgtttgtgatatatatgacgggttttgatctgatgagagtatgttgttttggtatcaacgtgtttgtgccaacgggataagcccagtgaaaaagtgtactaatctacgcaaagtagatgaccctttttttacaatgctttagctacgcaaagtactcaatctaatataaattacttattgtccgaaaggaaagaaaacttaatgaacttgtcaaatagtagtataatttactatcgtatttcatattataagttgttttaactttttttaagtaaaacttctttatatttgaccaatcttataaaacaagcaacaaacatatagtaactttttcaacataaaacaaatatattattaaaatatattaaacttaattagatttaatgaaattaatttagtgttttaagtgttgctagttttttcaaacttaattaaacttaacaaattttaactaaaggtgacttataatatgaaaattgaggaagtatttagttttaaacacaactttcgtgagctaactgtaaagtgtgtatactttacgtcgctctcatacaatgcatttatctaggtcttagtagtagacatttgaatttttgtagaacctgttggagtcatttaatgatttgtacattaaacaacggtgtctcagatagctaggcaaaattgtcgtgcaaccatgcatagttgagaacttatgttaaatatacttctaaaataattttatgatagttttatatttaaatcaaacatcggtgttgcaaacctatgtaaacggtgataagggatatataatgctatctagcatttcataagttggaacataacttatataattataaaaagaggtaaatgtgtttagggagtaaactaagtaattaagccattgtaggagggtaaagaaagaaaaagaaccttatcttaatttgtgtgtatgcacaattctaattctagtatcggatgggataagtatacaataaaaaatatttgttactgatgtggataatattttattgccagtagctagaatgtgtcctattgaactttaatttctcttatgactgaaaaacattgtatttttcttgcttggcaagccttagctaacaaaattaattaattaattagctagctagtcaaccagagcacgatcttctctctcggaagagagaaatagtactccctccatattttaatgtatgacgccgttaatttttttgataaatatttgacctttcgtcttatataaaaaaattatgtaattataatttattttattgtgacttgatttatcatcgaatgttctttaagcatgacataagtatttttatatttacataaaaattttgaataagacgagtggtcaaacgttggttaaaaagtcaacggcgttatactgtatacggagggagtattaattaaccatccaacctcgatcagtcggcagctggtcaacatgccaagatccagcttccccggccgcgcgcggtcaattcaactcccaagtcccaaccacgcgcgcaaattcccaagtcccaaagctacaattaacgaactctcatcatcatcggaaaacgccacgtacgcatgcatattcgtcatccaagacggtcacaaccactgatatgcaacattgcaacgacgacgacgacttctgcagatcacacaacgtactgtatatgctttgctcgtcgtcctgtgagcggccggcggccggccaagctcgccggcgccgctgctttcttgaattgccgtatagctgagatgttttgccgactgatggcttatgtgtctccaagtcgagtactattagcagctgccggttgtttttgaacggttctaactcttcgccctgaaggatttggcaccggcagatgtacagtttttctctttatttcacacctgaacagtcatgtgtatttttacacgcacatgcgtgtgtgtgtgttttatgatcaggttttaccctttccaacgtcaacgtccatttagagatgttatggtcctcgttctctccgtgatgaattctctcattagagactagctaagatggttgcaattgcttctccataacgaatcaaatgaagggagagaagtgtcccaatcgggtctctggcgggagcagggatggccctccatcccctatcccaattctttgcagagacgacccaattagggtcaaaatccaatgcaaagttttacattcgtaaagattcaaaccgagccatgatcagtataacggatgaatgataaccttgtgtctcttgccatatggattaattagtgggtatataataatttattaatatataaagtgtggatgatatgtgtatatattaaagatattgatatttgagatataaatgatgttttaaatgaggacgtgggcctagtgaacatttttaattccccgtgctggtcgggaggtaaaaatgttccacgttgcagttggcaagatggggaccagaaaatttctagcccataaagattgggatttggatatattttctcgtgtaaaattccccgctgccatccctacaccattcacgctagctatatatgcgtgtgggtaattgcagttaaacctttgggttggcatcaaaattggatattagaattaacgcgatgctctattttttttaagtcaaacatggagaaatcaggttggtgtttatatgacaaaattcataaatatttttttaggggagcatatatataaatattgtgtttgaatcaaacttatatggttaataagttgcaatggcttaatagatttaattaattgaaggataatcgaaccgtgcctcctctgtttccatcttttttttttcatttcaatatagaaaaaatatatttaccacatactatcacaaatttttttgacataactataaaaagatatttttgacaaaaatatcacaacattacatatttaaagtcattctatcataaaacaatatagttaatgttaaacttatcacaaaacaacatatttaatgaacggtattgcaaaaatatatatttattttattatcaaggtgatgcagaggatggaacctccacaatacttagttttgcgataaacctaatattgtgacttaaattcagtgtttaaatatataaatttgagatatagcagcttaaattcataagtttttattctacaattatgtggtttaacaatgcaaagaccgacattgtccaagatatgcataccaagttgtgtacgatataccatcccctctccttacatataaaaataccatgcatttactccataatttccacaacttgcacaaaccaaatttaaaatcaccaactgacaagaaaaattcaacagtgtgtacttgccagacagaaggaaaaaaacccacaccttttcgcagactcacagaaaaaaaaaagggaattaattgcatgtgacaaatacgcaaagcaaagcgtaaagtgacaggtagtagtaattcgatggtttccatcaccgtcctcacacacaaatttcaaaaaaaaaaaagataaaaagggatatatcctttgaccggtcaaacctcgcgacttcttcttccacctctcgctccgggcaactatatatatgccctaccgcgcgcgaacgccacaaatagcaaccaagaaaccaaactaaccctacccttgctgcgctgcccatttccgtcgccgctgtcgttgatatctccggcgatgctctgcggcgtcgagatcctctgctccgtcgtcgccgtcgtcgcgcgcgtgctcggcagggcgctcatgacaatctgctcgcccaagttctccaccgccgggctcatcggctcgccgacgacggcgtggggcggcggcggagccaagaagaaggtgcacatggagagcgagaagcagcagctgccgccgccgccgtcgccgccggcgctggtgctcccggcgttcaagaggaattgcaccgaccaggagcagagggcgccggcgacgtcgacaaaggcggcgagggggaggccgccgaggctggtcattccggctgcggcgccggtggcggtggcgcgcggcggcgtggacccgttcggcgggagggagacggacgtggcgacggagacggaggtgaagggggaggggttctgcctggcgagcaggagaggggtcaggcatgcaatggaggatggatatggggtgatcactcgtcacaagattgaaggaggctcccaattggtaaatttatgtctaattaatttgctcaaaaaattaggatcaaactaatttgaatgttggaaattttggggggcgattataaaatgaattaagagacaaagaggtatgaagatagatcaaggtggtatgaatgatagtagataatatggataaacataatttcttcagatatatggtgcttctatgatcccaacaaagctaagttgcacaaatctccaagcgtttttgttctggtgtattacaaatcaagcaattagcgtggctatacaacagttttacttattgaaatgcttaaaatagaacagaaatttgtatggattatttgccgtcttctgatcttcctaaaaggataattcaaggtccataaactaacgaaggattagtactcttcacagagacaaaatacactagtataactattttgaatcaacacacttttattatatatagtgattccataatctaatcaaaaccaaaattgcacaaacctagctaaaacaaatatttttcagggctcgatctggtcctgacaaaatagaatttcaagcttgtaaaggcaaaagggtaactatttggggggaaagagtatatgtttggcatgcttacaaaatttgaagtaactacaattcttaaaaacactatcaaaatttttgtagaccatgtgtttattatcttgcctaaattaaggagaatttgtagtctgtaaactaatgtaataattgttcctaactgttttgaatcaacacacttcaaggcttcaagctatatcaaagtgatcaacaatgatttaggcactctccgtagtacaatactacaatatattagtaaccctgttctttcttacatggcgtattgtcagcatcaggctcttccattaatatgtagtgatttcatgatctgatcaaaaccaaatgccacaaattaacctaaaaccgagattgttattgaatattttctagggctcatgatattgacaaagatatcatttcaagcttgtaactaggcaccatgataatattatttatagaaatataacgctaatacttaattcttatttatatctatttaaatcagtgcacttgaatattttccagagctctgtctctgtgcattgaaaatcaactataaaagatataacatgcatggctttctattactcataagcaattctacttgttgcagcaaatttatatgaagtacatatatacacattcaaaatattttgtataacttcccttgataaggacattcatattctaacctaaatactaagacctacaatttgccataaacaacaacaatatatatatatatatatatatatatatataagacagatagaggaaaacttgtgggctcacaaaaaaatgggatagcatgggcaacacgttcatcgacccacatgcaacgcacgctgattccagacaagaatcttttttttttaataaaacgacgcattttaccaggtctccattttgcttagccacgaaacttccaaaagtgcatcatttgtttcaagaagcatatatacacaataacgcataacgtgttgatcaaaccttcaagcagcaacaacttggttcgagacgttcacattattaattagtttcaatatttttcgtcagtacacaattaagagtaataatgagcatcggttaagtaatcaaaatacagcagtactacacacgcagagccacagccactaattgagactctcatgatctgtacgtctgattttgcaggcgttctacggtgtgtacgacgggcatggcggccgggccgccgtggacttcgtcgccgacaagctcggcaagaatgtcgtcaccgccgccgccgcggcgacgacgatgagccgacatcaagcagctggctcatcatcgccgtcgcagcaacgtcgagaagaagaggacgatgtcacggcggcgatcagggctgcgtacctgaccacggacagcgagttcctgagccaggtatattagtcaactacagttactgttccgtacgttgtaagtcattattttagttttgtgataaaccaaactataaaaaagaatcatcatcatctatagtaacatatatcaagatataaatgatagtggattatatttgataaaattaatttgacctgttgtatatgttagttgcttataaaagatcttttataaataaacttgataaagttaagtttaacttttgataaatgtaaaatggcttactgtgtagggaacagaacggagcgactgaatgacgtctagctgcttgattgcataatgtgcacatgcatgcatgtcaacactatattaatcttaattagaaattaacatgcaactgtacctgtaccaataatatacgcgatgcaacagcgacatacaactgcgctgctgctgctgccgctattgttgattaattagttggcgatttattaatcggcttgactaggtcttgcatgaattagcagatgaactttgaacggttcaaaacctgctatcatttttagctgtctgtttgtgaggcaggtttgatgccgatggtgttgatggccacgttacgcatgccctcacgtactgcaacttttaattttatccgtaatccggtccagattaattgagttccgttgccgtgttgcttctggtgtggccgacatcgaccgatagctatatcttgttttatgaacgacgatagctatatcttgtgattatcaagggagggactacctatatagtattagacagttttttaaaaaatagttttaaataataattatattgtgtaattatattatagctatataactttgtgtattatatgcatatatatagttgacatgctaaaattaaaagtattttatttcggtactagtacaactaaaagcacatatatattaattagtacaaaagaaatgtgcaactaacgtacttcgttttgatgatattaattaattattaattagctaatgttgatgtacattattgcttgttgtgtagggtgtacgcggcggcgcgtgcgcggcgacggcgctggtgaaggacggtgagctctacgtgtccaacgtcggcgactgccgcgccgtcctcggcagccgcggcggcgtggccaccgccctcacctccgaccatacccccggccgcgaggacgagcgcctccgcatcgagagcacggtacacaactatatatcatgcatggttcttgcaagattttcaatggcttccgtccgccatgatcgcgcgtgagctcgatttaggttttatttagggagcttctaactactgcagtttctcctaaaattaaaagctcccaaacagtccatcttttagtacagattctaagaaactctagttgtagaatctagaaaatgaactagaaggcagaagccgagaaaccaagcttttcccaattctgataagctaactactagccaactatttcttagaattttaagaattttaagctcccaaacaagcacttagtcgtcgctgttgccgatcaattaatgtatgtgcgatgcatttcagggcgggtacgtgagctgcggcggcagcggggtgtggcgcgtgcaggacagcctcgccgtgtcgcgcgcgttcggcgacgccggcgtgaagcagtgggtgacgtgcgagccggagacggcgcgcgtcagcctcgccgccgacggcgactgccgcttcctcgtcctcgcctccgacggcctctggtgcaaggtgtccaaccaggaggcggtcgacgccgtcgccgccgccgccgccgccgccgccggcgtggccggcagcacggacccgtgcaaggagctggccgccatggcgaggagcagagggagccgggatgacatcaccgtcatggtcgtcgacctgcaaccattcttgccggtatagagccggcaaacgtgcataccgtacgaaacaattttgatgtgatttttgttttagaagttatactacgaaaagatatatatccgattttgtctttctttttttttctcacttcagttgcacttagaagttgtaacttgtacatgtgtttgtaacttgtaagtggtttttgaagtgagcttgctaggtagatgcataagagattatacaagagtgactgtaatttctttcttacttatataaagggggcttacgcatgcacaccatcacaaaatgttcatgattgtgtttattttaatttaacattgcccaaaagacagaggctgataataaatatgtaaaacctcattaaattcgaaaacacactcatgtatgtgtagtggtggatataacgctactcaggtactcactgatctggctgctaaaaagctacttcctccgtttcatattataaaactttttagcattgcccacatttatatatgttaatgaatctatacacatatatagctcattaactattttttctataccaacatggctattttattgtataaatagtttttgcaacttacaagcttattgaattactggaatttagggaaaatataataaaaccatttattttagataatatgataaaccccaaccagctctatctccaacatggtgtatatgggccaaaatattttttagataatagataaaatccagcatttgctatcgccacttattacatatgtatggtttagaaactgtgcataatagtatctaacaaaagataaagagaagacacgttataaagccacaaaagaaaggaagaaatacaatttatttaaagagcaattatattagtaaatctccaattaaaattgatgaaaatttatataaccgtcgatcgtctctaagttccggcatacaacattaataaaatctgtatcctatatatacatttgtactggggcccaaaacaaaatatagttaaacaattcataaatgcattcaagcaccagtacatcctcatctgttgagcccaactgagaaaatccactcttagaggtcgaattttttttttatgaatgtgcaagagatttgcctgagaattcaattgtgggccgcaggatttttacctgaacccttttcaataaactacataaataaagtatataatacatgaacaattctattaattgaaaaaaagtgagaatagaaatcataaccaaattactcaaataaaaataatatcaagagggtgaatcctggagtatggaagataattaccctcatagtttagccttttataagcataagagaaaatttaaatttaaaaacataattttagagttgatttgaagttttttttgtcacggtttattttctagcatttgcttttaaatcgttgcacttgtataaaaattttaccataaattatttttttaattattaataagtagttttgatgggttggactggaaagtggagaagcaggttgctcaaggcaggggaataagtataatgttgtctgagaagttgagagtggagtttgcagggtaaactagttataggttcgtgcaatgcaacagtttgttaattctgtttagtgaaaggacttgaacagggtgggggttgattggttttttaaactatggtcgttttctagatatcagtttttatgagaggaaagcggtttttagaaggttttaagtaatagggatttaatcgttaataagccgtttggatggattggactggacaagtggaggagcatgtcgttcgaagcaggggagtggagagctgacagtacccacgagcagcagcacgctggaaggggaaaaaaaggagaaagagaagcagcacataggccatggccagcagcagcacctggagtggggggttgagggttcaagatttccagtattgcggttaaggatgtgattcaaactcgacgtcgtcgatataagagatctaaagacaatttattctgaaattatatgaccaaattaaagtggaccaccctaaaaaaataaggtggaccaaatcattttcccagcctgttagtcgcctcagtccatttccactaattgaaatcggaataagttcaccgcccgtccctcaaccacaaaattagaaatctctacccctaaattatacaaaaccgttcactcaaagtccctaggcagtatatatgggtggttttgctgacgtgacatcctaatcagaaaaataattaaaattaatatgtggggccacatgtaaatgagaggaaatggtgcgtgcccacatttatcccttcttttctctcttttcctctcctgattctctcgacggcgccacggcggcgggagaggagaaatggcggccggcgcgacggcgagcttggcggcagagaggagcagcgcgtggcgcaccggcgggggagaggagcggc

SEQ ID NO: 14225 - DNA, 16612 bp, Oryza sativa
ccacttacacccctagtgacggctgcacatgttctttttttactccatatatattgtatgtccaacttgttgacagaaaatgtatggcactattgctgatatggtttaggagtgtctattgctcacacaaacttactagatgggatctggccaatccaccaagtataaagcaacattccaaggcaaattgtagcatcctcaatgtttgttgcaaaattagagaccaagttgaacctatgtcagctgacaatactaggtaggagagacatcacaatgtataaatacgtagatgagtaatataaggtggaacctgccttaaataaaatccccaaacatgagtcatgccataattttaaaaagagaagcggaacccaccataaatagtttatacctagtagtaagcttatgccctggaagtggtagttactacctccacggtgtatcttacatgataacaagaatgtgtttactacttattatcttctattccactatattgtggaggaccttacgactacatcaatcatagtgagttaatggcatagtgggaggcaacaaatgaagtagtacatcaatgaaaaaagaaacagaggcttgtttgaaaaatcatattaagtagcgacaataaagtacatcatccatttttctccactatccagtctgtgtggccgtgctcgtgctcgcctctgagctagttggtgatatggactttccaactaggaacttggggcgcttgacatgcgtactgagctggctttgcaatagctgcaccagtttctccttaggaccacatttcttcagaacaagctcgttaaggttgaggagatgtaacactccagacaagccattatcatcatcgctcaatttctggcacctgttcacccaaagttgttgaagttcaggcatcgcacccttctcaatgttaactgtttcaataatctccaatccatcgatatcgaggaatatgagctttcggaatgtgccatcattgaatatcagtgacttctctttgtaggacttctcccacaagcctagtgaagctaggatgcgcaggtccttgaggcgatgaatgtcatcctgctttagttgtgtccctattagcttcaccttcgtcagatcattgagtgacttgatccatacaggaagttcgtccaacagaccgcacaacctgagtgacactagatactttggtggtgttgcatctatgtccttgttgttgacaagaaaatcaagtgactcggagcgcacctcaagccgttgcaacctattgaggttctttatcgagttccatagctccttgccttcctcctgaccaagacctgtgacccctagcctttgcaagttcgtcagcctctccagcttcccagccacatctttgctcttgcgcacattgaccacactcaacatgtgcaagttccttaacttctcgattccttcaggaaccattacactgaattgatccatgccagatatctcacaagattgggtgttgtaacaatataggcaggatgccaagttccccaacaggttggaattgtggttttccatcccaaactgcggcatcttttgtagcaaatctcttgagaaattgactccggcgagaaggtaacggagcttctcaagtttagcaatgccatctgggagctgggtgacttgcgtgtcttggatgtcaagcgtctctaggtacagaaggttctgaagagaagatggaagcttggaaatatctgttcctctaagacccagatatcttaggtgtctcagctttcctatgtgcttaaggtcttcgttcttcagattggccatatcttccaggtcgagaacacgaagcattcgcatctcaagggtaatgagagatgctgggcactctccaaataccgttagcgatcgaatcaatgacaggtttatgttctccaacttttcatccctcttcttccatctgttcacaaccaagtggcgtatcttactttgtggaacctcgttacagtgcttcttgatgacaaagagctggttctcatcgatggacttggacaggattatatggagcatcatgccatgaactcgacagcgatcgactttcaggccatggctgaccttggaagattggatcatgcttctgttgataagctcattgaagaagcgctctcccactacttcaacgggcatgtcgcggttattcgctatgtaaccttctgcgatccatctcctcaacaagcgggtgcgccggatctcgttgttctcggggaagatactaaggtataagaagattggcttcaggtgatatggcaggccatggtaacttgagacaagtaccttcgtgatgtcctggagctggtcggactccagctctactccaaggtgttcgtgcaacttcttccattccattcctgttttaggcctattggcaaggagacctccgattgtggatatagcaagaggaagcccccagcatcccttcaagatgcgactgatgtgcggtttcatgtcctccggcaaggtatagtttggtgttctgtagacctttaaatgatggaaatggaatgaaataattaaattaatgagacgagcagtgcgtaggccagcgtttgttaatgtttgaaaaatgaaaatgactatagaatgaaattgaaattatgaaagccaaatgtaggtgcatgaaggaatcttgaaaaaaaaatttactatttcggaatacatagttatacccgggtcactgaaatttcaggggaaaaaaggggaaattttcaacaatttcaaaatcttgataatttttgcataatatgaatataattttgttaatataaaaaaacatactttgcacagtagaacatccttcttttagaaaatggattaaaattgagcttctacagccggtagaacatcctaccaacacaccgaaattttggaatttcggatccaaaattgttaaccctgtctagaagtgagttatatgtatgggtgtcgttcttgccaatttcccactgaaatcggtcaggtgatttctggaaagttcccatttctggtttcctccaaaacttcacttcctatatgcaagggaactttatgagttccttttgtccgaataagatcctcgactctatttatccccaatcccctcaattttacacatgtcataatttttttaaaattttttaacaaaatagatcaatatgtgatatatcactttatacaagttgaagtccaacttatacatgtagaaacaatatcaacaaatttgactctgaacagaacatgtaattcctagtcaaatttattatttttgtttctaattatattggtcaaattcaattgtgcagtaaatatcacatgttgatctatcttaccattttttaaaaaaataatgattttttaatgacatgcacgaaaaaagtggacgtccccttgagagacgaaaatccatatgtggtggtgataaattcagtccgaccaaccatgccccactatgcataaaagttttttaaaacaccttgagggatgtccctatatttgtttgccatgcaaatatttatgaaacagtatgtttaaaaaatatcaataaggattacagtctctattactgcatacagtcgttaatctatgattttcacattaactatgttttacttaaaaaaggagtgattttatggtcattgagaaagtatccgtaggtacaatattattttaaatgtaaaatttagtacctccgatattaggagctatggaaatttgcactataaattttagtaacactcttggtgcctcttagagactttaaaatttctcaaagaaaataaatataaatgttactccctccatttcaagttataagatgttttgacttacaatgttaatagacaaatatagtaatatttatattactaaattagttttattaaattagtaattaaatacttttttataataaatttataataaacttagtcgaacttaaagttgtttcactttgataaaggttaaaaacatcttataacctagaactggaacggaggagggagtatcaactatcaagcaaagacatgcatgtacctttcgacaaaggagatccttggattgcttatcatccagacgtttcagctcgtagacatggccatgctcctcaggcgcgaggcccgcgcagtgcccggcgacgtccttacggcgcgtcgtgacgatgacgacgctgcccttgttgttcaacggcttgaggacttgccagatctgatcccactcctcctggctgagcaggtcgtccaccatgatgatgtacctcttctcccgcaggtagtcctggatgacgttctggtcgtctccggctgcggcgcccaagccgaggccgagctgcttcctcagccgccgcctgaactcgtcggcgccgtcgagcgggtgcggcaccgtcacccacgcgctgcagtcgaacacgtcgagcaccgccgggttgttgtgcaccatcctcaccagcgacgacttccccatgccgcccatcccccacaccgccaccacgctcggcgacggcgagccactgcagcgggagatcagatccttcagctgctccttctcgcctgcgcggccgatgatctccgactcctggaacgcgagctcgtcggagctcgagccatggccgccggggagcatggcgacgacgcgctcatggtacgtgcggctcgggtggtggtggtcgtcgacgacgatatggtaacgcagcctaagctggttgagctcctcgacgctggccttgagctcgcggatccggtcggcgatgcggccgcgcgccgcgagggggcctggccggagccaggagctgcccgtcggcgacgacgagatcctggcggcgtagagggcgaagtcgaggaggcagtcctcgatgtcataggccaggtcgcgcacctgcttcacccacgtcctcaagatgtcgttgtccccgcctccggcggtggcggcggcgtcggggtgcaaggaagaggaggccgtcttgatgaaggcctgcatcatctcaagctcgttgcggatgaacttcacttccttggggacgccgaggaagcgcgcgacctcgtcggcgacggcaggcccaacgctgctcaggacgacgtcgaggacggacctcgccaagctcaccgccgtcgcttccatcgtctctctgccctctcacgattagagcctttttcctggtttaatttgcttgcagagtgcgcacgacagagcgagatttatctgcttcttgttgatgcaattgagggatcattttatacaaaaactttggcgggaacgtgcgcgatatatatgcgtacccgccatttctttttgactgcctatatgtaatttgacaggaatctaggatctaaatcttgcaaattttataccgttggttcaaatttaaaccaaaggcctagattttgtcatagtcccatatatatttgcccctaggcgtcacggctagggatgaaaatggtgcgggtatttctcgaccactcgcccaactcaaggctcgtgggaggaatataggagaaaaaaataggataccagatactatccgagttcgaatccgaattcattcgaattttattgttgggttggaggtttgctccagaaaaatttggaacaaaacgtctaccgcgttgaagcccatagccccatggagttccacgaaagtatgattcttatcatcaggagccttttgaacgtctctacgatgagtccagattctatagcagtccaatctgaaatgaaagacttctcactcttgatcggagtcgtaaactaaaactacctcttcatcaaggttatagaaaaacttcgtcatctagttctaccattttgaaaatcaattctcttttcttacgggcatttcgagttacttgttgactcacgattgtgcctattaaaagtttcaaaatgtcctctataggatacgggatgacatgtatccgtctatatgtcccatattataaaacatgtatgaaaatctattacctataaacatgataaaagatcggctaatcactattttatgagctcacatgtaatattatataatttgtctcttgatgtatctcttttagtactttaattaccttagtatatttaatatctatgaattagatatacaaatagatatccgtttctgaatctgattcaaaggaaataatatgggatatgatacaccttaatatatataatttcaatgaattagatatacaaatagatatccatttccgaatctaattcaaaggaaataatatgggataggatacgagatgagtgatatgttatccggcactacccgtatccggttccgaacttaaagggaaatataggtttggatatggaaaatgttataattcgaccgtacccacccattttcacccctagtcgcagcttcttccctcctggcccctccccctcccccaagcactgccggcgagaccagccgaccagcaccaacaccaccatcatgtcctctggtgcccagcgccgccacttagggttcagaatttcggaaatttttttttctattggaccttggccccccgcgcggtcttcggctcaagttgtatgaggcagaaactcgtcccatacatgaaattatttcaaacagatttggattttttttttcattttttatgaatttggtcaattttgtactactttgacaaaattttattcaaatggtggaaattttctaaatttttatcaaatcggtaccccgaaatacattccgaaaacggtaaattaaaccctaccaccacctccctgtcattccccctctccccaaataccccgacgccaaccctgaaatctagtttgtcgaggtcgccggagttcatgactctgtgcacgaatcttcaaccgaatcagttggatcggaatcaaaatatgaaagattgttatagcaattccggtttttttaattagaacggcaacccgctaagttcgttgacatttgcttgcctcccatgcttaagcttccttggtaagctgtggaaatttcatgtacgcaatgatttaacaatttaaaactgaggtttaaactagggtactcaactttgatttctccccatattatagtaatttaatatgtcaagttgtcaacatgttagttcttgttaaggcgaaactgcatttttactcttttttttttgcggggaaaactgcatttttacttacctaaacatagcgtatagttctagtatttggttgttcaacctatgatggagtgctcagtggtggacgcagacatgggacggatatactcgataaaaacagctaattgcaacatatacttcctccgtattttaatgtatgatgccattgacttttcgaccaacgtttgaccattcgttttattcaaaatttttacgcaaatatggaaatattaatgtcatgcttaaagaacatttgataacgaatcaagtcacaataaaataaatgataattacataaactttttaaataagacgaatagtcaaacgttgaataaaaagtcaacggcgtcatccattaaaatatgaatgtagtattatataaggttttgggatttataccgaatgctctgaaattcgtctatttccatgaggcccaagacatgacctcctgttcattgatattgtttgacttgtatgctcatgcttccttgcaaatggcggaatattcatttttgctatatatagtttaaattgaggtttaataaagctaggatgccctccatattataatatataggaggctaacatgcatgtcaacacggttgttcttgttaagataaaaataacggcatcaccttaacgaagtttagttttagtatttgttgttgaacaaattaaagagtacccgacgagttagttgacattgtttacattgcatgctcacgcttccttgccaaatggtgggaattttttttctttagtttaaagtgagtttaaattaaattagggtatatataatcgggttggggtttctcttcatattataataatataggtgggaatgtggctaacatgtcaacattttttttacgtaatacctccttccgcgctaacataggaacatggctgttcttgctaagataaaactgcatgtacttaccttaattaatatactagtttagttttaaaatttgattgacgaaccaattaaaggtacttgacgagttagttgacattgtttgcattccgagctcaagcttctcggcaactggtggaaagttcattaatttttctatagtttaaactgaggtctaaattaatctgggcataaagttgggatttctctccacacagaggctaacatgtcaacatgttcgttcttgttaagataaatactactacaaaacagcgtatatatatgccacccttatcgatgccggttggaccaaagccggttctgataaggtttcctgccctctcatactcacgcgctctcaatcagtgttggttccttaaattaatgcctagctgcactgacactacgctggattagaccatctctgacgggttcaaacccttacctttgacaatgccataataactctgttcacctttgttgggtggacagtcacattttatatatgggcctgtatttttcgtcccatcagaggtgaggatcttcacaagcccacgtatgcttgtaacccgtcagaggtgagacacctgtgacgggtgcaaagtttacgacccgtcagaggcatccccttatctgacatacctactttggagccatcacaggtgactcacctctgacggactgatataccaacgctgttagagcttaggtcatctgtgacggtgtttgtttatgacccgtcaataatgaggtactttcaaaaaaaatttaaaatattagctagcttcaggatttgcttgccatgccctctaagaaatagatacatcacagatattccagccaatccccaatttcacagttttccacaattcagcacagatacatcacagaattaacatcatacacatgcattccaaaatcccacaaaaattacattgccagtcacatattcacaatgcacatgcctacctcacatttcttttgagcctatgaaggcacaaacttacccatttttatgagcacatgaagctgcaaacgaaacatggcagcctgagagatctgcttaactccagtgcgctaagggcgtgccagttggtttgatcctgcaaccagcaaggaaacaacaaacaaagtgagtgagccggtagccgattggccgatgacgtgtcgttagtgatcctagccgatatagttagaccagatcagctatggattgatgtgtaaattaagcacaaaccctaaatatgccacatcggctgtaatatcatctccttagttttgataaaatagatttaagacaatatcataaaaattgtcgatgtaacattatttagagcaagataggtaaataaaaataatgtactagctaatactctagtacaaacttatataaacaaattaatctataaaaatatatcaaataacgatcaactaccaggtttgataacctagccgatgttgatctaaacttgatatatttatatgaagtgatctgtctatataagtggcaaatatacataaaacatgtaaagtagcatctatattacgtaagatcggctgaaactccgatactatctctaattataattaattccaggttagtttttagggttctagacaatactatcataaagtaagtaatgaaacctaaagtctaaacggtcaagaaattaattacttttcaagatggtagatgccttagttaatctaatctagtaaggcaatttatccgatatcggcaagaaccctaaaacgagaaccaaccgatagagctaaattgagatactaagactagattaactaatacatatgataacagatggtcatgataaaaggattagaacatctaagatgatatattggaccaaccgatatagccccgatagctcaagccatcgagacgggttacttcttttcgagagaactcgccgaaaagaagaacaaaaagggtggcgatgcgccgaagatgtattggattgtctctctcttttacaatgatctggggtctatatttgtaccggagtacaaatttagtccattataggcacgactcaaactttcctaaagataagatacaaacaaagactacatcgcgatctcttaccaaatctctaacaaaccgacctaaatatcatagataatgcagcaaataggagttgttctaccaaggtcccacattttgcaaacattgcatgcaatttttaaacataataaaacatttgcgaaaatatagaattcaacatgttcgaaggaggaattgaataggacttgccttgctcaggagttactcaaatatctcttggtcgtgcacactctcatcaacagcaacaatcaatttgtcctctatttaaatttaaacatatattcaaacgaaaatccaatagaactccaagataaaatgtgatgcagggtgcatgaacatattcagtgtatagagggtgatttaatataaatttaggagaaataatcgcctaaatacgatgtcaaatgtgcaagttatcgtgtttctaagattttaaaatacactactattcaaatttaaattagtgaaaattttcacaacagtgatgctatgtttgagtgcgcagtattaaagagagagctattatgaaactaatccctcagggttgataatacttgttgttttggacaagggcattgtcttcaacaaacaactttaaccattattttttattataatatgtatataaatgttaacaaatatatgattttattgaagtattttttaagactaatatgtgaatatagtcaccatatttcaaagataaatattttagaaattattcataactaaagattttaaagtttgacctcacccttatccaaaacgacaagtattatcagcccggagggagtaacaaaatttggttcacgtcaatcggatctaaaatgaattttctatgattttccaaattttcagcattttatagtgcataaataattaacagaaaaccttttctcagatttaataatttgtttataaaagaaactaaagcaaactgtcttcaatacgttttcctacagggaaggcgcattttcgttctgtgtaatcattttaaaaccgtggggtccaactaaactaaagtttgcataaattacatgtaagtcctaggccaacctgtcagtgtctggcattgttcggaaagaaccctatattttatcctaattacagaacaaggtccttcttgttcaacctgggcacaggcagctcggtaggcagaggcgcggcggctcgggaagggcagcgtcgcggcttttgcgcggctttgcagtagcgcgcgcagctttgcaggcgtggtcggggtcgttgtgctgctgcgtcgccgcacgggcagaaggagagagagagaccggcggcattggagtggtggcgaggggcggcggcttcgggttggccgcggcgggctgcgaggtcagcgcctgggcgcggcagggcatcgggcagggaagcaccagccttgcctcagctttgccagcgggaatcgcgggcagaggttgcttggtcggcttggaaacgatgacctcgatctcgcacgctaggtgctcgatgaattgcctgaaaggaatagagggagaggagggagaaagagagctgggagatggggatggtggctggcaggtggggccaatggtccttaggcccactgatcagagagagagagaaagggagaagggatgaggtgaggggatttttctgggaatttccaagaaggctgagagtttgattaatttttggatatgctacagtgctcaaatgcttgcgcaaaaattactggaggttagtgtggtcaagaactccacttggtgaatttttgggatttttctcaagtcctgtttatttttgaaaattaaaacaagtttactaatttgaatcaaattttggatgttttcatccttttaattgagttgcaaaacttttgagatttatggaagtttatttcaagtgtctaccacttattttaattctttttatttgttaatatttattgcatgcaaaagtgttatgagatgcaaatcggttgtttttttcgtccacacttaatgctccatacatgtgtctaaacatttgatgtggtggaaattttggaagtttgaagggagctaaacacagcctctatctataaatagctgatgcatgccagcttcagtttctcacatccctcacagccacagccatagaccatagtactacaccacatcttctcccctacccaccagcagttcccagccatgtctgctagcaagctgcaattcaccccatgcagcacacccattcagggcaatgagatcaactttagcaaactctacctgcaccacacgccggctggtccaagaccaaaccagtccggggtcacaagcacaaacaaggaaaccgggttgggttccttggttgttaacaactggcaggtatacgacggaatcggctgtgacgccaaggttgttgcccatgcacaaggcctgcacgtttatgccggtaactggcacaactccttcaccctagtgtttgaggatgaaaggtaagcatatatttgtgtttcagtgtttgtgtctgtatatatgtgtatgcatgcgtgcgtgcatccttcggtatcaatggatgggttacacatacactctagcccctttaatcacactacaaaaataagttctacacttgcattttagaagcacatgaacattagttttttctcaatcaattgtaacgtggtagattaacattatgtatatgctacaggttcaagggttccactcttgaggtgatgggaatagttgttgaacaaggtgaatgggctattgtcgggggcacgggacaatttgctatggcaaatggtgtaatctttaaaaagttccatgaacaaaaaaaagaaggaaatattatggaactcactatcaagggattttgccctgtcttgaaagggtcaccgtcacaggtaagaacattaatctattttctatagctttgttaaatgttaagaagcacttgagataccatatcattatgggatatgtaagatgtacaacatatctatgcagggccttgtcaccaagattgggccttggggtggaattgatggaggcagagctcaagacattacagctactccaaagcgtctagaatccattacaatacacagcggctggactattgattcgatctcatttatttactttgaccaagctggagagaagcacagagcaggtccatggggtggtcctggtggggatccttgcacggttagtgaacttccattgcaatttttatttaacgacagtcatctaggagtacctcacagcccacaccacacacccacaattaatgaaaagaacagaacatatttggtgttaaattacttatacagtagttatcctttttttatgtagattgaatttggcagttcagagtttctcaaggaggtttctggaacgtttggcccatatgaaggctggaaagttataagatctattaaatttgtcaccaataagaaaacatatggtccatttggacgacaggaaggaaccccttttagcgtcccggtgcagaataactccactatagtgggcttctttggacgcagcgggaagtacctcgacacagttggcatctacgtgcatccgagataacatgtcaaaatcagtttcccatgtttgactttgaagtgtgttttctataataaataaatatgatgggatcctccctttcattccagtagtgatgagggatcctttctagctgaagtgtgtttacttctgaatttgcagtccttctgtcggtggtttcagtttgcaatgcattgtatgcatcaataaggatcttcgttgaaggttggtttggtgaataaagtcgtcattcagttagcaatgtgttgtatgcatcaataaaaatcttcattaaaagtttggtttggtgaatagttttcatccaatgagtatatcgatcatctaagctgaaatatttgtagtgcccttctttttgaagcaaatagtaccctatctaaggttggttttatatcaaccttatgaagtatgaaagcgaccgagttgtgtatgttaacttggctgctatttctcacatcacgacatcttggtatttgaaacggatggagtaatttatattcttatatttagtaaaggtatgttataagaaagagttcaatcatttatggcatcaaataaaaactaaaaattaactactaggattgcatgaaaactcttaaccacttcgaggggcaagatggggcatggtgaaaggcctcgttttcttttagtactagattcagcttatagaattgaaagaaaaacagatggcttaattctataggcggtttttcaacaaatggtaagatggcttgatgttgggtgctccaataacgtcggaccgggagcacatgtatactgaagattaacattggattatttgtaggaacacacaatataggcaaatacagtatactgaagattaacactgggttatttgtaggaacacacgatataggcaaacacaggaatagaaacaaaaccttatacgtacacacacgagctagcagctctcttattacccttataagaccacgttgctttatacatatagctacttatctatctattatatactaaaagtacattaaacatcctataaacgctcttaatccgtcatatcgcacttctgcaaacgcttctatgatgctacatggcactctaataaattagagaaattcctacaaattttaaggaaaacaaaacatctagttaatttaatttcccattgaaatagtattgaaatatccaaataacaccatatgaaacattaaataaagattaattacaacataaaaacttaaaatgtgtaacatactcgaattctcattgaaacattaacttctcatactattataaatgagttactcaccatttatcaaatgtagcatactatacatgcacgcgtgaaaatcgcggcttagcttcgtttgggattaattgtctgacgagttgctattgctagcctaatttcttccgcatcacaaacacaggagtagtacaagaattacttctttcccgatgaggaagggtgatcagtcaaacggattaatcgatcgtcctctcgtccattcaattcgataggagtacaggaccaatagcctctgagacaattaatcatacattaattggcatatgtcatccattgtgacgtcatccatgggtacgtcatcaaaattctcatgtgatgggcgtcatgacatcagggtctcacgagtaatttgtacctcagtcaaagagaaatttgcatatatgccatccttaaaaaccggtttcgctagaatgtcatcgttaaaatagaattcgctcgaatgccactctcaagctgtgggcattcgttacaatgcaattttctctatttcttacatttggagatcatttttcatccatttaatttttttctcagatgctttatcctctagctgcacgggttgaaccaaaccacatccactcgctctaagcaagcacgaggaaaggcaaccacgatgacgctgatgccacccaccacttgctccagtaccttcccatgaccgcgctggcgacaaccaccacctactctaccaccttccccaaccacccctttccccgagccgcaccgcctcccccgcggagccgcgtagcttcctcccgcggaacagcgccgtctcctggcactagagcgaggcgggcaagttgctagagttgagggaggtggagtggcgggctagtcgctggagtcgagggaggcggagcgtggcgggcaagtgatcggagtcgagggaggcggtggtgcgaatgcgacggagggagagggagcgcggctccgtgtggggaagctgcgtggctcggtggggcaggcggagcaggtggtaggcggctctggcgtggttgcaatcgccccttctcgcgcttgttcggttcttgaaaacgtagttacgattcacgagagagagaggatgttgtttcgttcaaaccatgcaggcaggagcaaaaacatccaagaaaaaattaactggatgaaaaatgatttacaaatgcaagaaacaacaaaaattacattgtaggaaatacccacagcttaagagtagcattcaaacgaattccattttaactatggctttctagcgaagccgtttttcctaaggatggcacacatgcaaatttctcccttgcctccacttcctccccttgctcgtgcctccgacctccgatgcatccatctcttccgccactgccgctgctacgggaatcgccaactcttccgccctcactggcaccgcagcaacttcctccctaatcaacatgctctcgcagaccgcgtcatcagtatatgcttcgtaacctctttcttcctcatggttgcattggttttgttattcttatgttgctttggcctaaatttatttgcgttactccattcaacagtgcattttgttgtttatttggggatttgatttgcatgccatatattaatatataagcgagcaatttgccttctagctatagggcttatttgggggacccc

SEQ ID NO: 14226 - DNA, 9849 bp, Oryza sativa
ttctctatgccaattgaagaacttgaggcacttgtacttttcccgtactgacatacgtagcctgccagatggcatcggcaagatgaaattcttggagtacattgggattacatgctgtgaacaaatacaacaacttcctggtagcattataaaactagagcggctaagatctcttaaccttatgggcacaaacataaaaagtatacctaggggttttggtcgccttacaagtttgagaacattatactcgtttccagctcagatgggtagcagttcatcaaaagatgagtggtgtagtttggaggagctgggacctctttctcagctcagggatctccatataaagggtttggagaatgtatctgccagctcttccgctgcaaaggccatgcttggtgccaagaaacatcttgccatatggtggttagagtgcactgataggcagagagatgatggattcttgaaagaggaaggaatcatttctatagacgagcagcgacgaatcaaggaggtttttgatgagttgtgcccttcatactgcttagaacaactttacatcagaggatattttggttggcagctcccaaagtggatgacatcaaaagcatctgtgaggcttgatagattgacgagtcttaagttggatggcctgccttgctgcaccaaactccctgatggcttgtgtcagctttcctgtttgaagcttctacagatcaggcgtgccccagccattgagcgcatcgggcatgaattcctgcagatacagcaacacaatggtgattgccatccttcccgagcagcggttgcatttcctatattagagacgctagagtttacagtagtgctggagttggaggaatgggtgtgggaggaacacattcaagccatgccactcctgcatgagcttacactagacaggtgcaaattgcgacaacttcctcttggacttgctgagaacatgccagggctttgagtgttctcaaattgttcatggtccataacctcaagtctttacagaatttgccttcagttgtggagcttcacctgtataaaaaccctgacatggagagcatcagaggtgtcccaaaactgcaagtgcttagcattaattactgcccaaagctcaaactattggagggaatacctgcgctgcaaaagctctatctgctagacttcagcatgaaaacactcccaggatatctacaagatgtaaagccaaagagtttggtgctggactgtagtttgccactgcttggtaacatatcaatgggggcctcttgctctgactgggacaagatcagccatatccagcaaatcagtggatatgcaggtgaaatgcgcatcaggagaaggtggtatgtgttttacacacgggagcccttcaaattggacacaaatatcgtctgctcttccatatctagaggtaaacattactcattggtgtatacttttgtcgacgtattctcttcctatacattatggagtattttggtattcttttcttatgttttggaatctgtatgtgcatagccaagaatagaatctagaagcttaaactgcatattatagttttgcctcctctaattaatccatcactgtatgtgcaaactaaaatatagtttccctggagttagtgtttatgtagagtatatggttagcctctttcttttttctcaagctccgttgtcatataactaccaatatagtgttcacttgataattatttgcccactagaataaaatttactacagtaaattaacgtctactgacgaaaagagagatatggatggaacggtttggatgcaaggcaaagcacatgatgcgattcatcaccttatcttgcacatcatctctatgaaacgtgattattgatagaagatttttccttcaagcattacatacagagctagattatttttgtctgcttgaaaatttcctagagtgatatgataaggaacaacagattgtttttcaccaagtagctcttcggatgagcttgcttaattagaccacaactaaattttactgccacaggtctaaatcgtagtttgagacggaagcccttcatcagtagcagtgtgtggatattcctaattaacctgagttgtatcgcaggcattatcgatggtttgttgaaggacaaagagaggcgcgccaaggagttgaggatggtgaagcttctgtgtgccctcctcgccgtcgttggatttgtttccattctgccacattgttatggattattgttgtaagataagacgacgttgccgccgacggatctcgccgggctgcgtaggctccttgccaccgcctcgccacagtgaggcgtagagatcagcactagaagagaagacgtacgggaacaactgtggaggccatgcagccaccgccgtggtctcccacatcgccgtttggtttctctgtagctcaccggcatgacatcttcactggctgcctcctccccacgcagcagctgttagcccaatctgcctccgatccttgtcattgtcattacctgtgattattaattgttgattgatctgatatccgcctggtctgggatatggcctctagcgttactcgcttgtcgtgcttcctgattgttgatgtaatttctgatttgtagggatgcctaattgtgaggttgatgatgttatgttatcagtgaataattcttttatgaatactcattcatcgtaacaatacacgagtaaaatttatttttacgtcaaggtgtctaccaacaactcgattgacatgataaacgggtcgggagatcctacaagagagtcaacagcttctgccgccatcctcctttaggaaagatatgaaccttgagtccttgatgtactcatctttttttttttgagaagggtataactcaagacgcacacttacacacaccgcactcacaccatgacacacttacacacatcctccttcaggaaagatatgaaccttgagtccttaacgcactcatctttgaaaggtaaaacaaagggtatatataaattaacgatctacaacaaagatatatagaagaagctcctcgctcgcatgttcagtagtactccttgctgcaatagcccatagccaccacactattacatatgtaataggaaaaatgagatgacactatatgtgccggaaagtctagaactgacacctataatattttttccacccgaacacacgcctgcagggttctattcaacacaaacagcacctatgtggcaacatatgtatgctggatgttaataggaaccggcacctatatatattcctcctaaaatataggtgccggtttttttcttctaatcaacatatttaaaattagctatcattctagttttttgaaaaccggtacctattgagcggtaggtgaagctgagcggggtgggataagaaaccgaccttaaccattcacctctctcactctccctgtccttatccatttggcttcctctctccctctcccatctccctactctcaatccatcagcatattctatgatgtgaatttgtgactctttttttaaaaggattttgtgatttattttatggagcatcacctccgcttgaattaagacgagcctgttttgttttttcagaaatgtagtacaactcataggtgcagattttcaatctggcatcgatgagtccctctcatcaataccatctccgtggtgccggctgaaaaatctagctcctatatgggattccctactggcaccgaagtgagttccgatagtagtatgtgccacccactctctccaataggagtgaaaacggtacgaaaatcttcgagatttcaggctgctgtttctggtttgcaccgatcatttcagtcggtgcaggcaatagttggtgttggaaatggaaatggtaatatgttccaaaaatggtagcaaaatgggatggaggttttttcgaccgttttgttgataaccctatttgtctaataatttctatcaaaattccaaaacattcctagtgtcccagccagcccaacccatcggaagcccatgaattgaggaagcctaataagcttttagcctattagaaaggagaagtgtccaggggaaaacgtgttaaccctagagtgtggcatgtggactttgctgaactttggtcttttcaacttatcgatgttgaagaactgttgacctttgtaattatattgttcgtcggacttattattatatcatcaatcatcacatcatggtgttacgtgaagtgtgatggttcaataatgaagttataaatttatcttcatgcatagttaaatgtgtggttatgtcacactccgttatttccgacatgaattttcgacttccgaccaatatcggtagatttcattccgacagtcccgttttcaatatatcgttattattgatattgttatcgttttcgggtctactgttctgattccattttcgagaaaaaaatataaaaataaaaatggcagagggtttcaaaagaaaaaaaaagatcgatgaagcttgcacacagaagcaacaagcaacacaggcacagccttcaacaccaaagcacaaaggtaaaacaaatccacaccgatcgagaagcatatatacgcagatcaacacggccacagaaccttagaacacacaagccacgcacagaaactacctcgccccgttaccacacatgcacaaaagcaaacgacaaacgcgtagttcttacgcgctctctctcttctagttttaattaagccctaacacagcgtacgtataaacgtgcacttatcgatcgtgtggcggccttatctataaaagatttgcttcggtccaataaaaataccccgaggtaccagtacctcacgcggtaacaaattgttttcgatcgttggatctaacaatatccatcttactcagctagatccaacgatcagaaataatttaatactgtaaggcaccgatacctcgaggtatttttttttcaccggaacaaatctctatctataaataccacatacacgccagcttcagtctatcgcatcgctcacagccacagccacagtagcacacaccaattctgatctgccaccagcagctagctagctctcagccatgtcggccagcaacaacaagctgcaattcaccccacgtagctcgctatttcagggcaacgagatcaacttcagcatgctctacctgcaccacacgccggctggtccaagaccagaccagtccgggcttacaggcaataacagagaaaccggcttgggccccttggtcgtcaacaactggccggtgtatgacggcatcggccgcgacgccaaggtcgttgcccgtgcacaaggcctgcacatttacgccggtaactggcataactcctttagccttgtgtttaaggatgaaaggagcgtaatgtataccgttaactttttttaaacatatttgaccgtttgtctattcaaaatatttaattaattattaattcttttcctatcatttgattcatggttgaatatagttgtatgtatacatatagtttttgatagaagtttttgaataagacaaacagtcaaacatgtttaaaaaagtcaacggcgtccaatatttagggacggagggagtatattgatctgtatgtatatatgtgtatgcgtatgtatgcatgcatgcacgaggatggatacactactctagctcttttaatcacactataatgaaagctaagttctacacttgtattttggccattagtttttttctcaatcaattataacgtggcagtaacctattggtcgatgtggtgttttatgtatgtgctacacgttcaagggatccacacttgaggtgatggggatagtcgttgaacgaggtgagtgggctattgttgggggcacgggacagtttgctatggcaaatggtgttatcttcaaaaaattccacgaacagaaacaagaaggcaatattatggaactcactatccagggattttgtcctgtcttgaaagggtcacaggtaattaaggacaaaataatctatttttagctttgttaaatgttatgaatcacttgacgtgcaatatcaatatatatggaatatgcaagatttacatatatgcagagccttgtcaccaagattgggccttgcggcggaattgatggagggagagctcaagacatcacagcaattccaaagcggtctagaatccattacaatacatagcagctggaatgttgattctgttaggaaacgataggcgaacaaacgataaagaataataaatcaatcacaaaagacacgagatttaacgtggaaaaccctcccaaaacaggagagaaaaaaccacgggcgccagccagcaaaatatcttcactatatctgaggtgaggttacatcgtcgcacggcggcttacaagaggtatatatatagtggaaccctaaaagggatgatgatccgtacggcagaagctggcctttattaagtgcaaatgaatttggatcacaactcaacaaactccaccttgagacaaattccttcttgtagcatgaatcaatcctttaccctgaacacaacaaagacaaaaaaaaacactttcggcgccaaatagcctctcgggctaaaccactataccaactaagcttgagcaaagctcaaacttagcaacaggaacaggttttgtcattatatcagcaggattatcatgagtacttatcttgcatacctttagcttaccttgcgcgactacatcgtgaacataatggtacttgatatcaatgtgctttgtcctctaatgaaacatctgatctttggtgaggcatatagcactttgactgtcacaaaacaagttaatgcaagaatcaactccacaaagctcagcaaacaatcctttcagccaaactgattatttacatgctggcctttattaagtacaaatgaatttggatcacaactcaacagattcgatatcgtttatttacttggaccaagctggacagaagcacagagcaggtccatggggtggtcctggtggggatccctacatggttagtgaacttccaatacgatctgtatttgatactccctccgtttcacaatgtaagtcattctagcatttcccatattcatattgatgctaatgaatctagacatatatatctatctaaattcattaacatcaatatgaatgtgaaaaatgctagaatgacttacattataaaacggagggagtactatattttggagtaacaatcatctatccctttgttcaaaaatatataaacctagtaatttactactatattttggatagacgctcgcccagctcacaccagacactcacaattaatgaaaagaaaatactaatatattgggtagtaaatttcttaccatacttttatatttttccttttctttgtgtagattgaatttggcagttcagagcttctcaaggaagtttctggaacgtatggcctatatgaaggatggaaagttataagatctattaaatttgtcaccaataagaaaccatatgggccatttggacggtaggaaggaacccctttcagcgtcccggtgcagaacaactccagtatagtgggcttctttgggcgcagcgggaaatacctcgatgcagctggtacctacgtgcatcctatctaaacagtcaaaatcagcttcccgtgtttgagtttgaagtgtattttcagctacaaataaatatgctgatgggggttcgtccctttcatttctgtattgtgatgagtgatgctatgtagctggagtactgtcagcggtttcagtttgcagtgtgttgtatgcatcaataatgatcttcattgaaggttggtttggtgaatcaagttgtcattcaatgagtatatctatcaagctgaaattaatatttgtaatgccatactgaagattggttttagagagaatctattattctatacaactaagtttacttcaactcaacggttagccatcaactttgtcttccttagtaatatgccaccgattttgtcaatgttttctacaatataccattggggtggatatttttcaaaaaaatgcctaaaatgccctttaatacatagagggtttataattgattgacctactagaaaagtattgaaaaaatatgaaaatttttacatagcctccttaaatattatgaagtgtgcgtatattttaagactttcaatttgcatgtattgattttttttttgaaaatatcatttatgttcaatatgctaatagaatactcatgcgttgatgttattttatataaatcatctttcatatgacacataaaattatttttctaatccggctatgttttgtgtatgtgattcatctttcatatgccataaaaatagttttaaaaaaacattgaagaaaatcctaaaatatatacataaacttctacattctgtaagaagcctacacaaaaactttcatattttttcaaaacttctaatgagtcaatcaattatcaactcttgtatggcttgaaggatattttaggcatttttaaaaagtatccacctcagtgtggtacattatagaaaaaattgacaaagtcaatggtatattatagaggaagacaaaatcaatagcaaattatcgaagtagagtaaactcagtagaataaaatagattctctcttagttttataccatcgttgtgaagtacacgaggaatattatgcatgttgtcatgaatatgcatgtacacgaggaacactgcaggaataaccactaaaataataaaaaaagattagcaacattagttagtattatctgaatttcagatttatttatctatagctaaaataaaccagcacgtgatcagcagaaatttgtaacctcttctcttgctactgcatgctcctccatactcctattgtcttgttgtgaagttgatcatcttctaaggtttaatgttgaatgtgactggtatttctaagcatttctcttagttttgacattatacagtttttcggcactcccataaaaagaaaattcaaaaagaacttcttgcttctttaattcgcaacaacggctgaatctaattgtgcttgtggttggctgaaaagtaaacaagatgatatatccaacaacgcctgcttctctttttaatttaaccaaggtagatctcatgcctttctactaaaaagaagttgttgtggcaaagatgaaggatataaatcaaactaaaatggggactacctagatatcactcgaaagattttctttaataaaaatcacactaatataattaaagcataagtatggtgtaattacaattacatcatttgtatataaatcataacaagattgatagcttgctcatttggttacaaccacacggcatcaaccaagaggttgtggcgtttgccttcaattttttcatctcaatgcacgcatcatatggtcaggaattgcgtgtgatggctatggaaaaaaagaaaatctttcgagtgatttatagtaaaactgaacaaaatgggagtggacatagcgcagatgacaagatgcaggcagtgtgctgcccgtggcccatgtttgactctccaaaacatattttttttactcaataaggagagagtatggggaacatttttttttaccatgttcgataatggggaacatgatgacaagatgcaggcagtgtgctacccgtggcccatgttgaacctttttttttatggttgggattaacattgcgctgggagtgggttcattccgattatgggactgagtgacaaatcaatacctataactctaatataagtgttttgatttattaaaaaaaattggcccctataattataagggatccaaggtggcagtttttaattttaaacacgtcca

SEQ ID NO: 14227 - DNA, 2126 bp, Oryza sativa
agcatactataagccacttgctcctaaaattaaataaacacaacaaaattatcaaatcacacaaagcatacatataaaattgtcctatagaagccaatagtgataaggccgtgcctgtataaaaacacattgtggtggagcgctgggccttagaagtgggggagggagttggagggtaaggggagtgtgaagcgatcgggaggtcatgtgggagagtaggagatgccatttgcgctcgtcatggcagagtatgaggccggtggctcatgctgggtgtggagaaggagaggaaaatatggattgagatgggtccaattacaatagtaagcttgtgaatagagagacaaagtatttattaggggtatccagattcgatcgaacgggcaatgcatttcttgatgatgtggaagcacggaatatcaggaaatagctattaagtacactaagaggggatgaattatataggtttataggtttaatgaatgtaaatagagattgcaagatatatatgatgtgttatactgtagtgaagcagacatattggaaagtacgcaaagggttggagagtttttgcagattatgaagtaaacaaaccaactgtaaggttactctaaatatatttagaccaggaagtaatagaaatgctaaattaaataatagctaagaattctgtgtgtgtcaaatgcacaaattacccttctagatcaaaaaacaaagagaatgatcatcttcgttactaaagaaagtaaaaaaaaaagtaggtaagcaaatgcatcctatatctattaacgttatgggattcaaccgcttgcaggttgtctcaactttgaaatatgagtatgcgattgagaagctaaagagtactggctttggaattttagaaagatgcggtggtttacttgtagctatcaaagcgattgcagggcttttgaaccataaagagataaataaaattgagtggggaaagtaccaagtccttcatggtcagtagatggaatgcccgaaaagataaaccatgcaatatatttaagctatgatgacctagctagcccctcatttgaagcaatgcctcaataaccatttgattgttgaaatttggataagtgaaggttttgttaatggaaaatcaaatgaaccggaagagctaggaaaggagtattacaatgagttaattataaggaaccttatacaggcaatgcccaatagtgaatggagcatgcatgatgtcggtcgctcattttgtcaacatttggctaaagatgaagcactatcatctcaaatgggacaacttagagtcagtgacattttgaaatggagggagtatgaagtaaacaaccaactgtaaggttactctaattaaatttagaccgggaagtaatagaaatgctaacttaaataatagctaagaattctatgtttggcaaatgcacaaattacccttctcgatcaatcgcaaatctagcctatatgtattaacatcatgggcttcaaccgcttgcagattgcttcaactttgaaagatgagtatgcgattgagaagctaaagagtactggctttagaattttagaaagatgtggtggtttaccgctagctatcaaagcgattgcagggcttttgaaccacaaagagataaatgaaattgagtggggaaaggtactaagaagtccttcatggttagtggatggaatgcctgaagagataaaccatgcaatatatttaagctacgatgacctagaccctcatttgaagcaatgccttttgtattgctcactcttccctaaatatggtaaacccaataaacatttgattgttgaagtatggattagtgaaggttttgttaatggaaaatcaaatgaaccggaagaactaggaaaggagtattacaatgagttaatcataaggaaccttttacagacaatgcccggcgacaataataattggaccatgcatgatgtggttcgctcattttgtcgacatgtggctaaagatgaagcactaccctttcatatggaacatcttagagtcactgacctcgattcaaatagatatcgttggttgtgcatacagaatgaattagattggagtgcatggcaggaacaaaactcaattagaacgttattttttt

SEQ ID NO: 14228 - DNA, 2261 bp, Oryza sativa
acaaaacacatttattagtaataatagttttttcgaggtttattgatttatcttatttagaccgtatttcttgaaaaaaaaactatgctttcattttagatgatgaagtggattgtcgataattgctcacagagatgaattaaatattatataagatgatgttgataaatagcttggaaataatatttgagagatgtccattaacaaaattttagaaaaaactatatttttgaagattgacacaaataatccaaatgatatctagcccttaataagtttaccaatcataggttaagacaaatgcccgagcattcaagtgggctacttttctagttgataaaataggagcgtaacagcacctgtaaaacagatgtgttgtatatatgtgcaaattgatgggagatggagcacactacaccacagcaccaaataggaggcgttgtcatgcgcatgggttccatgcctttgaaacataccttcatggtatatcatataggaaactattctaatccctcgaggggatgtttcctcgtttgtttaaaaaccatttaaacggttatgaaaaattatggaaaaatttgacaatatttatacaacacatatatacaactccacaaaatcttaagtccaaactcaactcacacgtcgagatataaaaaagataaattcagcgtatgaatagtagagtactgtttatatctaaatttgttttttttttctcgatgtgtagatcgaatttgaacatgaattttagtggattagtaggtatcattatgctctacaatgtcaattttttttcagattttttcataactatttgcatcgaatttggaagaaaaaggtagacgagaggatatcccctcgagggattagaatctactcccatatcatatatatacttatcaacttatggatggaagggatccttcggaacctcgtctattctatccaagataacacagctgtggcagataaattctactgttttgcagcgccatatttacacaccatcatcatcttgttgctgccatcagccatcatatatttcacaagatacagtagggtggcaccatcaaacaaaggagcagtgcaataaagttttgctagagagctacttatcattatcactattacaggatagattttcctagacgccaccctattttgtttacatgcggtccataaatagaactgcatgaaaaaatagggaaccagcaccgagctgtttttcacacgggaaaacgcattatcccgtgcgggtggcttaactcacctgcacgcgatagctcatccggcctctccctctcaaaatttcaaaaaaaattcatcctctcaactctctctctctccttccccaccacttcatccttatcctcttctcactgcctcatccttatcctctcaactctctctctctcccctctcctctcctctcatgcgcgggccagcaggcgcacgggtgcggctcgacggccggcgcgcgggcggcgtcggggaagcttccggcggcagcggctccgtgccgagcgcgctggcggcggtggaggcgctgtcggcgttgggggccgggagagggacgcggtggaggcgggtgcagggagtcgcgagcggcacggagcgaggcggccggcgcccggatccaccctccgccgcccagatccggcggcggcgtccctctcccacccttccccacacgagggcgacaacgacgacgacgacgaggcgggagcagcggcggctctcctctccctactttcgtggggcggcagcgaccgtgcgaggcggcggagagtgggcgtggcggtgaccggtcgaggcggcgacctggcgggcgcggcgaggcgactaccgggcgggcacggcgaggcggcagcggcgagcggactcggcggcgagtgggcggccgacgcgactgtggccgcggcggccgtcccccgcggcggtgaggggcgccggcgggtgtgctcaacggcgacgcgatcgggtggccgtggctggtcacgacggctaccgaggggccgtggctggtaaaggaggcgaccggggcggcctggctggtcgtggcggcgcgacgatgtcgacgatgagttgcggcggccggttcgcttgtgggccggcgggcgggcggcaatttttttaaatttttggttttttcgattccgtgcgggtggtataatatgattattccgtgtggtcctcctgcccacacgtgaaaatactaattttcgcagacaacggtgtgcaggtgggccaaatgaccg

SEQ ID NO: 14229 - DNA, 685 bp, Oryza sativa
attggtagggtgaagatttacctgaggaatggcatcagggaacaggtctatcatatacatggacgccaattgatggaacaagtgcagcttccattcactccaccatctgtcaagtgcccggctcctgaaccttgccaactttatgttctcaatgctgcctaatggaggtctggggatgttcagtagccgatccatcattaaggttgaagagatgtcacctctgcactggatcttgtcggcaaagtacaggctgatcggcagctgtcccattccgagttgtctagccgatgacattggatgatagaactcataggagacttgaatatttctcccttgatggatgccaacagggaggatgcacgggctgatagcagtagtgaagacttctcgagattgctgaaatttttcgtgattgatgtcttcaaatctgaaatcagctggtagttcaaagtccattgaatcggcatagaagaaccaaactcgggcatccttctgaaacccatcataaaaactgaagaaccagtcctttagaagttcagccgatagctttgctcccgcatcggctggcatagaggcatattctccgtatgacatgcatctacaatgagtgcgttcttctccatcatcttccacaatcggctccaaccttggaaattcggcttccgtcacagatggccgattgaca

SEQ ID NO: 14230 - DNA, 587 bp, Oryza sativa
aaatttccatttggaatggaaatgctccgcatcaatatataacctagtcgacattgtttcattgtgcaggaaggaaaagattcagaacttcatagactgccaggtgaaggatgttgaggaatttgaagccgaacgagacaaactgatcaaattgcatgaagagaagaaggtgaagctcaagaaggagtacctggcgaaggaatttgagcttgagaaggagctggacacagccctcacttccctgatggataaacacaagccggacatcttcaaatcctccacctcgccttcgacatgaagaactgcggcttaccatacatttcctgctcatctacaatagctaagactcccatttcctaagtacccgtaaaacttctagcgatgcgaaagcatcattctgtttgggtggatgcatgcctttggaaggaaacctgaaccagttccgtattatatggagtactatcagtttatggttgctgatgaactgatgactgtgcgctgcgcttttacagcaagcgtggaaatcgaatatatatctagtttatctcatcattctgctctgcgttgcatcaactgctgattgagtg

SEQ ID NO: 14231 - DNA, 1009 bp, Oryza sativa
tgatcaaaaggtgatgcctgagggagttaatactactgcaattgttctaatggctaagaagaaggagtcaaaagagctaaaagatttcagaccaatcagtttgtgcaatgtgatatacaaggtggtagctaaatgcctggttaatcatctccgaccaatcctagagagtattatttcccaggagcaaagtgctttcattccgggacgcatgattacagataatgcgttaatcgcttttgagtgtttccacaatattgcccagagcaaaagggagtctcaagagttctgtgcctacaagttggacttggccaaggcttatgacagagttgattggcagtacttggaaggggtattggataggatgggtttcagtaacacatggattcaatggatgatggcctgcgtcacttcagttcgctatgctgttaggtttaatggatccatgctgaaatccttccaaccatccagagggctgagacaaggtgacccgctctccccataccttttcctgttcgttgctgatgggctatccaccattcttagttcggctgtaagaactggggatttagttccgctgaaagtgtgccgacaggctcctggaatttctcacttattgttcgcagatgatagtctcctctttttcaaagcaaacgtggaacaagcgacggttgtaaaagaggctcttaacctgtatgagcggtgtactagtcagttgttgagcccggcaaagtgctcaatgcttttcggcaaacactgttcagaccagactcagccgggcataaagtcactacttgatgtccagcaaaactcgtttgaagacaagtacctggggttgccgacgccagaagggagaatgaaagcagacagattccaatcaataaaggaaaggttcttcaaacggttaattgattgggcagagaagcatctgccaatggggggcaaagaagtgctgattaaatcagttatccaggcgctgcccacgtatatgatgagtgttttcaagctgccg

SEQ ID NO: 14232 - DNA, 571 bp, Oryza sativa
aaacccaatcaccaacttgaaattccctgaaactcctcttcttatctgccaagtgtttcatttgttgctgagctctgttcagatgttgttgaagcaggtgttgcataaatttgcgctgctgcaaccattgagacacatttggtatggcacagtcattgaggctgatgccaaagtgactaggtttatagccatacaggacttcaaatggggacttgttcaatgtggaatgataagaagtgttataccagaattctgccaagtataaccattgggaccacttagtcggagtggcatggacaaagcatctcagataaatttcaaggcattggttcaccctttctgtttggccatctgattgaggatgatacgcggagctcatatgcagttttgttccagacctcgcaaaaagttgctcccagaagttactggtaaagactcgatctctatctgaaatgataatgttgggtaacccatgcaacttggtaacatgtttcaagaattcaagagcaacagttgcggcagaaaatgggtgtgaaagaggaacgaagtgagcatatttagaaaacttgtc

SEQ ID NO: 14233 - DNA, 626 bp, Oryza sativa
gggcgaattcgagctcggtacctgatgttctcaagttcaatgggaaaatccaaacccttaaacttggttggtgccaggtaatcttcataactgaatggaatcgcggatgcagatttaagttatatcctcttcagcctggttacatattttgcagataggtgtatcaggtgcagaatttgttgctgattgtttgaagtacaacacaacattatctacattggatttgagggcaaatggacttggagatgatgtatgcacaatcttcgttgaattttatttataacttgcgctttgattcatacccatgccttctgatccttctctttttgaagggtgctatctgcttggctcgaagtttcaagatcatcaatgaatctttgacttcacttgacctgggctttaatgagattagagtaagtaaacactaaatgcagtgtctttttctttttgtattttctattggtgggtctatgcagatctccaccatgttcaataccctttatgctcctaacaggatgatggagcatttgcattggcacaagcacttaaagctaatgaagatcttgcagtcacatcattaaatcttgcaaacaacttcttcactaaatttggacaggtcagttgcc

SEQ ID NO: 14234 - DNA, 594 bp, Oryza sativa
tcctcgcaattaattctgctaattttgtgcagtgaatttattcacagttagcttaggtgaagctgcactcgggtggcggcactgggcgcttcttgctattgtcggtgcagtagtcataggtcaggttccccctcacgccatcgtacgccgcctgctgcgccgccgtcagcctcctgtactcgccgccgttccaccaccacgtgtccggcgacccgcagtcgtccgagctgacgccgccgccggcggcggcggcgcaggcgtcgacggcgaaaccctggaaggccgcggtgaatggcgcgcgggcccagtcgaccttggtccggccgccgttcgtcgcccagtcggaggcgtcccacacgctcccccgcggccgcataggcttcgccgggaactcgaactccgggccccggctcgtcaggttcttcagcaccctcaccgcgtctcgtccacgaatattctgccaaataattaatcaaatcgatggcttgacatgtgatttgtcttaacttctacagaattcaggtggccattttgtagagttagatttatccaggtttaaaatctccgtctagagctgcttgaaagggtcaactg

SEQ ID NO: 14235 - DNA, 544 bp, Oryza sativa
ccatgtggttgcgcgccagcgagtcgccgatgaaggcgaggcgcttgccgcggacggcggcgaggaagcgcgccggcgaggagcgcggcaggtcgtcgcagccgccgtcggggcgccaccgccagtagaggtggccgggatccttgccgtacttgtggcagttcttggaggccggcagcgtcgggcacgtcgcggccgtgtacgccgggccactcggatcccgaacccatctccccaccgacgtgtcgcagctgttgttgttttcctcggctcgtttttgcaccgcacctgagcaaagcacagaacgcactgaatgactcatcgactactggagtgagcaaacaaataagttcacttgcggtctctcatctttaacgtcgagtttaagtcatatccttaaaccgtaaaacatgatacaatatattccttatggttttttatttttctttcttgtaccacgttatgagcattctccgtattatgccttgaagaggactcgaacctccacgctctttgcacgagattttcagtctcgcgtgtctac

SEQ ID NO: 14236 - DNA, 3723 bp, Oryza sativa
aaatatgaggattctggcgaacacatgggttcctaggtattcctcggaatacccgaaatttatattcgaccattcaatttttgtgcaaatataaaaaaaattaagtcatgctttaaaacatttgacgataaatcgaataaaaaatgataattacattttatttaacaagagaatggtaaaacgtactggaaaaagttaaataacattatatattgtgaaatcggagggagtatttggcacggatgcaggtcgtctgcagcgttgtatgtgcagttgcagtactgctcatttagcggtatggcatgggccagcgccttattaactccgcactgcagcagccggtgtcacgtacggcagcggcgtgcatgcgtgcatccgactgcaggtgatgcagccagagaagcttttgctattgctcgtgatgcccgtgagcgaggcgcacacacatgcgcacacagtcgcagtcgctcccagatcgacaccgtgcggcgcgcggcgatgaacgtctaacaggtggtggcgccgatcgaggcgcgaggttcgcgccttggcggtggcggctaactgcttgtcgttcgtgtctacgactgcacccgcaaaatttatttttcacccattccacgcgtattaatacaaaaccaacccaatttcaatgtaattattcttttctcaaagaaatatggttcaaaagtatacgcaaaaaacacgcgtacacttacatctataagcacacacgcatgtgtcgtcccatacgccctcggaagactcgccatcgccggtacatcatataccactgaaagaataatttgttgtaaatatgagcacttattgactcatatcaagtataggatttaatccgagtgggctagttccaccataacaaatctaatctgttggcactaacttcattcttttttttattcataatatcttgattccctactctctctatcacattttaaacgtagttataagtttccgtgtctaattttaatcgtccgtgttatttgaaccatttatgagtacccgtgtctaactttgatcgtccgtgttatttgaaccagccataagtacccatgcttccatggcatgagatgggacgtggggtcgctgcgcgtcagcgctgctcacccgacctgcaggagatgtcccgagtaaattgtgagatggcaggcgctgcactcgcacagtactaaaaatgtgcgcgcccgtgccacgtacatgcagaatagcagaattcatatgcatcttacaaaaatgaacgtgtaaaaatcaaacagagatagcacctgcaaattaatgaaatacaccagaaccaaatgaaagtgccgatggatgaaacgagtagtttgtgagaagataaccgactgaattttattactactgttccatcccataatataataaattttaactatgtgtctaaacagtccaaaaataaaagtagatacattttaaaactctatcccataatataataacttttaactttttagaacagtgatagtatgttgataagttgatttaaaaggttttctaagattgtcgtcaaaattacgataattgaaccgtttagtatcttaaaaagtatgtacgcgataattcagtgtccatagtagtaataataaaaaaatagcaggctcattctatcaaaataacttgagagctatgttcatcagctcctggatatccaatgcatggcaagtactcaaggtataattgggcagaaatactctcaagcagatctagaaatgtgctttccggaagtaataattcatgtgtatcatgggtactatcacatcgtgccagatcgaaagggagtgtccaataccaatcatacgaccatgcacaagactacgtagagatcaagcaattcactacctgtcaacactagtacaatttggatcaatgctactggaacgaaagggatatgaatcgcacaaacgacctgccagaatcatgccaaaacagtgtcagaaagacgaaaaggcattgtcgattttgcttcaaaaggaagggatacggcaagtgaggaaaaagttcaggcaagaaagacgtccaaactccaaatcaccttcccttcggcggcaagccagtctcttttacgtacaaatttgacatgacaactactttggttcaaagaattggcaagatcacaaaagtcaggacatgaaaacaaaccaaattctggtacaaaagacacttaaaaatatatgttttggccgccaaaaagcactttaacaagtactcctgaaagcaggtaaaatgcacagaaaagcatagcctcttgttgcaaaagattacatacgtctacaggagaccagatcaaacttggcagtaagaagagaacatgcagggacgacattcagggtaagttttctgatattgcctcaattaatcaaatattcaaatgggagcaaaacttttgtaatattccccaatatctcaagggctccttgctatcattcaacctaattaatccaacttgtgatgtgaacctgctatccttggctttctttggtgccaccagactccagtctgatctgcatccagaattcatttgacactcaaaatcccaaagtgaggcttctcgtctagtggacactgttaatcagttgaggcaaaaatgtgccatgtaggatcacatgacaatctcagcaagcatcttgctttcatcaagtcctcaaatcttctgacattgcggaaggtatacaatgcgttgtcagaatatcctgagtagcagcctttgccgtttttgcctcaagaacaaccagctgccagatgataccagtcaattggaaagtgctcacaggaagtagcattgaacaaaagaggatgataatttcactatgaacaatggaagagagaaagggcgctaataatccacatctgatacctgatcgtagtccatatcaaattttaagtattcctcgttacaatcttccaccatggttgccaagtgctttaaattttttactggtttgccattgaaagaaagaacctatagagaataaaaacagtaaaacacaattaatttaacacatcaaaggcaattttgttcagaaaattttggtcttctactactcttagatagtcaaatatagcaatcagaacaataaaatgtccattacacttggtaactaactaccaatgttgttagttccctcctgagatttatttccaccaatttcaaacagaatactgcttatggctgttaacttagctaatatatataacagcagttggagacaaccaattctgatcagcatcattcaaaatatgaaccggtgtagtgcaattgatacggtcagttgaagaacacccttttctggtatggagtatatatatgataacttgtgaaaataaatctcaaaccataaaaatactttcagtagtgatcattgttacctgaatattgacaatttcttcataaccaatgttgatatctgctacaagaacctgaaaattcatcattttttttcaaaaaattgtcatatgatgaaataataaataccaagctctaaataaaagcaagaaaggttagccatctcatttataacataaaaacataggttagtacagaaagaacttgagacctgtgacaccaccacaagctgctcgtcaggtgattgagccattgcatgtaagtgcttgtccaacaacttgacaggggcatcatactcatagtcttttccatactgatgaaataagattgtagttagt

SEQ ID NO: 14237 - DNA, 1182 bp, Oryza sativa
gtcaacattttcaaccaaaatcggataagcaactagtagtccaacatagaacagacatttgaaagatgtcattcaggtggcaatatcgcttccttctacaaggttggtgaaaatgacgcgtgaaacatatagtcattgatatttgtgaacatgactaaaaattatccatgttttcacacacaccagagcacaaacagaaatactaaatcactacaataaaataagttgacgataatatataaggtttgtgaaagtctgttaacaaaatacatatacaagactaagcacgcggtatatatatatattcaatttaaaaaataaagagataagttaaagatgaaaattacaattaagatcaagctttccaaaaatgcaacaaaattgtactgaacatcgtacagtagtagaatgaaaaattgacaactgaacaaggatgtaatatcttgattattatttcacacataaagctggacaagggagatgacagcatacctcagatcggagatatggaacagaaacaaccataaaaacgaagcctgcaacaatgtaatatgatggtggcctgccctttatatgagctggaatgagtcttttgtgagttgccagcttaatgttaaattcaagaactttcgaattccgcagaattttgacatgggccttctcgccagtgtacttctgcgaaatgaggtagctgaagccaatacgctccccatgtctgaaaggaactggataaccaagataaacaaaatgtaagccaatactctcctccttaagtcatacttcgtaggctacattggagacaaaccatttggagaactagtaataacagatgacaagaactaagacatgcagcagacttttaaagaagaaaaatcccaatgctttgtgctagacaatacgtgcacgttgaatgatgtcatttatggtcagtggagatctccattcaataaccccgcttagaacgaatccttccagaaccaaataatctagaaatggcacagggagtggggactagaagttgaacctgagacaatggaatctctcttgcatgaaacagagtgtcctagaatgcatgctcccaaatagatacaagaataactggccaaggcaaacaagttctaaaacaaaagcagtagaaataatcgctagttgtgtaaagctctgactaaccgggctgcagga

SEQ ID NO: 14238 - DNA, 705 bp, Oryza sativa
cacaacccgtcggacaagatcgataaaccagcaccagtctcgtgaattctctttctccaccaaggcaaaagctaaaggtacaagttggtcctccgcatcagctgataatgcagtcatcaaggcaccaccgtatttcccagttaggaaggttgcatctatagctagtactggcctacaatgcttaaaagcctcaatggaaggaccaaagcaccagaatgcacgcataaaaattttcttggtcactccatcaacgttgacaaccctatcaggatgagtatcgatgtggtagaccatactgggattcctctgcttaatggcttgcagcaaagtgggcaaacggacatacgcttcaccccattcaccgtaaatgagcttcatagcctcctctcgtgccctccaagccttgccatacttcaccctatactggaaaacctcaaatatatacaaagctaacgcagaagcagagagtgtaggttgcagttttatggcattgcataacctatttgctatgaactttgatgtcagttgccggtggctccctgaaccttcggcagtagcacaactatgttccttacctacccgtgatatcctccacgtgccactagacctcttagttgcatggaccttccatttgcaccgtgggttttcacatttaacagtgtacctcctatttgcggcagaattgacaacacggggtgcaggaat

SEQ ID NO: 14239 - DNA, 656 bp, Oryza sativa
atccatatcgccgaagcaatgtcacccccagcatcaggaaacagaacctctcccaacaagtgcaagatgtatgcacgggcataacactcaacacgccatggctcagcatcgtcgtcaagatgtgagaagttctgactcagccaagacaggggtattccattctgcttcttcttccccccttgcccctgctcatgttcagtggaatgccaaacagctgctgcacttgtgcatgccatccaggagtatctgtcctgcccgtcacggcatgcccccgtaatgggagggccaagatcatagccacatcctgtagagtgatggtcatctcaccactggggaggtggaagctgtgtgtctcaggcctccatctgtccacaagtgctgtcaacgcaggagcgttgaacactggcattcctctgctcacgaccaaggccaccccgagcaacccggcagcccttaggtacgggatgtacctatcgtcgaacactgggggggcatgagctctgactcggagcggttgaagtacctgcattagcaattgtaaatcaattagttaatataatgtcaaatacacgctaccgatacttatgcacaagtgaatcaatgccgattcataccctccccgcctcgatcgcagccccgcgatgacgggcctcgta

SEQ ID NO: 14240 - DNA, 681 bp, Oryza sativa
tcttccgccgccggttgccgcctccgcaatccgccgccgtcgagcgacctccggcgaatccgagccgttggctcgcctccccctgtcacgaacaactgcccggtgtgctcgcttttgcccgtatctccgtggttcgctccgccgctcgccgccgccgcccgccgtccattcgcggccgggtcgtcgtctacctcccgccgtcctgcgtggcagccacgtaggtgccacgtcggcgccagctcagcttagaccgggtcgagccgaccccggtcggtccctccccgtgcgcgcgttccaccgcaagccgtgaggctgcgcgtgggcccgtcgcatctgcgtccgccgcggaccgcgcgcatgcaccgcgttcctccccgcccgcgtctaaatttcctccctccttccttttctttctcttttccaaaaaggatttaattaaataatctagaaattcaataatcttagaaattctatatcttcccaaccgtaaatccgtttgactccgttcaacttccaaaattcatcaaatctcgagatctatctagtggcacgctcagaggtcattaatagggctttattttcgctgtttgttgagttgccccgtttcgcgtgtagtttcggagcccgaagccccgcagtgcgaggatttcgaggatcaagctccagatctgggctgcagga

SEQ ID NO: 14241 - DNA, 2111 bp, Oryza sativa
taatctagtgataaagctcaaattataagtaccacatctcaagagatttgtgtacatatgttgaagagtggtgatttcaaagttcatagagattccaaatgcacgcacatgtcaagaatcatccccctcatctatgcaaagtataagtgcttaagtcttgaaacaataatgccatggtaagctgatagaacggataaaaacatccaaatacgccaatttccccttaaatacaatttatgttacacggtaacatgtggataacttgttcacattaaaagtaacataaaacatctgcacatgcatctaaataagcatgtttctgtgcaacgagcatccattttccattcatgtgccatcacatgtgcccccttaagtttaactcccaaagaactaaatttcatacgctaagaatataaagatttacctgtgtactccccagatttttcgtagtcttgaatgaagtgattaatcactggggtgggtatgacgtagcctatgttttctacatcttcgtgtttaagagattgaaaagctatgcccacacacttgcccttatcattaaaagcagggcccccagagtttcctgaatttatagctgcatctatctgttccatgaaacagtgaaaacttaagtatgctcccaggttaagagattattagaaataattccaaagagaagtaaaaactatgtctacaatatgcaaaatatagacaatcaaaagcatgcaaagatcttaagagaaaaacctgcaatcctagaagctccgttgaaccatgaacatatgaaagtatctctattctagatacaacaccacttgtgactgagatcgtgtctcctccaattgggtaaccaacaacagtcacagcatcttgaagtgcaggcaaagatccaaactctaggggtgaaacccctttccagaattcatcatcctctacagttaacattgctgaaatggaaaggttatattaattatcaaataacataagaaagctaacttcttgaattattaaacaataaattgacaggcaaatctttgcaatttaataataaattgcttgaataatacaatttgactcctgcccttgaatttttttaggtcagggcaacttccaaacgatcgacccagtacctccaaaataataacccacataggcaggttcctgataacattagaccaagaataatagaatattgttcacttgtaatcaccatcaagcgctcaaattagcactagcttttggatttcttttgcacaagtactataacaatttcacaactgtgcatttatgtgcaacgaagcaaccgtaaagccttaaataaacaagaaagggcacatgagatttagttgctatccctaaagttatgtggcattactttagctactccttatcattccctatcctgttaaaaatatcacaaggcattctacacaagcttgatacgcactctgtccaatctagattgccacctattatcacactactccatgtgatgaccaaatctgttgaaatggtatcatcgaactcaaacctttgtgattagagtgaacataaataaaaagattacaatgctaaacctgactaatctggatttctggtatgccaacgtgaagatttgtaaaacaaccgaacatacaaaatctgcaatagtaaatagcaagtgtttctagctattttatgagcagtgcacatctgcagttttcaatctgtttcacaggacattgccattttaccaaacattgcaaggattccgattgccaaaaactagtccatagtcctagtaaagtcgcacgagtgtgggctatacataccaatgtcacactcggtgccaatagcgagaacggtggcaaggtatttggtatccgatcccctcttcttaagcttgacctgggtgtagtgctcgacggagtgagcgttggtaagcaccctgtgcccaccaatgatgaacccgctgctgctggagctatattgccgcttgcgctgccacggcagcgagaagttgggctccgtgtgcacgcagaacaccttcaccacggcgtccatcgacggcatcaccttcgccacctgctcccaccgcaacggctccaccacggggacctccgccgccgcct

SEQ ID NO: 14242 - DNA, 651 bp, Oryza sativa
caaagtggtactccttcagatatagcaactagttcagctttaacagtgtcttccttttgagaaagggcatcagcagccgagttgtgaattcctttcctgtaacatattttgtactgcagtcccaacagcttggtataagctttttgttgccaaggtgtgtgtaatctttgctcagacaagtgcttgaggctatgatgatctgtgagaatgagaaattctgcatgctgcaaataaggtctccagtggtccacagctagcagtatggccatatattccttctcataagtagataaccccttagacttgggacccagagccctgctgagaaatgctataagatgattgtcctgtgatagaacagcaccaatggccaactcactggcatctgttttcaggggtaactgttttgtaaagtcagggagagctagaacaagagcagataccagagccttcttgagatgttggaaagcattgtcagtgtcctgagtccattgaaatggaccccccttccttagcaattgatttagggatttgttaatctttccaaatcccttcacaaattttctgtagtatcctattaaccccaaaaattcccttagttttttgacagtatagggtacagcccagttaaccacatgttgtattttttta

SEQ ID NO: 14243 - DNA, 618 bp, Oryza sativa
ctccgtggaccccggcgccacggtggcgcggcgcatgagccccgccaccgccgccaccgcgccgccgtcgatgagcgcctccctcccctcgccgcagccggcgaggttggccatgaccatcagcgccgggcggcgcagcgcggcgtcccccgcggcgccgacgagggccgccaccgcgccggccgacctcgcgagcctcgaccggttcatctcgtcgagggagaggtagtacagcgccatgccagcgtcgcgccgcgcgcggtcgccgtcggcggcgctcgcgaggaggcgcagcaacggcgggacggcgccgagcacgccgatcgggatccggttcctctcctcgatcgagaggctgtacaccgcgccggcggcgtggtcgcggagctccggggacgccgcggcgagcagcccgacgagcaccggcacgagctccgcgcgcaccagctgcacccggttcgccggctccagcgagaggttgaccacgcacgcggcggcgctgaccctgacgccctcgtggccggaccccatcaggcggcgcagcccgtcgagcaagccgaggcgtgcagagcgcgcgcctcaccccgttctcgccgccgcgcagcgtctgcttcagcg

SEQ ID NO: 14244 - DNA, 575 bp, Oryza sativa
ccggtttcgcacggtacagttcagcccagatattagttcatttttgtttcagcttttgcacgattatgtcaccatgttttaactgcacgtttcctcatcgcaggacctcgtctgccttcgagcgcgttcgcaggcacgaccggcgcttccacgagctccgcaggggcgttcgccacctcttcgagcgcgttcgccagctcttcctctcacggagcgtcgatccctcgcccacacggtactttactttttattaatactgttaaatacctgtacgaaactgatggtccttgtccagcaggatttgcagccgggatcttcggtactggggcctcttcgtctcacgccggtaggactggtcctactagccagttctacgacgacgacttgcacggtgcagaccaccacgacgtactaggctcctctcagcttggaggagctccagaggcgcacactcaggagcagccagaggtcacacctgtacaggcaggacgggttggccgtgccgtacccccggaccaactcacgtactcccacgggcacattagggggtaccgagctcgaattcgccctatagt

SEQ ID NO: 14245 - DNA, 571 bp, Oryza sativa
aagcgatgggataaatccagtgttttaaatagcgggctataacatttagcagttgacccttctcaagcagctctagacggagatttaaaacctggataaatctaactcctacaaaatgaccacctgaattctgtagaagctaagacaaatcacatgtacaagccatcgatttgattaattatttggcaggatattcgtggacgagacgccggtgagggtgctgaagaacctgacgagccggggcccggagttcgagttcccggcgaagcctatgcggccgcgggggagcgtgtgggacgcctccgactgggcgacggacggcggccggaccaaggtcgactgggcccgcgcgccattcaccgcggccttccagggcttcgccgtcgacgcctgcgccgccgccgccggcggcggcgtcagctcggacgactgcgggtcgccggacacgtggtggtggaacggcggcgagtacaggaggctgacggcggccagcaggcggcgtacgatggcgtgagggggaacctgacctatgactactgcaccgacaatagcaagaagcgcccagtgccgc

SEQ ID NO: 14246 - DNA, 508 bp, Oryza sativa
cgagctcggtacccacaacgccggcagtgtagccggcaggaaccttgatcctcatgtggaagaaccctgagccgtacatcaacttggacctgaatccagcacctgcatgcatgataattaatttgcatgatcacatcaagctagttaagcataaaatagagagagaaaagaagcaaaaactatgatcaagctgatctaaatgctgaatctaacagtgtcatatatataatctatctgtgtgtataccagagctcttgtccagggtgaggctaatctgcgtgccctggttgaccaggtggtagccgtctccaccatatgttgccacgtagttgtcgtcgaacaccgtcgccaccgccggcggcggcgccggcgccggcggcacactatccacggccaggaggaggacggcgatggcgatgaggtggaggaggagcagccatggcggctgcacttggaaaaccatatatatactttagccaatgtttgctagtactaactaattaattaa

SEQ ID NO: 14247 - DNA, 786 bp, Oryza sativa
tatcggttccgtcatttagtccgcggcaactggagagaaagacttaggcggaagtttaaatttcctgtgagtacacatgctctacatttatatttctccgattaaaatacatacaagtgtatattaattagatctctcgtcgtttgtcttttatttatagtgcgcaaagcaaaagcagggaactaacttgtgcggctactacgtgtgcgagtattgccactgccttgcagaccaaatcatcaccacaagagagctcgatgtacgtacaaataaattcaaaatttcattacgtatcgatttgttgtttaattactaatcaatttcatacattcatatagtttattcgcatgagggataacctgatcacacacaaggaatttatcgcggtggttcaagaacaactcatgggattcatcaacgaacaaatccttaatcccaagggtgaattctactaggacggaaacacaattcataggttcttagcttttgagctagcgactactactacgtcgaaatcgtagctagctagaacatataatggattgtaattaatacatgactatgtttttatatgcatgtatacacattttctataatgtaaatatatattttggtcatatatatatatatatatatatgcatttgcataacatatatattatacatctacatatgtattgaaacatatataaatataatataatatatatatatatgcatggtttatatatatatatatatatatatatatatatatatatatatatatatatatatatatatata

SEQ ID NO: 14248 - DNA, 3887 bp, Oryza sativa
aacggttttgtaagttgagggatgtcatatgtctggttttgtggttgggggacgattttgtaactccacgacaagttgagggaccttcggtgtactttttccttcttcctgggcagcgtcggccattccactcaggcacaaccgcacaagccggcccagttgttcattaatcccttatgtttgctaatttgtttagagtagtataaaagttgttaaggaacatagaaaataacatcgccacgttgaaaaaaaaagaattggggactttagagcttaattttaaattaaattatattttttatcattttatatttgacgtaaaatatttcaatattgtatcattactattactatgtaataactctatccttttagaaaaagagagcagctcggaaatgataccccgttcggacgggatacttaagtaatgacgtcatattcatgttaaaattgacgtcaccttatacttacgtggtactccctaacgttttaacttttcaaatttgactaagttacaaatataataatatttataatgctaaattagttttatcaaatcaataattgaatatattttcataataaatttctcttgggttcaaaatgttactactttttcccataaacttggtcaaacttaaaacaatttgactttgaccaaagtcaaaatgtcttgtaacctgaaacggagggaatatcatgtatgatatttattggtacaaaacatgatacccgagtatcaggtctaatatactatatctatcacgtcaatgatgatgtcaatgtatacgtatgtcggtatgtggtaccatgtagtatacttaatagtaccaaacataatacgtgagcaccaagtcttgtacctataaggacccagtacaagacatatatgtaccagccgtagtacatgagtaccatgtctgatacctataggtaccaaaatatcatgatgccactaaagtatcatcgcaataagaacaaaaaaatcatatatttatcaagagagaggtcaataaaaaccgacaaaataaatcaattatagaaaaaagttgccatagctataaaaacacccatagaatatgtaaaaagccccaaatcaaacaccaaaacaaagccaacatgagtgctttggggtcatgagcccaaatctgtcatacggatccacacctcgagaggccttgtccttcatgtcagtgatctcgtcgacgatggccacctcctagaatgtggtgagtagcttcgcctccatcatttgcttggccgggcacctaccccacaaacagtttcacgatttcctcctttacacccatgcctccaccaccagcagcgacggcggtgacggtagctttctccacgcccaacacacctccctgcatggccagccactaccattgcctccgtgcacatgatagttgaagagagagagaggaggaggaaaggggaagagataacatagaggataagattgaataggtggtgtgaggataacataggccggataagattgaatagatatttacgagtattggtagttattctgtatttacaggactccgttccttagatttcctgttaagaaaacttgcatcatcagccgttcataaattctactgtatatttggttttatatataagagggaaatacatgtgggacccacatgtcatagttttaagagttaacattccattattcacattcaaagtacatatgcttttcgaagaaagtcacccaccgttaggaatcgacttaaacatagtaagaaaataaatttagaggaggaagactaaaatacctatatgggattgaaatctctgggcgctcgctgtcttgacttcaaccagaacactcaaagcatgtacgctagggagggttcgaataatggcggcggcggcggcagaggcgtacgtgcggcagctgccagcacaggtgcagagggaagcgtacgagtggcgaggagattgctctcgatcggcggaggaaggcctgcagcgaggagccgatcgaggagagagctagctaggcattcggcacagggctcggagggatgtacgtgtgggtgctcaccgtcgtcggccgggtgcagagggtggtgcaaaagctcaccgatgctacgcgcgtagggaggcgccacaagcacacctttggcgcagacaaatccagccgccagatccgacggctgcgacaccggccgttgaggcaacgagaagctctaggtctgatgcagatgtcatcggtttagaatacaaaatacaaatcaacttgtagatattatttcatatgtatcgagggtattcatctaatatatggaccaaagagggactacttcttctggatccaaaattaataaaataaacaaatcattttttttcaattttaaaataaggaatagatcatgtatacatctaaacaaccctttcataaatccaagcaaacttttcgtaaatctaagcaaccttttcgcaaacccaaacaaccttttcgtaggcgtcctcggattggcccgggggatcaaattaattataaaaacatgagtttaattaatcgatttattgaacaaggaaaaatattatcgagacgaataaatagattaatcttgaaacaacaacaattaattactcttgctataaaacaggctcgtattttatctttcgtactatttcgtaactagtttcaataattacaggtcctagacctagaaaaaatagacatattcctcaattaacacaaaagttcaattccaatggaaacttaagaaactctaactagactttaagaaacaacaatcggtacttaagttccgattgttgttgttttattcgaaagggccagagtatatataaagaaagtaatccaatttagattcttgggcttgttataagaaagaacaatagggaagaaaaaatagtttttttttatttattgcaacatgctggttgattcctaccacttaatcttaatttattgtatcttcccggagtaactctccgggaattcttttttaattattcttgtatattactttttttatctctttaattaataatctttattttattgaaatcgtgtaaagcttatttggatttaatatagcttacttgtgtaaggattttacgattaagaatccattctttcttgtaactcaacggtgctttgcacagaggattataaagtgctaattactgtccaagttgataaacatatccttatgtttgtatttgaataggatctgttagagtgtgcagcccggcccaccctccgtgggccacccaggtttacacattggacctgctccaccacatgtccaaccggagccacaactttagttcctaggcctacacaaccaaaaaacctagtctgatgggtgaggactgcccccacattttaagtcgtgctccacacaacccaaaagactagtctgatgggtgaagactgcccccaccttttaagtcgtgcccccaccatcaattaccgatgtgggactaaacacaacaatctcctccgtcacattaacccatgtgaccccgaagacttgttacctggcctccccaccatgtaacccgtggaaattgttctgggtttcatacctgggctttgataccacttgttagagtgcgcagcccgacccactctccgtaggccacccaggtcatattgggcctgctccaccatgggtccaaccggagccacaactttaggttctaggcctacacaacctaaaagactagtctgatgggtgaggactgcccccatcttttaagttatgctcccctatcatcaattactgatgtggtactaaacccaacaagatcaaatgagtaaactttaaaaagtcaatgtttgtctcaacaatgcaatagaccctctcgctaaatgggttctatatata

SEQ ID NO: 14249 - DNA, 2057 bp, Oryza sativa
tgtgtcctattctgattgggtgtggttggtttgattttctgttaagcaagctccaaatgatttttttctcctaaaccgtttatctaatttatgatttgattacaccattatatttgttacaattgaatctttaaaacaagatctcggatgattatattttgataaaaaaaaatatatatgactgttaacaaccaaatttggtaatatctgtgtcaggaaagaggatctgatcaaagtggagtcggaggtggagatcgagtttggaagcagagcaggaattggctggaatccagatcggctacagttaggatcggctggatctaagtcgggctaaataagccgatataggcgattccgacaatacaacttgtacgcgacatcgggttcaagttaatgtatttcaaggtgattgccacgcacagatagagtcctaggaaggtaattgtatctattaattagtatatcttatgtaaattccttatagataaatgtgggcaaaagtctgccgcaaagacttatagtatcttagagtttgttatagataatggtcgtgtccggtatgggcatatcttgtaattctcgggtataaatagaccccgagccctatgtaattttttaacacacacgttcaatacaatctcggcgcatcgccacccttttttgctttagttttgttttgacgaattcttgctttcgggttgagctgcatcgatttcgatcttcaacaagaggtaaaattcgttatgacggattgcgttcttaggattagtgcttccatctttatgacactctaatcttgtttatgtaattcgtcgagttatcatatgtcttacataatctctagcaatatcgccatctaatctactatcggccaatatctgtatgcagaagacagctgattaggttagatcttgacgttgatctagattatataacatatctaccattctatgaaacttctagcggcttgattgtctaaatatcactcttcttttcatacttaatacttcatcagttgagtttgatctattaagtcgtgcttagaatatcgatctctagcctgccttctagttgccgattagaatagcattggagtttcagccgatcgtatctgatttaactatatttgttttatatgctttactgatatgttaaatctgccctttatatcaagatattgttgtatctaagtatgttaggcctttgattgatatattatacctactttaatatcctgatatagagttgtatcggagtattagccgatacatgctagatctatctgatcagctacgctacaaacatatatagtcttgttattgatatatatttcgatctaggtgatttatattgtctcggtatggtgaccgatctatcccaatcatttgatttaagtatatatcaacataaggagtatatatcgttaatatctacagccgatcaagtagatttagttcttcttcacttattcatgactgccgatcgatacacggatgacatcggcccaaagataaatgatatgtcatcggcatatagccgatcggctatcatttatagatttaaccacggtttctttgcttctatttcttgttgattacaggatcaaatcaactggcacgctaatacatccgaaggcaagcttttgacctgcactggagttaagcagatctcccaggccacgtgttttctgtcaacacgcttttggcacgcctggtgggacctgattagaagtcagacgtcagttcttcctcatggccgataaacagccaccaccaccatcaagcccaggttccattaaaggcaaggcattgaagctgggattgactgacatcattgatgacaacgtcatgccaatcgatccagagaaattcacgcctgagcagaagcaggagtttgaagcaacgctgcagcaagcacgagatcagttcctgaactcgttcatgcaaactcgcaaggggacacttgttcagaagtataaaataaaagtggttgctaataatcctgggaccggttcttctaaagatggagaggttaaacaagctccaggcggctcggct

SEQ ID NO: 14250 - DNA, 682 bp, Oryza sativa
gcttgcctttgccgccgccgaatggtgtttccgcctgcacggttggcctttatccccccgatgttgggcgtctacgttatcacagactggcttgctttcgccgctaccgattggtgtcaccgcctacacggctggcctattatgccgccattgttgggcgtctacgtcttcaccgaccggcttgccttcgccgccgccgactggtgtttccgcctgcacggctggcctattatgccaccattgttgggcgtctacgtcttcaccgaccggcttgccttcgccgccgacgactggtgtttccgcctgcacggctggcctttatgccgccgttgttgggcgtctacgtcttcaccgaccggcttgccttcgccgccgccgactgggtgtttccgcctgcacggttggcctttatgccgccgttgttgggcgtctacgtcttcaccgactggcttgccttcgccgctgccgattggtgtttccgcctgcacggctggcctttatgccgccattgttgggcgtctacgtcttcaccgaccggctcgccttcgccgccgccgactggtgtttccgcctgcacggctggcctttatgccgccgttgttggggcgtctacggtcttcaccgaccggccggctcgttcgccgacgactggtgctttcgcctgcacgggtggcctattatg

SEQ ID NO: 14251 - DNA, 560 bp, Oryza sativa
cacccatttcagaaagggctgatgccatagcattataatcgtcagttgcaaatgaagccaaaaagacctccattgcagcccaggtccttggcgatatccggccaacaattcctgtgaaatggtattaaccaatagtgataaactttcttgaccactttgtgttttgactaatagataatgtaagaattaaaaggccagaatatttccttttttagcaaatacaaggtgcatcctaaattgcctaatgagatatagagcaaccgtgccaccgtggagattggagaatatgttacataccaaaatcaagaaatccaacacgtccatctcggagcaaccataaatttcctgcatgcacatctgcatggaaggattcacatgaaatcaagcttccaaacctgcacattttgcacatatgtcaacatgcctattctgaggattgaataaggcaatgaatggcagaaatacccaaatatatgatgtatggaatcacaaggacgcatggagcataccagacattaagtgcagtgactaaagtcagctcaggatcaggaacaagagac

SEQ ID NO: 14252 - DNA, 691 bp, Oryza sativa
gtcatcccactgtcatcaatcattacgcctccactagtcaacctaacccattggtaccagaacagagagaccttgagaggaccatagtcaagttctcatatatcctcgatggcaccgtaatacgtgccagttgttccatcgtgtcccatggcatcgacacaaacatcgctgttttggttcgtgctcttcatgtcttgggctctcgtgtagaatgtatacccattgatctcatatccctggaatgtcgcgatcgacccagacggtcctctcgccaggaaggcaagttgttggttgatcgactcgttacccatgagatattgttgtagccacgcggggaaagtatcaatgtgatgccgtgtaatccatgcatcggacttaccgatgttcctggcgcgaactagagccaagtgctcctcgatgtaaggagctaccaatgaagattgttgcagaaccgtgaaatgggctttacggaataaattattgtctaccttcattattgctttccttctgagagttccctttccccgtagtctcccttcatggcgtgattcaggtaccctgattgggcgaaggtcttcggtaaattctacgcaaaattcgatgacctcctctgttccataacccttggcgatgcttgcctctggacgagcacggttacgtacttcttcagaacgcccatgggctgcaggaa

SEQ ID NO: 14253 - DNA, 2740 bp, Oryza sativa
tcctgcaccccaaactttttttctcataccttaattttttttgttattatatttttcttctgtttcattatgtttttgcaagtaatttttttactcatgcatgtctatttatattaggtgtcgatactactgtacgcctgtacccaccattctcattctttaatttctcatacgatcctgatttttcggatcgacgatgagacatatgagaggagatcctaatatccctcaactatcgaggcggatcatgggggattgacgccctgttcttcctagccagtggaggagcgttggcggcgacgtctctgacggcatggactcgtcagtgcggtggtgccgatggtcttctccctcgggagtgagattttgtttttctgtttcttttttattttctttttgtattttttacagtaccaaggaggctaccacgatttacgctgatctggcgacagtgcggcggtggcagccatgcgggcgaggccatcccaagcggtggccggtgactgcgcgacctggtggggtggagcagtggtggcgtggtggtcgttggcagggacgccatcggatctgtggccaccgatggctgtcacgaccaggagcagccgcagcatcatcctttctcccatcgtcttccattgcagtggcaggccaggcctgatggcgtcgcatccatggccgcttcctcaccaccgccatcactatggaagatgacgacgggagggacagcagcaacaagaggaggcggtggcactgccgacacaagcaagtgtcatcgacgggctacgacggcaaaaaacatccaccatgcgccgctgccgcccgctgggccttctaccctccttccaagcaactcccttggtggtcgcagcgccactgggatgacctccgatccgttggtggaggctgcatacaagatgacggcgcttggatctacagctgcatgtgttcatcgtcggctgtcgagctccagccaggcctcttcctgtcagtgctgcctagacgctctgtgtggtgggggtttttctctgaggcgtcgatgcctcgttcatcttcaccggcggaaggagcagaaaggaggacgacgattaaacagtcgacgcccgctatttccgttttttctatctagacatcatcgagagcaacccatgtttatttcctcaccccgtgtccatgttcttcttttttttgttctttttttcccaccgtgtgtataagtgtatcaagatcatcactacatgcacgcgattcatcccggtggagttaaaaaattactaggccatgtctttttttatgtcaacaaaaaatcttactctgcccactggaaatgataaagtgaaaaatgcgtagtaatttttttatttgataagtttaggagagactccaacaagggaaaatatatggtgaaaacaacatatacagtgaaaacctgaaaactacctttgggtcgaaaaatagatgttcgtcaacatcatcacgagtaaaagttttactcgcatattcactcatgagtaaaaattttactgggagtaaaatctactcgcatattcactgatgagtaaaaattttactagaagtaaaattttttacttacgttgacatgtacacatctcggacgtccatttttagatccaacggtagtttacaagtttttactatgtatgtagtttgcactaaataattttccctaaccatgtcgaaataaccggtacaataattttttactcgacaaatctgttggatggaactctgataaagtggacagagaacatggagtaattttttcacttaacaaatctacgggagaacccaataaagtggaaagtacaggaaacgagagagatggatgcattcggaagcatgaaagcaattttttttactggccgatcaatgcatattgaacaggagctagtaactttttaactactcaatatgatatcgtgtggacgctgttcaaaaagttaaaaagttaaatctttttaacgggacctaatctaatcgggcagtgatttttttactcgtgaccggatacatgtggcatgagaagcaaagtgatttttttactcgctcttagtgggaaccagcaggtgtatcgaacgaaaaaaaatctgagattgaaaacaactgtgcgtatctaacagaaatttcggagagaaaaatcgataaatctgggtgagcaatttttttaccgacgttggaacgtgggggtgggagcggggacgccagggaggagcgatggaacagaaaaaccgggagtgggggaagtcgtgacttgcgctatgaagtttcgtagcgcacggtgtttatgtgtggcgctacgcagcgccaccgtgtgattggtgctacatggagtatgggctccatgattcaaattgagtatatacccaatttgaatgagtatgaaatttttttaaatgtttagatatgaacattaacttctttactaacaagtttgaacttatttttttttgttagattttggttctagatatataacatccaaacatataattagttaggtatgtaataatgaattgtgaaataaagttgagtttgagtgttttgttgttaggtatttggatgaatcaaattcatattcctaggtatatactcacaatttaaacatttttaaaaatttgagagaatttgtgtgttttatactttggagcccggacaccatggagtcccatatggaattatatatatgtatatatatataaatatatatatagggctgcaggaa

SEQ ID NO: 14254 - DNA, 3891 bp, Oryza sativa
cccaaggaaacaaaaacatttcccctcaattaattccgaggagccattccgattcacttagttctttcctaaagaagctagcaatctataatcattgaacacctgtggtgttccaatagtaaatggctagtgtgtgaagagtcaacatcaaatcttcaggtggatgtggactccaggggtagcctaccattctccagcttggtagtgacacattttttttctttccctttttgaaaagcaaacttgacacagttttcgttcatggcatgaaaaatggtcctgaactaatctaaaatgtattgtattgtaagttactagcaagaacaatcaatgtttcagggatcttacttcttgccgagcagctggcccatccgagcttcccaccggccacacttgtgcagtgtcacaccccggtactttgagctcccccttgcaaatcctgtgctttggcgccgaagtatgtgcacaaactcctccttggtccaattgcgcatctaacaacacagcacgaaccaatccatcataaaccatcacaggccggtgaatgaacctccccttagaacctaaagaatcacacatgacaattgaactatattccaaacaacctgcttcaagtcgtcctcatagtcattcagattaaagttgatatccgcgtcgaggcctctgaacttgatcgccgcgcgatcataggccctgcacaaggggttctacaatctcagcacacagggcaaaccagagcaacaattaagatacaattggtgaccatttatagtaacctcgctgcggcatgagctgtatcgaaaccacctgaaaacagaaaaaaaaaacaaggcaggagcaaacaaatcggaatcaagctaagtagagacccaaatttagcagtcatgcgagcgaatttagcttgggagactagaaataggagctcacccaggtacacctgcttcccgcagtccctgccaaaattggacgagacaaacgaagagattactactccaatcaagcagagtcaagcagaggaagtcagcgtgagggaaatcgagcaaggcgaagctaaccagatgtgcgactcccatcgcccggtcctcctgtagaaggtgacgcccctgtactgggagctccgagacctcgggccgcggcggctcttcttcccgccggcgggggacctctggctctgcgccaccccgagatccgccgcgcggcgcggccacggcccctccccagccgccgccggcatcggcatcgtcagcggtggcgtcgacgacccgtcccccgccagcgccaccaccgcagacggcgaagggaagagctggcgcgtcatgacaggcgaggagcacccgtcctcgtcggggctcccgccgagcaggtcgaaccggaagtaccccccgccgccaccgtcgggcggcggcggcggcgtggacgagctcgacgtcgccgccgacccacccggcgactccacattgagatccagcaccatactaaccaaccgctctcccccgcgcgcacccccaccagccgcggggcgacagagcgagctgggtcgcccctaccgttcccccgtcgcgctcccctagcggcggcaaccggcggcggctaccacgcgggagagaggagcggcggaggcggccatggcagtggaggtggaggagagggaaaaggggggggagggatggatgggacgtgagggagacgaagggtatcgcaagtaaaaccatttttgtgctgcgtctccgccggaaaggctacgcgtacacacacgcgcggcgggggaggggtgacgtggcgcggcggcactgggcgggagatggaggttttttttttctttttcttttttcagaacggtggagactcctactagtagtagtagtatggttttgtgtatgtagggtgtattaaggaggagtgtgctatgctttgtttgacttgactctggtcaaatagttgcaatgtgtttgccgactactggtgctagtccctctaatctagattataagacgtttttacttttatcaaagttaaactgcttcaggtttaaccaagtttgtaaaaaaataataacattttcaactcaagacaaatttattatgaatatatattcaattattgattgaatcaaactaatttagtattataaatattactatatgtatctataaatttagttaaacttgaaagagtttgattttgaccaaagtaaaaacgtcttgtaacctgaaatgaatagagtagtatataaaggtagtcgtatataggattgcatcacagtgataaaagttgtattttccactcgacattgctttaatttattttttagaattatatactaatgtttaaaacgtattatcaaaatgtattgaatgttagaataaaactaattttgtattgtagatgttgctaattttctctatataagagtatatcaaactttagtaagtagctagagaataattaaatcgacttataacacggttggattttggttacatggttggagtacttcttttgaagtcagataagcatatatagattaaggttgcatttacttgtaacaataattaacggctctaagctagcattgttggctcgttttattacggagtaaggatatctacacgtctacctaaactgatccatgatatagtgaaaacaacatttctagagcacacgatataaattattttcatcgtttgctctgccattaagttgtaaaatagaatgaagcaacaaaaattgatttatgtataaaatttgtatatatgtgctcttggcaattttaaaaaccaatgctgaaaactaaactataataaaaaaatgcctcaaaattaactctagaattaagtctaaaaattcaaattttgctttgactcataagctaacgggcaaacgatggagcaaaatacaacgtgatgtttttaaaggtatggatatgaaatatagaaacaaggtgcttctttaaaaggagataaatatattccaccattccataatattcctcacaaaaaaataatataacatacatgtttttatatgcacaagacaagcactttctaggttgtggttaaattaatgtacaatcttttaaaaaaaatgaagtctaactcagcttctggacgagagagacacccaagcatggcactgcatattctacataatacaataaacttgattcataatcaagtataaatatcaaaggagcaaacaataataataataatacttcactgttaagaaaaacttttatgacatgatgtatctgcagggaccacatgatgcgagggagaaattaaaaattttaaaaaaaaactttgtgagcaacattggttagtgcgtgcagcatttcctgtcggcaaaatatccaccggtgtagtttcccattggccgccccatccccatggctgtcttctcctgtgctgctactgtccaccaccagcgtgcagtaatgggcaggaagtaccaaacacttgttacacaaacaaggaaacggatctgtgaccccgggatattttgcgcccgttgcacgtaggaactgatttatatatgcatatatatgtactacatgcctcctaatttaagtgcagttgtgagttttcgtgttcaacatttgacagttcatcttatttaaaaaaaataaaaaaattagttatgcataaagtattattcatgttttatcatctaataaaaaatactaatcatacaaaattttcaaataagacggacgatcaaacgttgaacataaacgttgtaaaattgcgttatttttggacaaaggtagtcctactgtcttcatcatcattattttatatatatatatatatatatatatatatatatatatatatatatatatatataagtcttaaggtgctacgtattaaacggcactcacagtaacca

SEQ ID NO: 14255 - DNA, 1081 bp, Oryza sativa
tgtggttcatggaaagttgcaagctgacagatttacttcctgctatatctgacagttcacaaggcaaacagtatctacggctaccattatgtaattaaaggaacaaacatatggttcgtcatctcaagaaataggagcatggaagtagtagctaattagcaatcgaatgttaacttgaaacaagtttaactgtcttttcaaattgcatataagttttgatgatagatataccctgaggttcacaaagaagcccggacaaggagatgcatataaatgtggatgctgggacatcgatgtgccctgaggaagcacaggccactgaggacttattggctacagaaaacaatcacaaaatgatacctcagttaacgttatcagaatcaaggtaaaagagctttgtggctttggaactgttataggttataaaaatacacagataaacaaaatatctagccagtctcttcaggtggtagttgttcggcaatttctttttcaattcaatgaactggagaaattgaataaaaagattggcttttcttgatttgggaatacatcaacagtgagttgtcatttgtcaataagctgcataagatggttcccagatggtttcatacaacaattctagtgacacatacaattagtgtactaattattttgaaagtgatagtataatgttatgaaaaaggactaaccacctgatcaaaagaatctgaagacggtcaaatctcaaatggtatagcggttacaaacaccaaatattgtagcatatttacctgagtaacaacagaacttgaagcttcaggagaatcacaattcaactggaacccagttagggtaccatcacttttcagctcatgaacgttaggctgtgaaattctcagatttaagtcaatgatgtctccatcaaccactgctaagacaatccccagtgtgcttttgttaatataaaatttggatttgtcgttctagtggataaagcacaatatacatagtacaaaagaaataccttcattgtcggtttcaggtagaacatctccatcataagaactaggatcaaaattagtaacagcttcccttccat

SEQ ID NO: 14256 - DNA, 1570 bp, Oryza sativa
taaattatatagtaagtctaatttatcactatttgagttttagtataagattaggtcggccgtcttcgtccacttctgttatgatgtgccgaccctcaagcttcttcgcggcacctcgttgcccgcgtgccctcttctgtccaacggagggttgacttccactggcctcctcctcctggttcccctccacatccctttccacgtgcccctcccggttcccctccgcatccctctccacgttcccttcctcgttcaaatactggtttggatcctcgttcccctcttcttcgttccagtactggctacttccctccgcgattgtatcatacaatatctgttcctcattacgatcagccatctgttcatacaggaaacatctgctaagtcatgagacatttatgttttaacaatcttatatgctaacaatcatatgctaagtctaggtgacgtatattataggaccctagctaatcaataaattatatagtaagtctaattacaaatctaataatcttatactaaaactcaaatagtgataaatgctaagtctaggtgacgtatattataggaccctagctagtcaataattatatactaagtctaattacaaatattataatcttatattaaaactcaaataatcttatactaaaactcaaatagtcatgtatgctaagtgtaactgtcgtatattagaaccctacacaatcttatatgctaagtctaattacaaatctaataatcttatactaaaactcaaatagtgatatatgctaagtctaagtgtcgtttattaaatctaatagtcttaattgcattacaaatataacaatcatatatataattacgtcacttgcctgcgcgaatgtcgcgaccgagaaaattgcattttcccgaacgctagtgtattaatccccgtcccaggaaaagccggggtacaccatacaaacatgatataaaagacacatctttattatatcgataatatttacattattacaaaggcacttaaggcctgacaatcaaaaataaacagcagcggactagcgggcctacggctccatcttcacaggcgctcaactcgggtgtaagccaagactctacctaagacttcttctccaaagcttctcttactgaaggggggagaaagatagagcaagaatgagtacaaccacagtactcagcaagccacaccggcggatgcacgattaatgcaagggggtacaaggggtaatgatataggggttaagttttgcagaaaacagcatttaaaagtcacttagttgcccaaagccattttaaaaagacgatcctagagctacacagtattattaatcaaggtcgtgaacccgcatgaacctgccttaacccaaggcctacatgattcagaccgaactggcaacccgaccctgggtcccagctcgtcccaagccaacccaggccaaccattccacattttagttgttgagcaaattttaagaattaaaacactaacttgggtacattgcttggcttgcccataaccgagggcgcggctattcgaatagattatactctgatcagaggtgta

SEQ ID NO: 14257 - DNA, 546 bp, Oryza sativa
atatcttggtattcaatgcattttagaaaggttagttacaaagattggaaagttattgaacaaagaattgagaagaaacttagtagttggaagggaaaacatatatctgttgggggtagactggttttgattaattctgttctttctagtttagctatgtttatgatatctttttttgagattccaaaaggggttcttcaaaaaattgattattatagatcaagagtcttttggcaaggggatgatcataagaaaaagtacagacttacaagatgggatattttttgacaacccaaagatcagggtggtttgggtgtccataatttagaaatacaaaataaatgccttttgagtaaatggttgtttaaattaataaatgagcaaggggtttggcaagacttattgaaaagaaagtatctttataatcagtctattacccaagttgataggaaactaggtgattctcatttttggtcaggtcttatgaaagttaagaatactttcttaaacatgggttcctggattctgaataatggggaacaagtc

SEQ ID NO: 14258 - DNA, 714 bp, Oryza sativa
tgtgcccctgctcgcaacctgagtacaacgatgttctgtggtcctctaacatcttgtccaatttatgggcccccttttcactttcgcagtcctccttggcgtcctgcaacatctgaccaagatcatccgcaacgtcgttaccatcagcatccctttcctcctcgcccgtttgatttccttcaaatccaatgtactgagcaaagtctggaatattgtcgtcttccacttcattttattccatttcaacaccttgctctttgtgggatgtctaacaattatagcttggcatgaaccccgactcaaacaagtggaaatgaatagttctagatgcagaatacttcttctgattcttacacttattgcatggacaacaaataaaactcctttgcctgttagctttggccactctcaaaaaacagtgcataccgtcaataaactctttggaccgccggtcagcatacatccattgccgatccatctacatgagtcgaaaaaaaatcgtacacaaataattattcttataataatgacagtcatacaataattataagataattacaaactctttcaacagtcatacaataatgacatatctttattcatacaaaaatcataaaatattacaccaaataattcttatttactatttctaaagttttaaactaattttaatgtgttttacttcttttaattttcatttttgttttctattat

SEQ ID NO: 14259 - DNA, 2175 bp, Oryza sativa
cccagtctctgtgatggcacaggtgactcaggcggaaaccttagccgccacagcctaccttccccaacctctcccctaccttgtgccacttgagcgagtggccgtaaagtcggtgcttaaagctggcggcctacgaggatgacgacggtggggctcgcggtggcgaccaccatagatccggcgtgggcgaatccaaggtggaggtcggccggaaagacgtcggcattgaggcgggatgccggcgcgcggatgacggcgacaaacgaaggtggaggcggggaagggagaagatagcggcgaggtgcgaactgcatgggggggtggcggtggcgacgacgatgccaaatccgcggcgggtgctgccagatctagaggcggagatggtggaggtaggggtggaagtgacggggtcgtagtagggtcggcggcgactacggtgggcgccgccggatcaggtcctcggccagggccgattgccgcccagtacgagcagttggcgtgaggtggcactggcgtagcacgggtaggctgaggaggcgcggcggctggcgatggaggacggagcaaggaggtttggccgtcggtgacggaggccgccacggtgcatggaggtgcagccgacaacggtgcgaggtcgtggctggcgtggaggcgcacctagcacgcgtggaggtgaggccggcctggaggccgccgtggaggaatgaccggcggcatggaggtgtggtgcagttgacggcaggtagcatcagcggcaacggtacactagagcgggtggcgtagctggtgaggctagccgacggtgggtgccggtacagcagtacccacgcactgacggaggtttgacagggaaggagcaatgtagcatcaatggtggataggcaggcggcagacgatgggtgaaaacctagcccggttttggccgagccgacaacgacggcgtttgcgtcacattccctcttgagggcattgtcatgtcgtcccatcgcctctaaggagtttgtcgggtgaaagcgcagtctccatgacggacggccgcggcggtgtttctgtcgctcctctccctggagacgttgtctaggcaacccctggccgaaacctcccaaacaactggtgcaagctcgctctagatcttggttctcttgtgttggcgccctagcttatacaaaatgaccatgtcggagggcctagggggagaaatggcggctggtctggtgttagccttctcctgggttcatgtgtcagagctgtcggtgtgtgggtggtagcaatttttttcttcgttttcctggttacgaccttacatggttataattttgtaatttttttctactctatcattatgaacttcgcactgtttggcgcgagtcgttcaaaatatatatataagggtgtatggttctgaagcaagacaaacactcgtttagatttacagcgtcagaaatacttatatttactgatggagatagtgactttcatattcttatttttaatggtctacaggccaaagttgagaattaagagtaggaaaaaaaccctccaatttctgtagtactttaaaataagatattggtggtgaaagtgaatgtgccattcatctacttccatagtaaattttacaaattattccttgaatttcttaatattaaaacacaaccataaacgaataaccacacaaaaaattaaattgaggtgaatattccctatggcaacatgaggacgggtaatatatttcatagaaatattttttatttattttggaccactataatatattttctatcggaagcaaattaagcacagtcattcagctagtaattttaaagttcaacagtggccgcggcttataagacaaagctcaaacaagtggggaacacactatacatggtccatatgactagcggcaaagaagaaaaataggtagattgaatcaattattaggtactttgtatataattgaatcttctttatattgctactgtctgcaaatgtgttgtgaaagcgttcagggaaggaacacgactcgtcatacatttttcacttatgggaagcatggctgttggcctgttgatgccacagttggatagacctcttgtgtcccattgttatcagatctcttggtacgatggtttttggttggtatatgtggccctaattaaattgccaaaaatcata

SEQ ID NO: 14260 - DNA, 2495 bp, Oryza sativa
aaccacaatttgttttagcacaaacaactagtgtgtcatgataaatgcatgatcttgtttatttgaaaaatgagatggccgattggccattaggtccaacaataagtctccattaatttgagaaataaaatgaggtaaaatcgtcatcacctcgaggtcatctatctcaatggtaaaaatgagaaactgaattatactataaaacatttcgtacaatagattacagactacacaaattcttttttccgtttcacttgttgtcagtgatcacctaatttttttcttacttgtcagtcacttaagcttgcacaaatatcactaacttgcataatttagaaaccttacaactttaagtttagaaaattgagggaattttacagcgctgtaaactcttcaaaaaatcacactgtaaaattcttaggcaatcagtgcaaatttaaaacttccaattcgagcatacgagggcattatgtatgaatataggtgctaatctattaccaaccagcatttaagaactcggcacattgcggtggcgacggcggcagcggcagtggcggcgacgacgctgggtggactggctccaaaggagatgacgttgagatgaggatcgacagtgatcgccgccggcgtctcaccttggctccagtttcttcctccgtggtacgtggctctcgttttgagtgtcttttgcaggaaaatcgggatggggacgacgacgatggtgttaatacctcgcatgagattgccgatgaggctgtcatcgaaactaggcagagtgggagagacaatggtggtcacaggcaagcaacaagtgatggtggaggccatggacgaccggctcgatctgatgaagcttcgctagtacaggagttctggagcgaggttggttttccgacgccggcgaaccgctggtgggaaaaacaacccgagcctccctctcgctttcgctctctttcaccgaagcttgctgagaaagacaacgctggcggatggaatttggtgtcttacagtcgatcaggaaaagaattcggtcctgctatacagcgtcgacgtggatggctgattcggccatggaaaggtcctcttccccgtccacgtccggcgacggtagtggtactgggggatttcctgccggcggcgacatcaaaccaagcgacaatggtttcctcagattgcgcattacaaggatcgtcctcagatcacgcgctttcactaggattgtttcaaaattcgaaacaatcttttgtgggccgtgtgatgggcccggtcggcatgcgtccttacggcagatcgagatatgacttgcttcgaccatcgttgacgcaatctgccatctctttcattccatcaacatagccatctcgccctagttacgctgcgatggcggcgactgaccctcctcgccacaaccagcagcggccgctagcaaatcatcctccccagcaacaaatcaatagaaccaacttgcaagaacaccacggcggccgggttgcgcagcaaggccgttctacgcagcaaggcggttggggtgcacatggtggccgagttgatcatcgtgatcaaagtagccggggtgcacatggaggctgggatgcaccaccaaatcaaggaggacatggtgctttaccttcctacagaaacaacaaaggtggacgtccgggatttggtcagcgcccatagggaagaaacttccggccagggttccagggccatggccgtgatgagcaacctcgaagggatgcaggcaatcaaggtgtccctgttcatcaagccctaatagaaagtactgtaaaacaagacattcaagccggccgaggagaaacagctgccctttcatccaagaatagtgtggaggtaacaacggcaaaagccaagaaacctcgtccacttcactgtttcaggtgcaagggtagtggccattgttggatggctgcaaaactgtccttgactgttttatatgtaacaagaaagatgcacatgtgccgaatagatgtcctattctaaaggaaccaaaacctactgctgctttatttggattcagtgaacagaacatgggtttcttgccgatacaggagtttgatatgaagttgaagccgccgaaacctgcgccaatggctttggtgaccattctcggtggtcatttagcagctagtgccgtgcagaatgagttggcacgcctcatccgagccgattggaattgggaggctgtgccacatggtgacaattcataccttgtgactttcccgtctgaggaggaactcaaccggatggatgatgttgaattcaggttaaagaatcacggtgtatctatcacaatccaacagtggcagcaagattccgatattataccggtgtatcagctcgacgaggtgtgggtgcacatcactggagtgctgcactcttggcgacactatctttgtttctgggctttgggcactgtagttggaaccacacaagaggtagatatgctgacctttcgtaagaagggcattatt

SEQ ID NO: 14261 - DNA, 3698 bp, Oryza sativa
aagaagttgagagtatcctagaggtgctcaaaaagaacatcgatatcttcgcctggagccctgacgaggtggggggtgtcctggcggatctcatcatgcatcacctagcagtcaagccggacattaagccaaaaaaacaaaagctgcgcaagatgtctgccgattgccaagaagcggcgaaagccgaagtacaaaaattgctcagggcgggggttatccaagagattgatcatctggagtggttggcgaatccagtgctggtgcgaaagtcaaacggcaaatggcgcatgtgtgtcgatttcacagacctgaataaagcatgtccgaaagacgacttccccttgccgcgaatcgaccaactctgggggcgaagaggggcgcgaagtatcgctcgaactcttagaaggagtaagggtcgaagcgctcgagcacatgcacaagtacgccacaagcacttcggcaacttacaacaaaaaagttcgacccacgcagctgatgcctggtcatcttgtcctaaggaagaaggcgaatccagtagtggttggtaagcttgaatcaaagtgggaaggaccatacctcatcaaacacaagtctaggacgggatcttttcgcctagcgacactcgaaggcgaggagttcgaccattcctggaacgccgcctctctcaagcgcttctatgcctagaatgggtgtcacccaaatcgccaacttgtaaaaatgtacatacagttatgtaagcccttcggcaccatgtaagccattcggcactatgtaagcctttcggcaaaaaaaaaaaactggatgtagggctattatccccatggaggcccaaaccagtataaattctctgtgccctccgccttctttttatttttcgtgtgattgataatttgtgaaaaaaccccaaggcaaacgcctgatcagcgaaaaaggccagggggagaaacgaatcggtcgaagcatcgctcgccgaacgttgaaaccgcaacagcttgtctcggaaaataactagccgaacgacgttacgattcgatcaacataaaagcaaaagtgtctctttcgacacagaatgctacaggtcgaaaacgaacgacaaaaagctgaaaagtcagtacacctatttcgctaatatgcgcataggggccggcatgttccgacctaacaaaagcacaaaatgtgacaatgcgaaaaatagcgaaaaggaaataaagcacgttctttattaacttcgaaaaaataatcgaagaatacaaggtctacaacacgatacaactcactttacaagtaaattacatcttcgcccccgtaatcattatccctccctaaggaatggacagatgaactaggttcgtcatcactactaatatcatacacaaccttaagaggagtagggggcgaaacgcagaccaaactgtaacgacgctgaaagatcatttcctgacgtttagttttctgatggtttcgccaaaagcgagccatatcctccaaacgtcttgaatgaataagatcgtaatcttctaaggttcgcccggggtgcgcccgcagccagtcggcaaccttgaaaaccttatagctgcgaccgtttatctccatttcgcgataaacagggagaaatggacatcgcacctttggtaggtccttcaatgccacaaatttctcgttttgacttcgccagctcccggaagggggccgaatgcacaactttcggtgaaccccctgatagacaacgcagaaaaagcaaaacacagcttacatagtaagaataggcggaaggagggggaggtatggcataatgcgagatgagcgaaataataatttgccaaagacctcgatcatcaaaaagcaattaagattgtgtcatatattccaaatgtacaaaaaagcctttttaaggttcggcggcagcctgccgaatgtacatcattcgccttctccaggcaaacgcaaaatcgggaggaaaactacaaaaatcaaaggaaagggcggagggcctcacacctctaggtgatcctgggcatcgcctccgaccccttcgcctaccgcgccctcttcttcgccccgatctgccgcctccgccttcgccagttgctccagaaagcgcgctttggcagcggaccggccatccttctgccagaactgttttcgccacgcgcgaagagcgggcgaaatgttctgcgcactaatctcccagtcccccttcgcataggtagggaactcggcgacgtgctcgcagccgaactgttgcaaaaggcctaaggtaaaggccgccgatacgcgtgcacagtaatcgccgtacgcggtggcacagtccgaaaccgatccgccagcctgctgggtccactcggagaagtcgaaggctgaggcatcctcggcagggaccccccgcaccttcgcgcccatgtcggtaagggcgaggcggagcgtttggcaagccgttctcgcggattcggtggtcttcgccatctcccgtgaaaaccgctaagactcctccgctgcgctcgcttcggccctgccagccttctggcgaagagcctccatcttcggctctgtaaggttgtagtaatcaatgagcaccgccgaatgggccttctccttctccagttcggccttgaggcgatcaacctcggcctaggcctctttccctttgtccaattcggactgaaggcgtttgatttcaattttcgcctccttgagggtgtgggccagggactccacctccaagttcttgcggcttatttcatcatccttggcccgaagacggctcttaaaatcgtcaaaacgggcccgcacggttcgctctatcgaacagtgagccgcaagaatctagatgaaagataggagcgggcgaaaagaacaaaaggttaattgcgaaacgtaaaaaaaagagggaagaggaaaacgaaggaagagaaggcatacccgaaccgccaaacttttaatggaggaacaccccttgttgaactcgttaagttcggtgaacaggctcggggtgccggcgggcaagataagattacttactccctccacaaagggaaaaaggttcgcccgggtctcgaagtcaccaggggcgaagtggggcgccgcgagggaatactctgaggcagatgcttcggcggccgcacacttccccttcgccttgaccagcggcgaaatagctggctcgcgcacagggctcccgaaaaccctcgccacagccgacacgatccgttcggcggaggcggaagccccggcggcggcgctacgcctgccccagcaacgctgagcggagcaaggggagcagtcgaaaaggtccaaactgcggccagcaggtgaagtcggagtctcgtcagaagactcgtcgttgctaaaaacgcgagcgatgtcgacgagtcccttcttttttgagatcttcttgaccagacctcctttcgccgccttgcccgacgagaacgcaactaaggccttcgccccttccaaatcctttcgtcgaaggggggagctgttcgactccaccccggtctcgttgtgacctggacttggggtaggagtgtagccgggggtgtcgacgtggtcttcgatcgcctcgttcacggccttatcagccacagcctccacctcctcttcttcctctccttcctcctcgccgtcacgttcttcggaatcatcctcatcatcggcatcagagtccgacgaagcaggaacccttcgcttcctggggg

SEQ ID NO: 14262 - DNA, 2469 bp, Oryza sativa
cactgagagcgaatgccaccgaagagagtcgtgaaggagaaggttgctaggcggaaggaaagcgacgccggaccgggcatggccgttgaggaaggagcagagccatcggcgcccatggccgaagatggaggaggacaagcaccatcacaaccgccttcggcccctgcaacctccgtgcaagtgacgaacgcggccgacgtggtgaaggcggctgcggcggcaagggcactccagactagggcggagatcctttcgacaagccaactggtggtgccccaagccgctccatcgcagccggtagcggccccaactgcgctcgccgttgtgcaggcccaagacagccctgaccccgaagcacaagccgaagccgacatggaagccatgcggcagaacatgacacggctccaagacatgcttcgccaaatgcaagaacaacaataagcatacgaggcggcaaggcggaccaaggccacgtcgactccaatccttcagtattcggcaggatatgtcccatctcaagtccatccgcaagtgacgacccagccctttccgccacaagccgcacaggcaccggtgtacttcgacgggcagcaatcggccgcagcagtgtattcggcccctcacgtgcaactgcaagctccagtcgctgcccaagtacaccatcaaccacctggtcaagcgccacaaacagtggcagaagcggcttcggctctgcaggcgcaactccaagctttccttcagcaactcaaccaaccccactgcatttcaagtacaaccccatcggcccacccggaggagaatacaagtcaaggtgcgcctaattggttgccaccgattcagccgggcctgggagcttcgccatggaatcaaggaccgcagttcgacttcatcaatgctgctcagagaccaaccgttcggcagcaagctccaggcttcggaacaaaccaagcaccaatccaagctgccacgacgtggtcgcagccaatttttgacccatccatggcggctcagcaagtacctccagttggagccaggcagtcgaatgccatggcacaacctcacgcacaagatgcgattttgcccttcgccacaccgtacccgcagcaaagtgcagtaaacagggcgggaggcgaaaaggggctaccgctgagcgggggaatcaagactcgtccaatcccaccgcagttcaagttcccacccgtcccacgctattcaggcgaaactgacctgaaggagttcctctccatctacgagttagcgatcgaagcggctcatggtgacgaaaataccaaagcgaaggtaatacatctcgctctagacggcatcgcccgttcttggtatttcaatttaccagccaatagcatttactcatgggagcaattgcgtgatgtttttgtccttaactttcgaggcacctatgaggagccgaagacgcagcaacacctcctcggcattcgccaaaggccgggggagtccataagggagtacatgcatcgcttctcacaagcctggtgccaagttcaagacataaccgaggcgtcggttataaacgccgcttcggccggtctgctcgagggcgaactcacaagaaaaatcgccaacaaggagccacagacgcttgagcatctacttcgcatcattgacgggttcgcaagaggcgaggaggattccaaacgacgacaagctatacaagctgagtacgacaaagcctctgtcgccgctgctcaagctcaagcacaagttcaagttgccaaaccacctcccctctctgttcgccagtctcagccggcgatccaaggacagccgccaaagcaaggccaggcccccataacttggagaaaaagttcagaacagaccatgcgggcaaagctgtgatggcggtcgaagaagtgcaagccctccgcaaggagttcgacgcccagcaagcgagcaaccatcagcagccagcccgcaagaaggtccgaaaagacctctactgcgcctttcacggacgctcttcgcacaccacggagcaatgtcgaaacattaggcaacgtggcaatgggcaagacccaaggccgcagcagggaacaactgtcgaagcaccccgcgaagtagttcaggagcaaacacccccagccgaacaacgccaagatgtacagcgaagtgtaatccaagtgattacaagggctgacccgccaagccagttgtccaaacggcagaagaagatgcatatccgtatggtccacagcatcacttcggcgggtgaaggggcgccgcagtatctgaaccagctaatttcttttgggccggaagacgcagaaggagttatgtttccgcatcaagatcccctggtaatctcagctgagatagctggtttcgaagtccgacaaatcctggtcgacggagggagttcggctgatgttatcttcgccgaagcatatgccaagatggggttgcctacccaagcccttaccccagcaccagcat

SEQ ID NO: 14263 - DNA, 1820 bp, Oryza sativa
cccagcagaaaacgcagggatagtggaagggaagaaaagcaaaaaaaaagagagaaaggaagaagaggttaaactagtgagggggaacacaaaaaaaaacctccatcaagtaaatttcccccaagttcttcccgttctttcctcaacacacgttgttcttcagaggaagggggtggtggaaagggaagaaaagaaaaaaaaatcaaaagatgggaggaagaggtgaaaaggagggaggtgggaacagagagcaaagagaaaaacctccattaagtaaaaatttttcgggttcttcctgtccccccagcacacgttctttctccttcttcgtgttctttctctcctttctcctttttgcttttccaatctgagttttgatctctcctctagtttttcttttggatctgagttttgatctgagtttctatcttggagcacaagacattttttaagggactcagggagtggaccatttttgtgacagaacccaattcggagctaaaaagcccaaaacgggtatcatgtgagagcccatttgttttgttgaaaaaagcccaaatcacagctaaaaaactgaaaatccagactcactgaactacagccaaaaaagactcgggcccacaccttcgctggcccataacttagcccaaaaaactggggcccaaacattgggcttttgttagttttttggacccaaaagtgtgttttaaccaactttgggctttgggctttttgttagtttttgggcccaaacatctgcaccaggttgtgattttttttgcacgtcacattttgattttttgagctttaccgttagatacatatctaatggtgcacaaagttgactgatcaaatgcaaaaattgcaatcgactgcagaataggcggtcccgattagcaaacacaaaggattaatgaacaactaggtcggcttgtgcggttgtgcccgagtgtggaatggcagacgctgcccaggaataacggagatgggatcgatggcccatatacaaaacaaggatggatccatccaatggtgtcgtgcagctgatcaccaacgtacgtaaccctagagcgtcggcaaaggcaatgtggcggccgattcttctccagcctcgccgcactcccatctcccatctccggcgtcgtggccacgacgcgaccggccacgacgcgaccgacgacgacaaggcggttcttcccctccgccgcctgattggctcacggggctacgcctcctcctctgatgccaccaacgccgccgcctctgccgccgccaacatcgcggctcctcgagctgacagcaggaggcggcggcgttcaccggcggcaaaggcgaaggcgaagcagcatctgtacgtcgtgctgaatgaccggaaggacgcgtgcgagatccacaagctggacatcgacggcggcggcggtggccgcctgatgatgaacgccggcgacatggcttcgctgaagaccctccggcggctccccgagccgccgctcctccggctgcagagccccacagtccacccatgctccaagttcaccaccgtcggcagcagcatcgtcaccatgggcgagtatttcagcgatcattattgcggcgattggtttcgcgaggccagggggaacacccttgtctacgacaccaagacggcggcgctcaccgtcgtgcgccacctcccggaaggccttcttggtgtctacgacttcgtggccgccattgccgtcggcgccaacaggctgtacgtgctcgacgagggcaccatggacgattaccgtggcagaatcgttggaggcatgcactggtttagattgaccgacgacgac

SEQ ID NO: 14264 - DNA, 4242 bp, Oryza sativa
ttcctgcagccctgaccaagatgtcgcgtcgtgtacgacggcgacggcgagctcacgtcgccgctcaccggctctctggctgctacaaggtctcaaggtctgagaagtacagtcgtcatatggcagcgttctggatgtaacatgcatacgcataattactccatcaattctaaaataaacaaagctaatacgaaatatgtcatatcccgtactttattttgggacggaggaaagacctaagttaagacggtccattaagctttacttcattgtactctgcctttctctcaatgttcttgcctcttaaatgaggccatttactactatagataccggtactataggtaccgaaaatgcacaaaaaaagcacctataaaccctttttcacctccgtagtctgaaaaacaaaaaaaccagcaccactaaacaactataggtgtcggtttttcaaaaactgactcccacagaaaccaagccgagcgggcagccggattttctcattagcgcggggggatccttatccatcccatctctctctcggcccctcatcctcacattccctctcctcccccctcgactaagatgatggtgggcggagccgcatccggcgatatggcggcctgggatccggcggcagcagtggtttccgtggtggatccgacgtcagcggcagccgttcccgtggtggatccgatgtcggctgcgtcggcggtgagcggggcagtattggcggccattctcacggtggagacggtgtccttatccacactcgtcaccatctcgaccaaagtctcctccctttccatccaaatcgaaatccaagtcctagccctttcaaattgaaatcccacgtaggcaccagggctggctgctctgcgcgtgccggttgccaaatccgacacccatgtggggttggcaaccggcacctaaagttggttatgtagtattgagtttagtcggttgctctattaataaattgattaatataatattgttcatagattgcatatatatactttatatatagttgatacgcataagtaattgttagaagctaaagctcaaaatacaagtatgctatctcattaccaactagcaattagcatcttaaatttcatacaagacacatcatcttatctccatatatatcatttttcataacattttaacatcatcatttgttcaatatttcacatatatacattcatcaattccacagcaaagcgcggggtatcacttagtatatctatatctctacctacttaaaaaattatgtaattattctagaattttttcgtccgtcctgctccatcagtgcacctcgtcccatcctacgcgcagtgtgcctctagccctgcccaggctaaaccctagcatcgctgccatatcgatctacctccatgtgcatttcctccaaatgattgtaaaaatcgattgcctactccttccttaaaatttaccctgcgatttccctttcaattcggttttaattcgtcatatttatttgatttcaacgatagccgacaatgcttccctcagccgtttttatcctgaattttgcgtattcgctttgattttgggaaaaaaagaagcaaagagtatatcgagtggataaaaaccctcaatcaattttgaaagatcgagaaagattcaaccggatttgggggaagatcggctacaacatcatacgggcatgggacaggactgtcttccggaggttgaagatgctagtaggctgtgctagttgggctttcggaggttgaagacgctagtaggctgtgctagctgggcatatgactccatttatgggctgggccaaagaaagccagatcacgcgaagggaggtagcgggttgggctggggctaaaaaaggaaggaaaaaaaagggattttggctcaaaaccaagcattgttattattattatttttgactaactaccaagcattgttattaactttttcaattataaagcgatactaatgtttcaatttattactcacctcctaatagttgttgcaccactggaaaattacctgttgcaatgcatatgtatttttagtggtatatataaatatataataattcgagcacattgtcccgtaggattaaggctgaaacacaaacaatctgtcccaatataacaatcgatccatgtgctaactccagccgtccaccaaaattgaacctacatatctgttctcctcttctatctagtggttgttgaaatttccctaaaacgggaattttaatttacacaactgttaatatatcggataacgcatataaggatggtaagaatggatcatttgttctcataaaataacttggacttgtatagttgtataatttcttctacatgcatattacaattaagtcagcgtagcagtacaaactagagtaaattgcgtttagggctaccttttattaccaaagtttcactttggactgaaactttggaccaccctttaacacatttttttactttgggctaggttactttacctttcattcactttgaaccaccccatataaactttttaggaatgcataaatgacttttcctactttaaagacatcagcaacccgtaacccggtaatctttttcaacttacacaggcaattgtttacaacattatagagtagatgcagctaaagaaaataacttggggtggtccaaaatgcaccaaagataatattacctaatccaaagtaaaaatatgagctggaggatagcccaaagtgaaactttgataacaacaagtggaccaaagtgcaattaactctataaaccataaagcctgcaactgccagtagcaaagtgatgtttctgcagtgaggtttggcattttccccagaattttgtactacaataaaaaaattgaaaaagaaatcatggaaaacacttaggctcggtcgcccgacacagaagaaaattcggtcgttctgacactggcatgcatgcaagattacatatagttaggccttgtttagattttaactttttttttctttgaattttcaactttttcgtccatcaaacttttctacatatacaaacttccacattttccattcacatcgttccaatttcttcaaacttctaattttggcgtgaaactaaacaaccttagttccttatctttctctccttctcactttaaatattttttctcctacattacttatggtctgatcacaccgatatattcattgtaatcacatgattatattctgatgacagaaaaacatatgtatcaaaccgtcaaaatgcaatgtttcatatgtgatagcgacatgcttcaatgtgtttcacaaagttcaaggaagtacatgtcactactccctctcctctctctctcttcacaacatccatgcatgcattttagcaatatttaaaatgatttttttcctaaactacttatccaatctacgatccactcacacttttgtatttgttttaactgaatctttatcgtacgactatattttgatgaaaaaaacatatgtttcattctgttaacacttgttttttatacgtggtagtgacacgtttcaatgtgtatattttctgtgtttcacaaaatttttaaatgttttagttgctgagtttttttattatatataacttaatattttatttgttgattaactgaaatatgaccatccaatttttttaagggatcggacgatccgtagattccacaaaaatcatgcgtgatccttacgtagtcctgagacaaccctcggagtttcattatttttggacttgtgtagtgacctatagaaattccaaaatgatcctgtctagaaatagtcgagctggaccccttcttaccaccaggaagtataacgaaacacatcaaactgggcctgtttgtgcgacacacgaataacaaatatcaagcccaagaagaacggagcggggatccaatggtttatagttgaattaacgtacgaaaccatactcggtgtgctggcccatggtgaggatgctgctgccgaaggcggtgaactgcggcaaatcgctgactgtcggacgctgcagccggaggagcggcggctcaggcagccgcgggagggtctccggccaagccatgtcgtcgccggcggccaccttcgatgtccagcttgtggatgctgtacgcgtttcttccggtcatcgatcgccaggtacaggtgcttcttcgccacggtctcgccggcggcgccgttgtggcgtccgaggcgtacctgatcgtggg

SEQ ID NO: 14265 - DNA, 512 bp, Oryza sativa
aactatggcaatagcagccttcattgccaagtcttgatcagttataatagtagcaggagccttgccacccatacaatcaaggaacgtattgaacaaccactgaaaagtctcacttgtttcatcttgtaggaatgcataaccaaataggcaattgtcaccataactagttatccctacaaatggagcaaagggcaaatcatacctatttgtcttgtacgttgtgtcaaaactaactatgtcaccaaacatctaataaaattttctgttgttcccatcggaccaaaacaaactcttcacaacattgttctcatcagttctgaatctgaaatgaaacaatggatcctctgatcttttcttctcaaaaaaatccaaacactgcatcatgtcatttttcccactttctcttctaacaaaatctctataattactcacaaccttttttgtgtaaggaactgcagacaagccacccctaacatatgacaaaacagacataatcattcttgtgggcacat

SEQ ID NO: 14266 - DNA, 678 bp, Oryza sativa
tcaaggcacctagctatacaataagcatgccctgggattggcttactcactctctaacactcatagataacctaagtgccaagggtgtagagctcttgcagggttcaagataatgcaatggagtgccaaaaccttacccttactactggggagtgggtatatatacccccaaccaccaaaactagccgttggagtcgaaatactcaactctgtgctccgccggtcagaccgccatagagtggccggtcagaccggactactatgtaacggctagttacagggcaatcattgagcccactcaacctggccggtctgaccgcagtgtagcggccggtcagaccgtccacggctcggtcagaccgtcatcggctcggtctgaccggttgcagctctggcggctctgtatcgccaccaaaaaacagaccagtgcaacagaccagtggggccggtcagaccggccttaccaggtcggtcagaccggctaacagctccggtcagaccgacctaaggcccacggtcagaccgcaggtcactttcaagcacaaccaaccgttagtaaacggacgatatctcttgactcgagtctcggaatttgacgttcttggactctatggaaagcttattcaaagggctatccaacccatgaaaaagcaccctgacaggccctgtcctttctgg

SEQ ID NO: 14267 - DNA, 46879 bp, Oryza sativa
  unsure (1)..(46879): unsure at all n locations
tcttttctattaacgcaagtctctccattgctagcctttgcgcttcacctttatccttttgggaagcacaagcttctgcacgagctacgtcagccaattccgtggctcgtttagcttcccttcaggtttccttgcacgggctgtttgcttcatcaaacctcttgcactctgttagatacttctcctgaagatggtttttttcttgttccaagatcttcacttccttctcacgtgactgagcttcagttctaaaagactccaagctaacagtcagtgatctgatctcttctttcaaagccagcgaatctgactcatggttcttcaactttgcttcagtagcctgtgtttggtcattccaggaatgagagacataaatatcgcaaaggggagatgatgaaagtgagaaagctactatacctcaagccttgagatcaaatttgtggcatgaatttcggtttggttaatttttgtgtttaatcttgcgatctcctcttcctgttaagaaaacacaataaaaagtaaggtaagcaactgtgagatttaaaaccaatccaccgagattcttaagagaaaggattaccttctcagacagttggctagcaagttctgcccttaaagcgtcttccctttcttgcactttcttattagtgcgttcttgtgctacagctgctctttgcagagctgtttttgcctcacttacagcaacttcatatttccgtttccactccgatgcctcttcttgagcagactcagcctgttctcgcacagcagataatctgccctcactgatatttaccctggattccagagaagcaatttgagactttaacttactttcatctgccttttgctgtaacagattgtggtcgtatttgttcttccaatcaacagattcccgttttgcattgtcaagagcagaagacaagctcacacatcgttcctccaacttgctactcttggtctgaagttcagcaatacgtccggagtaatcccttgaaattttctgtttatcattgatagattcctcatagcgccttaggtactcagccctatgcccctcacttgcttcgagctgcttcctaagtagtgccaacttatcatcatttgaactgcatttcaatcttagggaatttctttctgcatctatatgctctatctgtcttctgaaaagataaagcacggggcccgccaaactgcagttatcatgacagataagattataataagtcaaagcaagagtaagggaaaaggtttcggccctccaaattagtccggttaacagtaggcattgtgcaagggcatcacgtcagaactaaagacattaataaaagaagcggtacataccactgctgtaaaaatgtagctagttttttccatttccctggaccataagattttgactcatactctgtaagtaggccatcaatgagctggaacaaaaaagagattcacataattacattagtatttcattcaaggcaagctaaaacatgaaaatgaaaagacaattctctacaagtgaataatcttaccctgactatgtcatccaactttgcatcaggacggttgcatgctgtccgtatctttgactccatgctctgaattctattcgaacattgcaaatcagcctctagaaaagtattccttttgtagtcctgcatgtatgcgagtactagttaaccttatagctcaaacttaagcattaaattacaccaactattaattgcaaaattgattaatggtagttaagaaagaaaaaacaaacaatagcagacatgatacaatccaagtaacagataagaagagatggagtcacctcaaaggccttcttgagagaagtttgaagaagcttctcaaattttgaacgagctaacccggcaccaacagcagaagcattgaagacactaacagcctttttcaatgcatcttcatgtgcttctctcatggcatcctgcaaacatccatgaattagtgtcttgttccaaataagctcaaataagataccccctctgtcccaaaatataagggattttggacggagcctgtccagattcattatactaagaagtgtcccatccgtccaaaatcccttatattttggggcggagggagtatctaatacaagccattcataagtgatgcctacctcttctgctggttttctccggtcaaaagaagaattgtaggtatcaattgcagaatcatatgcccttcgacattctgcttcctccacactctgcacagctaaaaactattagataaattcctcccaaacagaaaccatataacctgatgacatcaaataatacgagaaacacaggaatagtaaaacaacttgttggtaatcttcaaaactataattgctgtcatagatcagcaaaccggtacagtgctatttcattctctcttttattagttttgcagcccttctaaggctgtgttcttcccccacctttcccaactcacctccctcgtgctccgcgcgcacgcttttcaaactactaaacgtgtgttttttgcaaaaggtttatatacaaaagttgctttaaaaaaccatattaatccatttttcaagtttattttagctaatacttaataaattatgcactaatctccgctccattttgcgtgttgggagtgcgagggttcccaaccctcactcccgaactcaacctaaatatttttccaagtcatcaggtccatagaaagctgaagtccaagcacagcttgcgtgctcaaaaataattgaaacctcaatctttcacatttgatctcaaacagttacttcatggaagctattaactcagaatgctaacttcataactatcattggctacaaaaaatagctgctacaagacctctacaacagcaaactctttatacggttaagtttacatagggaaaaagattaagaagtgatagaaccaaatcatgaatttgcaactcgtttacacgatatatggaaaagatcaggttaaggcatatttctgtctctattttcagtagactcacctgccatgacgaagatatcgtaggtactgcaccagtattgatcgcatcgagaaatgattgtgtcagtccagaaaggacagggcctgtcagggtgctagctccaagttgtttaggccttgttcggtcaaagacaaattttgtcaaagcatccagaccagatctaaactctggacggaagttattcaactgcaaacaaggacacaaactaatcatccagcagaaatagaaatgaatagcataaaaataacagaaatgctttatgaacatcaaccacaaagacaaatgcaatcatgttgaaatatggagtacaactataacttcacaaagctcatcaaagctccaaagacaattgatgtcaactttttttcctccaacaaggtttttttttttttgagggaaagcattgtaggggaaggccccacagttaaattccaacaaggtatatcacagtccatgttgtgaaagcgccagtatttacaacaataaagacacgtgccattgccatgtgcacatattggccaaaaggccgatgtttctggcaggtaccatgattatgtcatcatcatttttcagagatgtgattatgctattatctatgagattatatcataactaccatcctttttttttcaaatattgaaatccaatcagcagtcaagagtccaacatgtgcagcaaagttgcacaagtatgcagctataaactttgacaaaaaaagttatgctagttgatagcagttcaaaggaagtaatgataatacataccggaagttgatcaaggcgctgaagatctttctcattattcacaggtcgcacaagtgtaatgcattctcgatccggaaaaagtgcacggatggactcccgtatcttacagatacattacaacatatgcatcagtttcttatagatatgttaaaaatgatgcatcagaaagattgttgcaccagataattttatgaataatgcactgcaagaaactcatgctgccataccgcattcttagaagatacatcccttcctccaccttgtacaggcctcaaagccagttcgaggtaatctcttggagtaatttttctgttgtcttctgtcaaatccaagtaaaagtcctataggaaacaaataatgactcagtatcaaataagtcacaggctgcgtaaacatcagaacatgcatgtgccaaagagttgatttaagaagagaaaatccacagcgtaccctcagcaaccaaacaaagacaggtgaaaagtgccctagttcagatgcagtggaccttccacctgaggccctgacacgtatatgtttggtcatttctgtcaccagtgaaaggcgatcaagtgcagcttcatctatgcctcccatctgtaagaagcaaaagaagtagagaacaccagtataattccactctatgatgtcttcccaattaacaaaattagaagaacattcagtcagctgctcagcaaattacctggttgtatatgaacatacttgataatagaacagctaaagaaaatatttgaatactgtaagtgccctgccaaagaggaaaagatagaacatgaggcgacaagtcgaaagcagaaacgcaagtatgtacgactgcagaaaattaattgaaaaaataattcacagaaaacggacgataacagacattcgtcgcaattacaattagaaaacgacatatttatctgtttaaatggaatatattacacctactgtcagcaaaatgactgatattaggtagaaaactatttctagggaaatattattttcagatttcactaggtaatcaggtccaaagaggaaaagatgcatgtaagtatcttcatcaaagataaacaccaaatgaacttcgtcagcaagacagcaactactagggatgaaatttctataagtttgcatgcgacgcacagagggtaagagtcataactcataagaacatcataatatgatcgtcccaacaaagagaagctactgaattataaaacttcttcattgaaatccaactactcacaatacaaatagcttcccagtgtcacaagtcacaacatatatcattaacaacaaaaggcagccaacaaaaagttaaagctagaaacataccgtttggtcataagcatcaattccttcagtatccaacaatacaaggttgtattcagtcccatcaagaccagttctcttcaaaggtgcactccacatccaaagtcccttggtacaaggacgatgtgttggcgcaacttgaaaaccactgcttcggcctagaagctacaaaagcaggtaaaattttatcatctaatggtgatacaaattaaaaaaaacataacctaatttgacatttgattcactggttgctcatacacacactaatccaatcaagacatcacaccaattttacaattgaaatataagaaatcactctaatgccaagcagaaatcccaaaagttggtagataacaatatttgaggcgctgttttgctttttatgtcctcacgagaatcccacatattgtataggcacactgcacacaactaactttaccctttaacagttgcacgacacatcgaccaaaccaaccgtattgctaaaatgctgcagggctaacacagtgagcactaatcagagcaccaatccaatgaaatcgagaacaaaaggctccaattccaccagtcaacaaaccctagaggaacgttcatcgaaaggacaactaaaattgaactactctcgagataacacggctgatcaaacattcaaacactacaaacaaaaccaaaaaaaaaaaaccctagccgcaggttgccgattgcaaaaccgaacggaagttcctcaaatctgtacacatggggggggggggggcaagccgcaagcgcacgcatacctggttaagcacgaagctcttgccctggcgcgcgcggccgcagacggaaacgacgccgacggggcccttgacgagctgcagcgccgccaccgcctccgggtccatcacgaacttccccttctcgtcgcagtacaccagccgcagcggccgccccggtccacccccaccctcgccgccgttcctgacgggtgcgtcgccgcccgcatcccccgcgctggggctcccgcgaaggccgagcatctgtagcatcgcgccccccgcgcgccgccggcaagggcacgccgccgccgctcgcctcgctccgttggtttcaaaatgggaagagggaagaaatcgaaaccgaagtggtcgagggttacgctacgcgagcgttggtttgggttgggttcgagtcgagtcggttcctcctcctgccgcgctggaagcgacgcggcggtttcacgattcggatgctttttcccctttggagctggacgtgcggcttggtcggtgcatttttggactttggtccacagttggtcggtgcagcgcacgtcacaaaaaaaaggattatttctacgtgggcctcaatggattgcacatttgtttgtgttgggccaatttggtttgcatggctgggcctattggggccttaaatattgggccttgcatctgatttcgtggcctgtgttacttatcatgtcttgaagtcttcccttcgaaaaagaagggaacatggttgtttgcaatttgtatgtaaccttattgttttgtttttcttttggcagtggtaaaaattggaattgccaaaaaaaaaaaatgtcggcagatttgctaggcatttgtttggtttgctatcaaagttatatagtgtactaaactaaataatttagcgatgctactcccttttctacaaatcaaatatagatgccaatttttcggcttttggctttgtaaaaccatcaccaaagtcaaatagattgaaattccattttttatagattattgacatggattatctactactttataggaataaattaaatatttctagtataaaattaacaaatactccatttgcgataaaataagtggtctaagcaatatactagaaaaaattgatttaatgtaattttagataggttgtcggtgatatgggcccggggtacccacactaaggggaaagggtcattttccctagccacgtggctacgtggccgggcgcgcaggtaataagtagccaaaaggcgcccataacagcctaggggcctcggggtatccagtcgcgcccctcgggcccgagaggctacgtcgccccgaggccctcactcggctgccacgtcaccgctgagtgggcggaggaaagggcgctgccagacgcattgatgggcggcgccccaaccaccatcgtctcatttaatgcggcgtggctggtcgtgcgacgtccaatcgattgacgtgcgtcaatcgcccttgaccgggctgagaccggtcgcaggcggatgggacgggcggcggcgcacccacaccccgcaggcagcgtgggggcaggtatgccccgtcccatcaactcccggagaccgatgtcagaccggtgcaagaacccacagaagtctccaaaaaattaagagggaatgaccggggatgtccctcgcgtcagacaaaggacggcgctgggacccacctgaggacgagtggccaccttacttccggtctaaggcatagttggtagctcgacccgggttgatgtgagccccctccccctcaacagctagaggtgtagaggcggtgcatattgtaaccccttgaactataaaaggaggaccatgccccccgagcaaggggacgactctggagagctcaaatcttaggagaagattagccaatcgtcgctctagggttagaggtctcttgtaatagcacaagcataaatccacacgcaggagtagggtattacgcttcccagcggcccgaacctggataatcccttgtctccctttcgatcgccatccgccacattagcgcaatccatagcgaagatacgctcttgatcatcgcgccctattcccccggccgaactcacaaagggggtctcacgtcctcccgctgcaaaggttcactcctcaacagaggtggagcaaataatttatggtaataatccaacggagtacatctctcagttctataatttaggtaagcaaagagtaacttaagaaaatcatcttaaatgagctcccgaagtggagaaaaagactgggcgtgttgagtaaagtcgtattgacatagactttgctgaatatatgtctatcgactctgcatctggacatgtaaattattctcatgtaaccattattggactattgggataaatacaaagcgagcctgtctgaatcaaagacaagtcccatctttaccagattagcaaaaggatggtttctgaaggctcatgtggccctgccagaattgcactgctgtttttttttccctctttatgtaacgccattttgcgacagaatctttcagacgtcgtctggtcgaatgggtgcccctcaaaatcacagatttgcagtggccggcatgctaattgcgtctcgattaatcatcgcttttcagacaaaaaactgaaggtcgtactgataaatatggctgcatcaccatcagcagtaaaaactaaagagacatggcacccaaactgctccagcacgttgcacttagtacacattttgcagcactaagccggcagcaaaagaagagatttttacagtaaacacatgattcctgaacaagcagagacatgatgccatgagctggattattattgtttttgcaaagagttacactagtgttagattagttgcttctccttataagccgggaaagcgaatgggtgtggtaggccaaacacaaagaaagtgagagcaaagatgctacaagtaccagacaaaaggttgagctgaaaaaagaaaataaaaaggccccaacccaagctgacatttccatggcgttcagcgtacaggctacagcctacaggttccctatctgattgcctaccccctgctaagtgctcaacttgagcacttatcttgctcctcacttcaccaactcagcttgcagattgattaatcaaaagtagtattaggcttcgttcgttactgggcgatctaggggattgagagagaaaagtatctcattttccacgcgcacgcttcccaaactactaaatggtacgttttaaaaaaaaatctatagaaaagttgctttaaaaaatcatattaatccatttttgaagtttaaaatagttaatactcaattaatcatgtgctaatggttcacctcgttttgcgtatcttcccaatctccccagtcctcttctcctcaaacacacccttagagcctagtagatcgcatttgcttcatttttcgtagacagctagcccagtacagtacccctgttaggaaacgatagacaaacaaacgatgaataacaatagatcaatcacagaaaacacgagatttttacgtgaaaaaccctctcaaaacaggagagaaaaaaccacgagctccaaccagcaaaataccttcactatatctggggtgagattacgcacggcggtttacaaaaggtatatatatatatggtggaatctagaagggataacgatccgtttcgcgggggctccgccctcgcacccccggcccaagcctcccggccacgggcttccgctccactacggcagaagctggcgtttattaagtggagatgaatttagatcacaactcaacgcacccccaaactcatagcgtgccggtacgtgtagtcatgttgtgttcaggagcagtgtattggattcagaacttttttggccctgtgaagccaagctagcgttaacaaagtgaggccaaacagatactccacgagcaaaggagtaactttactcaggcagcatgagcatgccagtcagtcaacaaagctcccaaaaagaaccacgaattctgaagcgttcgtcaggtgaatggatccgacgagatcatcagaagcaagaaaacgaaacgcccaggtttttccatcacgggctcctccaaccttccaatcggagagcacaatcacgagccgtccttccatccccacccccatcctgacacgcttacatgtgtgcagcatgaagtggtcactcgtcatgatcgccctgacggccgccggccattcgcgccgccggccagtgctactgctatagtcgtagctccagcgagtggagcgagtggagtcgtacctccatccgcgcgcgcacgttttttaaacagctaaacggtacgtctttttttataaaaaatttatatacgaaagttgtttaaaaaaattatattgatatattttttttaaaaaaagataatcttaattaatcacacgctaatatacaacaccgtttttcgtgcgcagaagatttgttcccgactgcccacaacgaacacagccataatatgtacccctccgtaaaaaaaagactaattctacttacgaatctgtatacatgtgtctagatttgtagttcggattttttttttacggagtagtactactctcctactccaatcaatcaatgagaaggcgcggcgccccccggctggaacgggcgaattcctgcgacctctttcgagcagcggcagcggcagcggcacggcgtagccaccataccgtggtcctggttgccagcagcggttgcgagactctagccggtagatgcagtattgcagcagtaaccagcagtgtcattctcatgaaacctacccctctctctctctctctctctctctcactactactgcgtgtagctaggtagaccatcgatctcgcgcatgcgaattcgcgaagcgagaatgggctttctgcgtgactgtgcacgccccggcatatccggggggttatgggtgctttggagtctgtaggtttgggtgctaaatctgggttagttgggaactgtctggtcttagcttgacaggacacggctattgcttgttcgcccattggcatatttggctggtagcagtagtactactgctattgctttgatctctcatcactttagtttgctgcactgtccaaatgaatgctagctcctctatctagagagagttgccttcgattgtttctttacagaataaagttgtttatatatcgtaaacaagtgaatgccttttttgtcttgtgtttaccaaagctaaagcgacatgcaaaccttttttttttctgcagcggctggagagtaaagtttggcaacagttaatttctatggcctatattaaggtagtgtttagttggtgtgataggatgggatgggatgggacgaaacccatttttagaggtgtttggttgaggggcgagtgggatgggttggtctctagagaagaatattcctcccagatccgagacaaacccatccgacaaaatcggccggacgagctcgtcccacttggacggagcacacagcgtctcctcggcgaccgccggcgctcgtccgcgcctgcgcccaccggcttcttcgtgaccgccgacggtcgtggctcagcgtctcctcggcgaccgccggctctcgtccgcgcccgctgcctcctctgtgaccgccggcgctccgccacgaccgcttgccaccacctctacgaccgccgactcttttccacgaccccctgcctcaacaccggtcgccgccacgagcgagatgctcggcgccatcccaccgctcattgcgatgctcgacgagagcggctgcagtgatgtcgacgcagcgggctcgagtggcggcgaagcttgaaggtaggggggcggcggcggcggatccagaggagggggactcggcggtggcgaaacttggaggtagggagagcagaggcggcggatctagcgcaggggatctcccgatccagccgcggcgacgacggtgggctagcgggttgggtgctccggcggtggtggccgtcctgctgctgccgctgtgcttgatccggttgttccacgcgtggatgcaggtggcgcagtcgacggtcgttgacggtgatggcaaacaacgtccatcccatttctccctcatcccttcaaccaaacaaaaaattaggattgtcccatcctacaaaccaaacatgtgagtgtaatcatcccaaccccaaaatcagggatggtttcatcccatcccatctagttccgaaaccaaacacatgctaagattggtgtagagaaaattaaacctttcgcttgatgaaggttggatcacgtataaaagaggaatttccatgaagcaaaatagcactatttgatttgattcatgatgctccttttagtactactaacatatatctatgttatattcgtatgcatcatcaataagttgatgtgtactaccaccttttgttacaagttaatcctgtctatttgtaggcaatagccaattactagctcgtatagcctcgtaatcatggtttgccacaaactagaagcgaactaattaattcaatcttacttctaattagatggcagcatctatatctcttgcaaagatatgcaagattcatctagagctcttttgttttcctttcttaatttgtcgcaatcccaaaaagatatatcactactaatggtgcagacagcatgcatccatatatcacattcgctagtttgcacagctggtttggatatttcatcgtccatatattcgttgaatcattgaacaccttacatgttactagatgcatacctttggaccctccaaaacaagagaaacatgttggcaataggatggtccgtttggacgactgaaaatcagtgtgtggttgcagcttgtgcatcatctctagcggcctagcttcgtctgtaccctgtgtagtatagtagtatcactttctcttttatagatggacatggagagagatttatggccatgattttggtttggtttgctcgctatcaagccaactgccaacctgaaagcagaacagtagaagtacgcgcaatcctttagcagcaattggtacgtagtaggacccatcttcactgtgcccatttgcagagcgtccccggaaacacaaattaatccggtgtttttattagggatcaatgcatcttgtactagcatttgtctgttccttgtgtaatcttaccaggcaaaaaagtatcgctacaggaagtgttttaaaaggtgtctcactggtacagtataaatccaccggttaatcctgcttttagctcgccgctcaacatcatagtactatgaaatccccatccctctttcttccaaaaaatggagaaaaaatatccatccttcacatgaatagtgatgacaaatccactgtatgcgtaaacttttcagtttatggattatgacgatcatactttgtcctagcctcctactacttccttcaccagtgtatcttatagtacaaatttttaaacgagcttataattttcttatatttccttcattcatttatgttgttgaataatcatcataaacttagttttattcatcacaagaatggatcgcctttccaggaattttccggtatagtaaaaaactgttacttcatcaaaaaatagagtcaccgataactggttttgacatgccatattactacagatctaaacatcaggtcaagtcaggttcataatataaaaatgtgtctaattcaatcatacaatactatattaattttaaaatgaacgaaatacttcgtagcaattatgttatactagtaaaaccgacaactaggatcacacgtaccagatcgacaagtggtagcttgccaggaaacgatctctcggcacaagtgtaccactagacaaacttaagacgttttagctagccagccacccggcgatcaacacgtacgcagacacaggttacttatggaacctttaaacccgagcgctgtatcgagtcaatcggaatcggatgtacgacgctgccgaccgagggcccggggccgctggctacgcgatggagagagagagagagacagatcattgccttcatgccgatcggtgggacacggcaaggcggcaaacgacgatatcgaccggtgcactgcatggccgggacgacgcgcgtcgagaaatcgcgatacgatcgaccagcgtgcagcgcagcagcagcagctggctccaatcgatcggcaatcacagccacgccgcggtgccgggtgcgtgctccggtggacgcccaccacgtgaggccgtcgcccgcaccgcgtacgtacttctcctcggcctcgcacgagctaagccccgcgccggtcggtctccggctttctggaacgggagagccctgcacgactccacccttatttactcatccctttagctttggacattgtacagaccacacgaggagtgtactcctcaccctgcagaaaaacacgttcgcctacagttttagatcgtcaagcaatgccctgaaaggctggacggcgaggatccaatgaacagggacggtttgatcaaaagctctcccgtacctgaacggccgggccccttcttgatgatattgatgatatactatagggctagcttgcacacagctagtagtagactctaaccatcggccgtacagacatggggggaggagggagtacactactcctgcagcgcgcatgtggcgcgtcaacgatttgtctcccatggggatcgacggccccggcgcgtgcgcgggacggtacgggacgcgggcacggaacaacaacgatttgcccccaatcatgcggcgaatcatcacaggcccgggccgcctcgcgccccgcatcactcggtgtcacgtatcaaaacccacgatttcgcgcgtggcgcaggcgggaggtaccgttgggctagtcgattccacggctccacagtccgctcggtgaagcgcgcgccgtgcgtgcagcatccggtaaaacatttggcggagtttgctagaaatatggcgtcatatgctatggtggattttttttcagccacttacacagtagttacaccttatttacaccccacttacatatataattagtatgtaattttcgaatttacatatataattttagtacttacatatgtaattttgagacttacattgtaaatacactaaaattacatatgtactttaggaacttacaatataaatacatgtcgactattttttgataaaaaatatggcgccataaacatagctacaccctttgagcgtagaaaaaagacataagaatcaaaatagagaagtagatataaaatgattctaataggctgaatcttatgttataaatacttcaaaatccatatgatttaagacaatccataggaattttataggattttggtttagttatttatttgtttagtactaggagtagtaggatttaacccgctatttgaaaggccatttatgatttctttttcaaatcgaattgaaatatttcaaaattgctatataattcctatatgaaatgcaagattgaagaaatagataaataggaaaaatacaagattttgatagcaatgtacatgcaacacaaaggattatagaacacacgaataatcgtttgattaagtagcagggaaaatgcaagaatcgggcaagagatacatatattcaaaggaacttttttaagagagttagagtttttgctgatttttcttcgtaatctctatagatcgtatgtcccataggatttttaaagagtggtgggattcgatatatcctttgtctccatggccttcttataatattactttataaactcaaaatacttcaaaatttatttatttatcaacaaattaaccaagagggactaaaacgtcattctaaatatacatgtaggaacattttccatatgatttgaacccccgaaattcctttgttcaaaggaaacctcgagttgcaagttttctggtatgggtgtatgatttgaactcttaactcttgccatgctcacacttaattactttgtgactagtgttgtgcttgtttattataacgggattgggataattacagactgatggttttatatgtttttttctatctattatttctagtggtttgattttctcgtgaagatattagttacagtggtttttcaaaaaaaaattatatggaaaactacgtctcgagagaggataacgactttggttctaaagctgtacttcctccgttcaaaagaataaatgtaagattagatgttcgtcgacgagggatacccatgcaccgtattctgagagtattgtggtacgttgatacaaaaatctgcacgatacgatatcaagtacacaagagatggagattatactgatcgagacctattgtaaggtaatagtcctaatccaatttatgttggattatgaagaaaaccacatagtacaatagagaacaacataatcttgagattaccgacgagatccctgtcaataactactcgatgaccaagtctttcggattgctcctattgttatgggtcttgcactaagattcgatgatctgtacccctaggggactgtatttataccgtgaatcactttagtctccgagtagaactcggagacaatagaccctatacggtacgacaacatcctcatcttttataaataggactctgacacattctattcgtagatattatttccttaaaaactcaccgattttcttaactcaaaagtgtcctttccgtatacttgagggtatactccaaaaatagaatgtactcctccgtatgcttagcagatgtgacttaatctaatacaataaatctgaacaactttctattttattcatatggttaggggtgggcatttggtctgaccggaaatttcagtatcggtcttcggtcttttggttatttcggtctttgaaaagtgaagaccgaatttcaacgcaaaaatatcaggatcgacaaattcggtctcggtcttgaccgaaattcaacaacattttcatatatgcaaataaataatggaaattttcaacctaaaaatcacaaaaaagaaatcgtaagcatgcagtatgagcaaagactcttattaggttgcatgcctaaaagaagtagggatgtgaaaagtacagtttaatcctattgaacttagtggattataggttgtatttagatttttttttgttaattcggtcatttcggtctattcagttaaccgaggagacgaaccgaattaacccaataaaattctatcattcactgcctaggaccgaatttctcggtctcggtcttttcgtttcggtattttttttttgtccacccctacatacatacggtgagagtagtggagatattttaaatcggtgttgcacatattttacgtgagctcctggtacacatcacacctcatcgaacggaagtgcttttctcaacgataactgctggtagctacaggtaacatactagggtggtgtttagaaaggagggaataaactcacaaaagcataagtcgacaaggattttctacacataggtgccatgacacccatcatttacatgtgtcacaaatagttatagaaaaaattgaaaaaatttaataacatcgtttgtgattatacaaatctatacacaaacatgcaagactaaatttgatctacaaatagagaaataaaaataataaaatcagacagtgaatagtacccgtacagtgcggataaaatttgttatttttgtttcttcatatatcgatcgaatttagacttacatgtttgtatagtgtcatatattatcatggtctatctgatcaaattttatgatatttttatataactgtttaaattacatgcatatactttccgacttacgcttttgtgagtttattcgctccttcccaaacaccacctaacaactccaactacaccctccgtcctaaaaaaaaagttcaatcctaactacgaacctggatatatgtgtgtgtccaggttcatagccagagtttgggttttttttgtcagactagtacgttgataggatgattttttttttctttgaacaagctctcaacgataacggcttttctcgcttaaagtttgggcacctgcccagcttgatcaatgtgacattttatagaccaatcagaataacaagagaggatggaggtacacgattgacggtggactgagtctgtcacgtcttgtcgccattaatcagtttttgagagccttggcctgcactgaaaaccatgtgtaaacctacggttacttttatggatgtccccgctcgttccctagtcttgtcacattacgtgtctgtccgtactcctctctagttagtcaaaatcatccaaacaaattaaacaacctggcgaacaagtttaaaagtgttgggttgtaattcaaatttaggctgtatctaaacttcagtccttttccatcacatcaacatgtcatacacacacaatttttcgatcacatcatcttcaatttcaaccaaaattcaaactttgcgttgaactaaagacatccttatttgtactccgtacacatttaacgatcaacttcggacggagtgaagcgaaggcctatcgccggaggtttgaaccggactgaagcgttattcttttagggtttcactttcatatatactccctccgtcccagaaaatgccgattcctggatgcccgaggcaactttagcgatagctgttgaagaccaaaatacccttgcacaaagtacaacattcaattcatctttcaaataaaaaaagcaacaataggcaaagagattccctcgatccctccgtaactacctgcatcccagcacagcgtaccacacgcagcaagtaggagtaccaaaaacatgaagaaccaagaacaaagaaaaagagaaatactagaacatctctccaattgagaaaagaaattctctgaattcacctgtacgaactgctagtactagcaatagcaccgtaagaactagtactactagaaataggaggaacatagcaagaacccaaagcttagaaaaaacgaaatgtggcgttgtttgctggctcgtgcatggagaactgtatcagatccaccgcacatgatagaagaccccgtcgctgacaccgtggccgctcgtcgcctccgccgccgatgacgcccatctccccgtcgcttccgccttctccaacaacacaacaacataccccctcgccttcatcgtcgatccgagccgcatccgctccgctcacaacgctccgtccctgcatccttgtggccgtagcctggtggacgcagagaaggaggagaggtgggagaagcaggaacgaaggggagcggcatggaatagggagggaggtgcgggagagaggggccaagcagggagggagactggagggggaaatcagtagtgcctcgcttccggagacgaacagaatcgatggggattttagatctgtgcgaactcgcgagagaggagcgagagagacggagaaaagaagaaagcccgtgagggaggggataaggttcaagcggtgggaacgtggggagagagatgccgtgggcccatccgagatgacattcttgtttttttgcgcaggagtcgagtttttgtgggacaaactcccccctccagaattcgactttttctgggacggagggagtacttctcgtaaacagtcgttcggtgttataaccaccccaaaatagtaaaaaatatttattgaccggtatccattaaatcttactatgattgatctaatctattattgtttatcgattatttgcctatcattttctaacaacaaaaagaaggagctttattgctcaaattactcccgttggccaggggcacgtagctggtgaagcgtcgcgcacgtacgcgatgcacccggcgacgagaggccgagacgtggacgcagaaagcggaggggggtcaaagaaacaaaaacggtgggtttgcagcagcaggtgggaggagcggaaaggcggaaagccgaggaggaggcgacagcgggggccccgcggctcagagtgcatacaaagcttgcccccgggcgacacgggcccccgagcgcgagagggaggcaggggcaggcaggcgacgcgtcctttaatcgaaagcaaccaacacaaggcaacagggggaagcagcgcaagcaacagcgataacaaacgccatttcctcctctcatctcatcacatttctcgggaaactattctaatcccgtaagaaaatattccctcgtttacttaaaaatcatctaaacggttatgaaaaattctgaaaaatttgacaacattcatacaataaatatatacaactccacaaaatcttaaatccaaactcaactcacatgtcgagatataaaaaagacaaattcagcgtataaatagtagcgtactgtttatatctaaatttgtcctttttgtttctcgatgtgttgatcgaatttgaacttgaattttggtggactagtaggtatcattatacactatattgtcaatttttttttagaatttttcataattatttgcatcgaatttggaagaaaaaggtatacgaggggatataggggttagaatccactcccacatttctctctctcttacttcctccgtcccaaaatatagttatttctagcacagtactttatttcaaaatgaagctatttttctatctaccttcacctctcaaccaatcacaaccattctttttcacctactttctcttttcaaccaattacagaccttatttaattattctcatctaatttcttaatacatgtgccaaccttaaaaatacttatattttagcacggagtaattatctgtgatcggctccggaaaagcagagcggcttctcgcccgggccgtcttgtcctccttgatgtctcgctacagcttcgataggagtatcacccacccattattactactgctaggatagaccactagtagtactcgttgctagcctcccagcacaagccaacaagttcttttgactgttgaagtacgcactgtactcacagtagagtaccactctgatcagctgtccgctgggccccacctaccacgccggatgccggggaaccaaaccaaccatctcacattctactactagtagcagtacaagtacgagtaaaaacggtgcttgtagtgtgtagcacatgaggtgtttagttcacatcaaaattaaaagtttagttgaaattgaaacgatgtaacggaaaagttaaaagtttgtgtgtagaaaagttttgatgtgattgaaaagttagaagtttgaagaaaaaatttataactaaggttgtgtttagttcctgaaattaggtagaagtttaaagttgagagtttatgtgtgtagaaaattttgaatataatgtgatgtgatggaaagttagaagttgagagaagtttggtgtgtaactaaacagggcctaaactcggccacagttacgggagtggagcgaggcgagtcgtgtcgaccgttggtatagcgctcgtgattcttggtgggacgacgacgatgagcgagcgagagagcgggcgggcgcacgggtccccatgggcaaatgcagtgccggcgccgcatgtggagaggagcctctggtggcgctgtccttcctgcgtgcggcagcagcagctgcttcctgcaaacggcagcctctgcggctctgacccacgcccgataaaagcgaggggaaagttgacgtgtgacgtttcactaccttggctcacttgcctacacgccccccttctttttccgcccattcaaccctccccctctacgagtagtatgccgtcaatataaagtttattgccaaaattttgatattctagaccgttgtggtattatcaaaattttgacatgatttattatatatttactgtagtttagcgataaactaaatggatatatatattttacaactctaccagaaactagtatggtttgaaatgacattaatctgaacaagcccagaaacttttcactctgtcacatcgaacatttaacacatgtatggagtattaaatataggctaaaaataacaaattgcacagattgcgactaatttacaacacgaatcttttgagcgtaagtgctccatgatttgacaattgagtgctacagtaaacatttgctaatgatggattaactaggcttaataaatttatctcgcggttttctgacgtataatatttcaaatgtgtatccgtatatccgatgtgacaaccaaacctaaatttttttcctaactaaacaagacctaagagcaagtttaatactatatccaactagtagcttcaaattatctataattaacttaatagctaatttatacaatagttacctataaacatatactattatactattaatacatgatcccacttgtcatatataaattacgtcttaaagtctgtgttacagttggctacaaatctgtagccacctactcttctatcttagtttttatctttttaaaatatgtttatagcttgtgttatagtctgctatggtaactgctctaattgtactcttcattactactccactgttgacgaaaaaatcgaacacactggcctgggagatctgcttagctcctgtgcagatccaaaccttgatgagatgcgggcgtgccagtcagtttgattctgcaaccgatatgatatgcaaatagtagatcaaaacagctgatcggctgacaagccgatggagtagttccaaccgatagccgataccagccgataccgatagggtttaagcaatcggctatatgtccaatgtaaataatgatataaaagcaatcggctgatgatgatgtaatataatgcagtataaaccaatcggcaaataatgatatgataaataagcatcgatccgaaggttaaagcacacatcgcctggaggtccgatgtcacaaaatccccaatattagattaaacagtgaaacctttgttgtcatcggctaaatccaacttatatgtatatgcaatccttatgagccgatgtaacatccagataactcaccggctgaaaccccgatgaaacccttattttggcaatcaagaagcaggttagatattatggttctaagcatgacttagtagatcaaacttaactgatgcagcactaagtatgaaaagaaacataatatctagacaatcaagccgttgactgagttttcagggtggtagatgtctaagctaatctaatctagcaacgcgatttagtcgataccggcagaaaccctaaaatgagaagcaaccgataaagctaaattgatatgttatgactagattaacagagacatatgataaatagttaggcaaatatatcatccaaaccagagcaatccaagaggtcgaatgtactgatgcagtcttgaacgacgctgacgtagacgatacaattgcctggaccggcggaacattggacttatatcttcgccctagatcgaagacgatgcagccccgcgtcgggtgccaagttccgccgaaacgtaaaaacaaaagtagaaataaaagggtggcgatgcgccaaattgtattgatcgtgaggatagattacatagaccccgggtgtacatatttatacacatgggttgatacaagtccttgtcggacaagaaagagagcttcctaaggataaaaggaaaagataaagtccttataggacactaaacacactttcctaaagatacaaggaaactaacaaactattcctaattaatagataacttaccatgccgtattctctttaaactcggtctcttctggataagcttcctttagtagatcaatttccttaaccgaatatagcaagaatccgataaatgacgacttgacaactctcatcggctaatctcaggacttcgaagccgatactgactctaaaccgatgactactccggtcttaccaaatttcactattaacatccactgatcaactattaacgcatgtgaagtgtacagtacggggtaggttaggttagtgaccggcgtaccattgtaccaagtaccaacggattcgattcggcaacaacagcacgagatcttttccatctcttgcacagcaaaatttatccgtgtttcaacatgttttctgtacgcggccttatctcctctcgtgcgttggagtagatgatcgagggggacacgcagctgtagtcctacagagtacagacctgtggctgtgagcgtggagatgagagctgctaccagtagtagtagtagtccatgggtggatgtgtgtgcatgggtatatctggcgtggtgactgtgagctgcttttggttcttttctttccgcactggcctctctctcggagctgtggcagcgacagcaccatcaaatttggcagcagcagcacggagcacagctgcatcaacagtcttgttgccaagcatggggagccatcaattttttgttcctactctaagggccggcctttttgcaccacacaccctgatacgcccctgttttctggaccaatacccgctcctcactaatctactcccacagtacatgattatagtagctcacctcattatgtttctagtgatataaccaatgcactcatgttcaacttcaagtcatacccttgatatagtgcttgttagatttaataccctactaaaatattggtagtgtcgaaacctacgtaaattttggcaccacctaattttttagtagggtagagttgtatttggttggaggccaatttagaaccaaactttaagtagaatatagaaaaatatcaaattggacattggaaatgccaatgatttggcttcaaaccaaaaccttcattaacactgttcaaactacccaaatattggtagggcacgttttggtgctaatcgaaaacagcccatagatacttgtatttacggctaattattatttcaattgtagacgacgtatccctcgacaacaaagtgtccatgataattttaacctagttttctcgagatgcctatagaaatataatacgtgtgtatttataggacgagtatagtatatgcgtgttgtgtcgtgatcatctgcgtttgtatagtacttttaaaaaaggttagtaaatggagtactccacactgtaacggtctcatcagagcccagccacagccagcatcgtggagtacacaggaacgtacatactccaattcattaactgtgtttcagttgcgtgtattcaaccgggtaagggaacaccggcgacgtatacggggggcagcatacgggcgcaataaaaacacgacaaatcgaatccccggccttaaaaccggtgtaatttgggggaccccggccggcgatgcaactctacgcatggaccaccaccaccacccccatcccgaccgcgccaataatgcgcgaggtggcgtgccaacgcaccagatattaacccccctcacgcgtcacacgtcgtcggcaaaaatccatccatcggcagcgcggggaaaaaccgagaaaaaacctcgctctccatccatcgtctccagccgtgacggcaacggggggcacggacacgggcgacgacagcgacacggcgaaatggctacaggggagatgaatgataatgagctgatcggtggcaatgtccttgacacgtttaaatttaacgtcgacagcgagtagtcgtaacggctacagatttgagaagaaacggaggttgcagaaatggcactaatcaggaattcaagcagagcaaaactaaggagtactactacagatcgatgagaaacagtgatcggtaagctcgacggtttcatttttgggaaaatattgggcacccatcttcgtggtcgaactcatgattttactatctgaagaaaaggtgcttgtacttgagatttgctgcttttgataagtttcacttttttccatttctgatttttttaaatgtggatttatcaccggtagaatcattgcgctgccccagccgtcgtgccacgtcggttgatcggaccacaccagtttgatctggccaaaacggcaaaacggtggtcaatgataagagcaggtacaatagcgggttataagctagctgcaaatatattttaaaaagataaatgaggagagagaagagtagtgggctacagatttgtagccagctatagcacggactttaagacgcgatgtgtgtatgacaggtggaaccaggtaataataatgtagtatgtaactattgtatgaataagctattaaattggttataaatgaattgaagcaaatagttggctatattattaaacttgctctaaggcaggaccttctctaattgtatgtgtagcactcctagaatttttcgtaggttggtcggcacaaatcccagtctactcacagtaatccctagtagagcaagtttaatagtatagctaattactaactttaaattatctatagtcaatttaatagccaattcatatacaatagttacctataaacatattaatatccggtcccacctatcatactcacattgtgttttagagtccgtgctgcagctggctacaaatatgtaccctactgctcttttctcttttttattttcttaaaatatgtttatagctggtttatagagtgctattccacgtgctcgtatgcagtttcccttttcttggtattgaggaaatcataacatccgaatggtcttgagtctagtgaaaacaaatatttctccctaaccaagcaatcgtacctgatattataatagcaggtacaatagcatactataagccagctataaacacgtatggagaaaataagagcaagttttatagtatagccaactgctagcttcaaatcatctataatcaacttaatagtcaattcatacaatagttacatataaacatatactacacaatcaatatctggtcccacctatcatacacacatgcgtcttgaaatccgtgctgcagctagctacaaatctatagcctgttgctcttacctctcctcttttatctacttaaaatatatttacatatggcataaagtctgctattgtacctgctctaaaagagaagagatatgagtagtgggctacagacctatagccagctgcagtagggactccaagacacaatgtgcgtgtgacaagtaggaccatatattaatagtgtactatatgtttataactaaatattgtataaattagctattaaattgactataagtaatttggagctactagttgggtatactattaatcttgctctaatacgctgtaactatactttgctatttgcatttatttaaataaagaaaacattattaatgttacacaattatattaaaacaacacaattattctaatatcattttcgacgtctacataactaaggaaaagaaaattgtgtaaaagaaacagacgcatgcctaaaacatgaagaatcaggcatgagtccgtacaactatagggtgatactaattgctttcgtatgtgtaggatttctttgagctactgacacgtgggatatactagattaattccttctctctctcgtttactgtcagccaaacgaacacataacataatcacaaagtacggcaatgtaatgatccccacctgtgtttcaagctcacctgtttttagctgtttactgccgtgtccgcgtccaccccatatttcctgacgcctctccatcaccatgtcctctcctcccacctctgcccgcagccgcagacgcagagctgtctgctctgcaccaccactgtgcgcgtctcccgcctcttgcgctctctttttcacctttcccccatttctttattcccccacgccctcatatcccctttttttacttccccgtgacaccaccagtagagtaaaaaaaatacaggtatagtagcaagtactccttgtacggttgtactacgagtagaagtagaagtattgatttcaactggcacggccagtagcagttatactgggttcacaattccagtgaaatccgatttgaatttcgcgaaatccagttttcttgaaccgggttgaaaaccagatcattccgtttttcgatcaagttaaactttggctgtgtttagtttctgaaattgggaagaaatttaagaaaaattgatagtttgaaaaaaaagttgaaaatttatgtgagtaggaaaatttttggatgtgatgtgatgtaatggaaagttaaaagtttggaggaagtttttgattggatttcacaaaattcgatgatatcggtcgtaagcggatttcgatccggtatacctagaataagcgaaacgacatatttataaatgaaaagtaatttataaataaaatttctatatacgtgttcttataaaatctaaaagtacataatgaaaaatagactttaataaaaaaattttaaaaccagctataaatttaaggttaaaaatttaaattttggctaatatatgtgggcataagcaaaaaagacgaggccccgggctcctctgcttcttttgggcaatagcttcgcgtagcttagctcggcttccccctcattcatggccattaccacgatgtgtcaccccaccccaccaccgcccgctgctccacttctcctcctcctcctcctcctctcctagtagtagcaacctacggacaccacccccacccgcttcatttatcacttgtctccccctctccctcgcctgctccgctgctcttgtgcttcgcgcctcgcctgacctcgctgtcgctgccgccagccatgaccgggatcgacctcaacaccgtcgaggaggaccaagaggaggcggcggaggaagtggcggcgaacggctcgtctccggctccggcgaaggcgggcgcggtgtgcctcgagctgtggcacgcctgcgccgggcccgtggcgccgctgccgaggaaagggggcgtcgtcgtgtacctgccgcaagggcatctcgagcacctcggcgacgcgcccgcggcggcggcggccgcggccgccgtgccgccgcacgttttctgccgcgtcgtcgacgtcaccctcctcgtgcgtcccttctcaatgctcgtatcgtacgtgttctcgtcttcacggcggcgcgaggggattgattggctttgtgttcttctctgcaggcgaacgcggcgaccgacgaggtgtacgcgcagctctcgcttgtcccggagaaggaggtgcgcgcccgcctgcgcgaagcagttggagcatttggtttgatgattccgttttttttttttgttttttgacctgagttttcttctcttctcttccggggattgaaggaggtggcgaggcgggcggaccacggcgagggcgaggacggggacggcatgaagcagcggttcgcgcggatgccgcacatgttctgcaagacgctcacggcgtccgacaccagcacgcacggcggcttctccgtgccgcgccgcgccgccgaggactgcttccctccactggtcggtgtatattggagaaagaaaaagaaaagcttccttttttgaagtaaagattttatctttttttgggggtttgtttagctgatgaaatccttcggattgggaaccttgcaggattacagccagcagcggccgtcgcaggagcttgttgccaaggatttgcacagcactgaatggaggttccgccatatttaccgaggtagagcagaaaaaaaacatggactttgagaacaagtttttttttaacctgttttgatgactgagatgctctacgcagctgtgccatgcatgcattccatcttcattaggcttctgtactgtgcatgcacttcccctggctggaagcctctgcgtcctgaatgattcaatggggattgaatattagtactggatttgtgctttagttgtttctgacgaccagcgcgtcttgttcagatagagcagtaatagcttgtgaatacacacatgcatcaaccgagctcaccgagaacttgcactttgcggttatgatcgacatctgtactttttgcatatccacctgttttatgatgctaaatcatgactgggctgacatgatatgattgtatgcaatgtgttgattctccaaacactctaatatgtgttggctaggctacattatgtttctccatagctccgacattgttagttaatcaatcatgtttaactgtattttacattttttcttctttcttaaaaacctttgtattgtaatgtctggtcccttcttgaggattgcaaaggacaaacataacaagttaagtggtccttgatttctgatagatctacatctgaatatgctacaggccagccacgtcggcaccttttaaccacaggttggagtgcatttgttaacaagaagaagcttgtttctggggatgccgtactatttttgcggtaggccactcgatcattcagataattatcacatgttgacgatcttttctaaagattcttaatcaatctgcagaggtgatgatggggagctaagactgggagttcgccgtgcagctcagcttaaaaatgggtctgcttttccagcactttacaaccagtgttctaatcttggtacacttgccaatgttgcacatgcagtggctacagaaagtgtgttcaacatatactacaatcccaggtaatgaagaacctcgagttattttgttaatgctcccgacagctgatgttctagaactttcttgctgttggctggtggcagccttaaattgtgcccattatttactgcttgtttgagctatttgttgatagtcatacattatgccagctcagcatgtgcaatcacatggttttatctggttgcatttgtagtcttgctgaaattcgaagttaggcgctgttgcaatagcttggaaagttgtatttgtaggttgtaactgttctttttaaaacaaaagattatatgaacagaatcaatagtctcgtttcatatatttatcaatgtagtcgttttgcatttgatgctttacagagctagcgcctacttctgttcttgcaacaaaacagtgtcttatttcaaagctctcttctgaaatattgacaggttaagtcagtccgaattcattgtaccctactggaagttcatgaaaagcctcagccaaccattttctgttgggctgaggttcaaaatgagatatgaaagtgaagatgctactgaaagaaggtagatggacaatagttctacacttgtactagaatggactgaactgcattctagattggtgatgcatatgtgataacttataattttacaggtacaccgggataattactggaagtggtgatacagaccctatgtggcatggttcgaaatggaaatgtttgttggtaaactaccctatctcttgtgcctcgtaatatatgtttatgggcatctgctgtgtattcaattaacattttttttgtagtgttgctgccatttcactaattaaacccttgtttttttcctagtgccgcgtggcatttgcatcatgtggccatcttgacttgtttgtttggattatattttacatataacaagaatttgatgctaatcttggttcccaaatttgctagcatggaacccattcactctattaactgatgtagcagttgagctttagtttacatattactaaaacacagtttagttgtcttgatgcattttgtttcttatccaaactcaagtcagatagtagtgatttttcatgaactcaatctggaaagtaacaggttttcagataattgagcactgcggtactattacacaatgtcagcttacatggttatgttttcagagtgacagttgcactgactagcaagtttggttgctcacaataacagtcttagatttgaagatatcagttaatcttcctggtttgttttcaaaagtggtaatcttaacttgcaatttgacttccactagtagtttttgtagctagtctagagctgtgttctacactcagcctggtttcttcagcgaaatattaggtggatgaagttatggacactgctagcttgatcttcttttgaaattttaccttccaggagtacttaggcatgtgaaagtttttagactatggctctcctgagttaaaatttcaatttttgagcacataattctgttctcatggccacaccataagtcccgtaaaagccattattgcaatcagatcctctttatgaccatatgtatatgatttatcgacctatgtctaccttggtaggtgaggtgggatgacgacgctgagttccgtcgaccaaacagggtctctccttgggagattgagctgactagttcagtgtcaggatcccatttgtccacaccccattcaaagcgattgaaaccatgtcttccccatgttaatccagaatacatggttccacgtatgtctttcttctagctattaccagttaataggatggttctgttggatgcactgtgccgatttaatttatccttttgtcaggtggaggtggttgtcctgattttgcggaatctgcccaattccacaaggtcttgcaaggtcaagaattattgggttttaaatctcatggtggtactgctgctgctacttctcagccatgtgaagcaaggcatttacagtacatcgatgagcggagttgctccagcgatgcgagtaacagtatcctaggggttccaagacttggtgatagagcaccacttggaaacccaggattttcctaccattgctcaggctttggggagtctcacagactccaaaaggtcttgcaaggtcaagaattatttcgtccctaccgaggaactttggttgatgcgtctatgggtagtaatgggtttcatcaacaagatagtcctcgtgcaccaggtgtggtgaataaatggcaggcacaacttcatggccgtgctgcttttcatggaccaccagcactggctcttccatctcaatcatcatctccgccatctgtcctaatgtttcagcaagctaattcaaagatgcccaggttggagtttgggcatggacagttggacaagcacgagaatgataggcgtgttaggtttggtccttctgaaggaattgaaagaagagagcaaagaataccactccagccttatcctacttctggagaagtgatagatggacaggttacagttgagaagtctcactcccctggtcgacatggaaaggatggtccagataacaaagctgttggcacaaatagttgcaaaatatttggcatctctttgactgagaaggttccagcaagagaagaactagatgatggcgacgccaactattcactccagtctttgaagcaagtgccaaaatccctgggcaatagttgtgctaccgtgagtgttttatgatgagtaattttcatgcactcagtaatgtaaactgctttttaactaaaagctctgcaggttcatgagcaaaggcctgttgttggcagggtgattgatatttcaactatggatatgatgatctgatttatgagctggatttgcaaaattatctggaggtgaagtaacactaggattgcttccaaccacatgttagtgatactccaaaggcataaaatcctcacctgtgacagttttacctagaaatgttatgatcattgttttgccgttgttccagattttgctgtggatctccagatggtggccgagtatcagggagatggagggactgatgattctgatatttttatcttagatgtaggcgttggagcacttatcatgtgacatagtacctagctgctcgtctgcatttgttgcctctgcaactttaactgtcagcggcatttgtcgccgctggaaccatctaagtacgtgtttataagctgtaagctatgacaagcgcattagagggtgctggtactgttagaacattaattaatgtcagtagcatgctttgatcttacgtgatgcttttcctatgttgaccggagttcagtataacatgatggtggctttgggagacctcatgttttgaaaccttggtgctgatcgctgatttgtaactataaatttagttgtatttctaccacttagcttattaatttatcatcgtttccatcaactaaataagctcttaaaattatgcgaatcaagcctatgattcatgaagatataatgcggtataagagtttgggtggagtagaagaatacctctttggttttggaccacgtttcattccatcttttcctctgattctttctgcaacataaacgccggtcttcccaaaccacggcccagtttgttctattagctagttctctggctgttgtgattatttgtgtaccaagggtccataaatcatacataagcctgcactggaaacggacaattgaaaatggctcttcagaaactttgtttctccagcactgaatatatgagatttgagagagacagatacaatattggacctttactcacatcttgccgtgggagctgcccatgtttcattggctacaagtagtgcaaataatggttagaggggaacagaatcaacagatgctaagcagggccagatgatcagactgacgtagcaaccacattccccataaaacataccaaatacaacagcaaaagtttaaatttgtccctagctacaataattatccaaaagggcagtcattttctagagcttcattcattgctgtcatcctcgtcgtcagttaaatcctctatgttttcagcgtctggagcagaaggccctgacgagcgtaattcatcgatttcaacctggaggagggaatcacaggtaacccttcctacttgtaagactcttgggcaacctggttgaacatacaatctgaaatgagcatccgtgaaaagaaaataaacaatgaggcagcgaacaaatgacctacctgcgatagggcacttcggaggtttttggtttcttatgtaatgcataattggaactttttcatatatgtgcctacaatccgcactgaacaacacaaatagccttgagttcaacgcaaaaactgaatatctgcaaatatatgttcacactgctttctacatgcaacaacttaggagaaatccatttgactgagaaaaataagcaaattaagtagtaggagtttccgatttgaattcaattatgtgaatagtaaaactgtagaaagaccttacatacaggggaatgattagtttgaatcatgcctaatagtcaaattggctgaaaggattgtactggtagaaaccgcactatttctgcccccagaaagctatacactattatactttgaacacaatgatgattattcagtgacaacagcaaacttgttctactgcatggaattttcacagaaagacaagccattgttaccgcaagatgcaaaccatatggagaaggaaacagatcctgatgatctcaacttgggcagcaaaagaaaattggagaaacataatcctaaggctttgcgacatgttatttgtgccaacaaaaacttggtctttagcaggtgaaatcagattaatgatggatattttttgggacattaagttgtgcttaaaaacaaaatgagagtatgtgttctttgaacaaccatgaaggaaactatctagcatatgtaacatatcataataaaaatttcctagagttacaaaacaaaaccatgccttaacagtttaactgcttaacacttaccaccgaactggctctgtcaattgaattacaggcttcccagttaatgggcacgtgacatttaagatgctagtttgggtactggtcataagaacatcctcctgttcatcaccaggcattggttggccagcatggtgaacattctgtagaagacaacacaattacagagagagaaaataattagaagtaatgcacaaaccttttactttctccaaacatgacctattggagataccatactaaaaattgcagtcatttcaatccatctttaatgtaacattttcagcaatagttcagcaccgagctaactcagtgaatatataggcaaaaaagtacataatccataccgttctcaacagccattagcactaagggagaattaacatttgtaaattcctctaattcctgatctaccgcatagaaaattgccaagtctctcaaaacacaaagggtccacggaacatacccaaactgcctctctgaactgccgaatgagcagatggttctctactgatgttgatgagttccccttgaccttgttaacctcagcctcgatcagcttttcgaaatccgtcatcttgacacaaattcagtgatcaataccaaaacaacaaataaccatttagccgaaattcctccaatacaattcgaataagcccctgaaaccaaaaaaataatcatcgcggctaccagagtccgcacctgattagatggctggtacgccccaggcaccttccggatcgcgtcggcgtagcacgtgcaatcttcgcacgaagcaaccagttccagcgccgccgcctcaagctgcttcacctgcaaaagaggataacgatggtggttatgggtttagggtttccgcggcacaacgccgcgtgaggttaatgtggggggagaggccgcgtgccttgtcggacttgttctccctctcgtaatcgacggcgatggacttcatttcgccgatcgccttgcgaatctcctgtgggttttggggggggattcgatgagattgctagggttttgggggtttagcggagagcgggcagccgagtggggattcttaccgcgataagggtttccgcctccgacgactccctctcggcggcgttagtgagcttgttgaccaccgacgacatctccggcgaccggcggcgatctccgccgcgcccgctttcccgcgatttggttttggttttggttttcgagggaaagagaaagccgtcaggtggatgggtactggaggatttgagcctttatatcttgtggatttgtagcccatgaaatattttgctgggctagagggcccggccagtcaactagcccagctaatggtagaaatactttgagcccaagttagctttctctctttcttttttttgcagggaggctcaagttaaccttcagaaattactttgggagttttttggtagcaccacatcttggattaaatcgtcttttaacaaacagtacaaacgcagatcatagaacgtgcgtacgctcacccttatgaacacgcgcacaacctacctctatgagcatctcctaaagactgaaccggtatatcttgaaatcgacgaagtcatcacgagcgtctcgccatcgatagatacgtcgtctaccactgaaataataattaaccgtaaatcgttgtgatcttcaattcacttacaaactactagtgagcgaaatcatgtgaagttggcattggcaagaagttatatcaactgcaccgtaaaaattatcgaattttggccagtaggaaaatgtttgatccttggcactaatcaaactgtagtagcaacaggattccgcacctataactctgttgcaattcgagatgacaaaaacatcgacaaatctgatggtcaattcaagcaatcctcaatccagtggggcaaacctagccaaaccgagatgctctcttgtataacaagctcagaatatttgatggtaatttaacccagtttgaagtttgaacgagttctagtagatttgtggggctacacttggtgacttggagtaaatttcataaggtgataccgatttcaatttgaaccaggcattagcaaggcaatacgcagcaattcatcatgtgccataataaaattcagcagttctgcctgcctgacctaaagccttggatctgaacgttctgaactgacatgtcattcatgtggccacctgcgactgcatcttgcctgcaggctggacaagcatatggatcccaaccttcctatgcagcaagcgggcgtccatggctaggaattcagagccctccagcatgtggacgaaccacttgtcgatgtagatgtaatcagtatactccaattgcatggcaagcattgaagaacagacagaagccatgggggcgatgaaaattgctgccgcttcacgcattcgaaaaataaacccacggatattgacttcaggtcatacaagatgctcatacttagttcagtatacataatttattagtttacagtgtaactgataagagaaaagaaaaagaaattagtgtgatcaattaacatttctcagtgaagtttgaactgtcgagaaaagaaatcaattgattctagaactttcttgcaaagatcctcttaatttaatcagaacggcaattctgtatttagtgcaacttgtcatatgaaattctgaatgccagccagcaaagagcccaaattgagtggggtccggtcaactaacctaacctacagaacatcaaatgaaactgcaacgaattttttaattaattgtaaacaataccggcctaattacccacgtaaatttcactgcaaatcacgctaccgtttctgtattctgaaggcaacggctactctcagtctcagctcttgtcgtatgctattgcaatctgcaacaagtcgcataatcaacggctgcttctgactgaatccaattcttttactcgtgtaggttcagacttcagaaagcagaatttcatcagcgcagagatgcgtgatcatcgtcgccctgatgctgccacgacgaatccttaggagaaaaaccgcagtgatcgattcgagttagtttacgcaggtcaaggagagatcttacaatcttagaagaaatgaagcccacatgatgatactctcagagactaaagaatggaagattggatttgtgcacagtggtcacccatgtacagtacagaatcccattaacccagtagaacatcgcgttgattttgtggctgcattggagcaccaaaccatcctacaaacacaagtgtttttcttaatagtactactactgtgcctttgaatttttttagtgattttccagttcataaggagatactggtatgtactatatttttcgtgtaaaaatttgatacctctcggtattttcggactaggagatactaaattttacattacctctcaatacctccggtactaagagataccaaattttagagaccttttacagtgtttgcaaggtacttagagatattgagaggtgaaacaatgtgaaccattgattaagaggattaaaagaggggcaagtatggaataaaattttcataactaatagcaatggagtaatcaactactaaacgatgagcattttgagtgaatcgaatacctggatccaatcaccagtattgttaggtagaaaacaaagtaaatctttcgaacaatttaatgcatcgatcgatctgcagttctacatcggaaaaaaaaaagagatcgacgcctcctttcttcgaccctttggcttagttcttgttctagggtttgaattggtccactagaagaggacaaagggagaaatatcagcatagttgagggttcaagatggaccaattgacggctaggcgcaatcgcatcagataagatctactctgctcctatactatttacacaattgattcgttatttacatagttaataaattccttcgtataaggaactaaaatgagatctcctatgtttttcttctagggtttgaataggcgaacatgtaaggagacatggttgagagagagaagctctaatatcttgttggttaatctgacatagcatgttcagatggatgcaatcattaggtatattttctctacagtttatgttttccatgaatgtaaaacttaaatcggcgtaacccttgagttatattttaatgttcttgggaacaaaatataaatctcaaaataactatgcaaataatgtaatggagaattaatgggaagagttctaccatgttcttgggatcaaaatgtaaatctatagaaaaccacgtaaatgagaactttaatactagtaccacacaaacaacttaactggtaccgacacggtaccgatctgaatttgcggacaactctttcctttcctctctactagcaaatttatctttttacttggtacctgagtgcctatgccaatactcaaataccatagtacattttattatggagtgttggatctttactctttttgaatgcaaacaccataaaaggttagtatctcttaaatactataaaatttctttttgttttttgtttttttggaaaatagaatttgccatgcgacaaactttaacatagttttgcatcttgcgcgttacacatcggaaatactagcatggcactaagtacagaggccggagatgtattactcatttttccatcatcttagtgcatttcattttaagaaaagctgtgtgctgctgtgaactagaaagctgaagaaccattatcgaaaaaagaaagctgaagaacacccctagcacctggctttattctgaagtgcgcatgggctcaatagcacacactcatatgatcatatcgtccaaatttcaattcgctggagagattctctccgtcgcaaatgggcaatataataaaaatcacaagaattattcccgtagctggaacggttggctcaaacgaactcctgtctttctcttcagtgtccagctctccatgatgatgagcgagtacatatacatacagttgtatgctgttcctgaaaattacctgctcaatcaatcatggcgcatcatctcgtcgtcgtgctcgctgcgaagcgtacgaacggatgctgacaaggaccaaccattagagtgaccatccccgttttgtgtcggtagatgatgctagctgccgttggagctggaagtttgtctgaaatctagaattgagctcatctcagaattgtgctagttgtcgatttcgaatcgtgcaagcctgaatgtctgaaactctgaaatgcatggctcctgaaacctctgcagttaaccgttgctctgcagacagatgactgacaattagcagtagataaaaacgcatttgctgcttatcctacagtaacacactgatttgcaagttgatgtgttttctgatggatcatgtgagctgcgaaccgttgatctgtgcaaaaaaccgcagactttcctgtgcgagctctgtccaattgccgaccgagcgaattcagtgagctgcatgcgtggcgtgcgtgcagttgaatttgcccaggaaagctcatcgaattcgctcccatgggggcagagaagcatcccatgtgcgatacatctgaaaaaaattgagttcaaaactcgagtggtttgatctgtcatgctaactaagccgatctgcatcttgaaatctgctgcaccttggaggagaaaacaaataccaaaaacagtactgaaaatttgcgattgattcccttcctgatctatgctcctgaccactactatcatctcgtctcgtcagtcaaatcatcatttggtcaacactaatgacagactgttcatccatccacgtcggctcgcacatgccgacagctacaaatgcagctcgatcttgggatataaataacggcatctcgtttgccgttgatctgtcttagctaactacttcacactagtgagaacagagctgagctgagagcaatggcgatggtggcgaggaggttcttggtggcggcggcggctgtgtgcctggcgctggcggcggtgccggcggcgatggggcaggcggcggcgccggcgccgaagggggcggcggcggcggcgctgaacgtgacggcgatcctggagaagggcgggtcgtacacgacgttcatccggctgatgaagagcacgcagcaggacacgcagctgaacagccagctgaacggcacgtccaccggcttcaccgtgttcgcccccaccgacggcgcgttcagcagcctcaagcccggcacgctcaactccctgtcggcgcaggaccaggtgtcgctggtgcaggcgcacatcgtccccaagttctactccatggacgccttcgacacggggagcaacccggtgcgcacccaggcgtccggcggcgacggtccctacacgctcaacatcaccgccacctccaccaaccaggtcaacgtctccaccggcgtcgtcgacaccacgctcggcaccgcgctgcgcgccgaccagccgctcgccgtttactccgtcgacaaggtgctcctcccgtacgcgctgttcggccccaagccgccgccgtccccgccgccggcgcccagcaagaagccggccaagggggacaccagcgcgtccgcggaggcgcccgctggctccgccgaccaccctgccggcgccgcccccgccgccgccagggccgccgggtggggcgtggctgccttgctggccgccgcttgcctcttgtaagatgagaaattcgtgtcggtgcatatgagatcagaggctactactggctgagtgcatgatgcatttcaagagtagttcttgctgcaacttaaactactcctcttcctctccttattcttctctctctccttgtgattgaacaaatttatccagtggttttgaagagtggatgacgaaatgcagtcgaaatgtttttctgtacattttcgtaaaaaatctacgtagatcttcgatctgtaatattttaccagagtaggtgactagatcgaacaagcatttttagcggtccaagcttaccaataaaaatggcatgttgcatttgggccaaaatgggctgcatttggacctgatcatccttaaccagcccaagattatcatgggcccattgggccaaacgaatttagcaaggcctcaaggctctcaactctatcaatctagtgcaaactgggccaagctggatatatgtatcactacggccctgtttagaggagtttttagttgctgcagctttttttagaatctcctaaaacagtctagcttttgattcaggttctaagaagctgtagttgtagaatcaagaaaatgaactagaaaccagaagctgggcttttctaaattctcagaaactggttatcaacttctttgaatcttaaactcctctaaacaggtcctatgtctggctcgtttatttcgtgatttttttgcatggaatgcgattaagaaaagacaaacggatttggtgccaagcacaagcatgttccggtgagcagtcaatttctcgatctctcgctgttcctggtctggaaattgaagcttccccttggctagctagctggaaattcaatttggtttttagttcaagtggcgacgtatgggtgctcgcctgtccatccgacaacaatgcaaattattttattctcgcatctctcgcgccatcaagatctatctatctagcatcagatgttttacgtgcttaaaaagtgaaggaaaacgcatctagcttagctggtgataccttcttaaacactcgtcgtgttccttaaaaaatcatttgtagaacgcctcatctaccaatggaccaatggagcaccggagtcggagaagaagctaaaaatactcaccaaattaatcgacgcggccggatggatggatggatggatggatcgggtgtcgcttccgagccgctgcgccgtcgcagtcgccaatatctcttccttctttctgatcgtctgcatgctggtgattgaccgggttcacgtatgtatctacaagattcggcaataaggccaagaaaagtatagtacttctgctgcaactgcgtgaatgcccgggtgtgtacaaggaggtagaggttctgataaacagctggtgccaaatggcaactacttcccccattctaaaatacactccctgtgttttataatgaaagattttctagcatacccatatttatatagatgttaatgaatctatacgtatatgaatatgagtaatgctagaaagtcttacattgtgaaacggaggaagtaagtgttttttttaacttcgacacaatttttagatgttattttcactaacaatatcttttaaagtaagatgttttaaataaaaagagttattgatctttttatatttttaccattaatagtcaaaataaaaaatggttaacttacactatttctaaaaatatttacattttagaacatatagagtagctagtaagaattatatagttcttactagctagctagctacttatatagttctttcaacttgtcttacatagttctttcatggattctaggatgattttataggagaagttacaaaccagaagctatcttaaacaggattaagtttgctttaatgtggaacagattctggtgatcagatattaaactgctagctagctgcatactgtcttatttgtatgagaactccattgatcaacggcacagtgacagtatacactacacccatcatgttctcatcggttgaaccgctactgatacatataaaaaaaatcagcacagttgcattgattatttgatttgattaattatgtatggttcaactctctcctggaagttgaagtggagtagtttcatattgcaagtctcgcacgtcagaaacgttgcggaggcactgtcaaacgatcaatatttcgacagggacggccagcttgcagtagaactacaactatactgtcggtggcaaacttcttccagttttgtatatatgacactgcatgattagcatacatataaaattctagtgatagattctttgctctctgatgttgaaaattgcagtgataatgtatataatcatggggccaacatgtacatatatgaactgaatgaatgcatgcatgcatgcatggtttgtggcccaacctaactggaatgcacatttcctgaatatacaagatgaacagacgacaaaatgttgagactgatcatatcattcatttgtatgtagtacaggtcacacctaataataatatcaaattgtaggcatcttgggtactttgatacagttggttttgtacatcaaagaagatattcgatcaagtttctggcagttaaaacatcgccctcgagaggtgcctccccggccgagactacttaccacggccgccaaatgcatacacactgcaaaaaaaaaaaaaaaatctcgtagtgcaggggaatgcaaactggtgtgcaatcatccagtgaaatttttgttctggtcgtgtgtgaaatttagatcgaaaggaatcaaagagtttttagcacaaagagacatccgctacgagcctatatattcgcaaaattaaggaggcaaccacatggatgttggcatggaaaaaatggcctactttatggacgtatttttttattttgtcctgtatataactgtattcaataaaatataacaagtcatgtgtgaaatttagaatgcaaggaatcaaagagtttttagcacaaagagacatccactacgagcttatatattcgcaaatttacgaggaggcaaccacatggatgttggcatgaacaaaaatggctttactttgtcctgtatttcactgtattcaatgaaatagaagaatctccaatctctgtcgtattgatttttttaagagaaaagggtatttttttacctggcctttttaaattaagaacttagcttttaaataatccaatctaaaattcgcttctataaagatttgaattcaagatcttggagtgctactcagggtactgtaaccactatgctacatgccatgtaaccactatgctacatgccatagtattgatatctagtgaagaatgtgaaataaacctgcaaatgtgcaatggaatgaaaatgttgtagcatttgctggcttcacttgggttcaggtagctcgcaaatcacatctaagctcacgcaataaactaaaaaaagaaaaagagaagagaagaaaagaaaagttggctatgattatgaaatgagcctcgctgcctttgctgttccaggcccacgtccagctcaccacctcaccttgatcgctcactcacactcgctcacacacacactctccctcgccaccaaccacactataagtctattaaacacgcactgctcccagctctcagatcgccgcctccaccaccgttcgtccgattcctcgccaccacacccacccacccaccaatggcgtcctcccgcctcctcctcctcgccgcgctgctcgccacggcggcggtgctggcggcgtcgcagaagccgaaggccgccacgccgacgaaggccacgccggcgtcgcccggccccgcggcggcggcggccgacggccccgcgccgacgaacgtgacggcagtgctggagaagtccggcaagtacaccaccttcctccggctcctccacgagagccgggtggacacccagatcaacagccagctgatggacagctacaacgggctgaccatgttcgcgcccacggacgccgcgttcgcggcgctcaagccgggcacgctcaactcgctgtcgtcgcaggaccagatccagctgatgctctactgcgtgctcccgcggttctacagcctcgccatgctcaccaccctcggcggccccgtgaacacgcaggcgtccggcgccgacggcccgtacaagtacaagatcaagccgtcgaacaacaacgtcaacatctccaccggcgtcaactgggcgctgctctccaccgtcgtcagcaaggacttccccctcgccgtctactccgtcgacaaggtgccgctcccctacgagctgttcggccccaagccgcccacgcccgcgccggcgccggcgcccgcgccgtccaagtccaagaccaagaagcacaagaagtccgccgggatcgccgagccgcccgtcgccgacgacgcctccgccgacgacaccaccaagaaggccgccgcgcccgccaccgccgtctccaggtgggtcgtcgccgccgccggtgtcttggccggcgccattctcgccgccctttaagctaaggagacgacgacgacgacgaacaaatgcatcgcccatgcatgccgtatgcacgatgactgaactggagtggtgaaccgaatccgaatccgaattgatcgagatcgattgaaccgtgtaccgatattgttgtgctgctctgtagtctagcttttgattcaggttctaagaagctgtagttgtagaatcaagaaaatgaactagaaaccagaagctgggcttttctaaattctcagaaactggttatcaacttctttgaatcttaaannnnnnnnnnnnnnnnnnnnnnnnnnnnnnnnnnnnnnnnnaaggcgctatctcagnnttacaaagcccagtc

SEQ ID NO: 14268 - DNA, 603 bp, Oryza sativa
  unsure (1)..(603): unsure at all n locations
gttttgnatttgaatgcgcatgagtannnnnnnnnnnnnnnnnnnnnnnnnnnnnnnnnntgaagttgggtacaattcatgcgtcagaactcattcgctctttactgaaaagctcgcgcccatcaagactggcacaggcaattatggaagtagggcgtgtaaacaaaacgctatatctcctcaattatattgatgatgaaaattatcgtcggcggatcctgacgcagcttaatcgaagagaaagccgccacgctgtggctcgtgcgatttgttacggacaacgcggagagatcagaaagcgttatcgtgaagggcaggaagatcaactgggggcgctgggcctggttactaatgcagtggttctgtggaacacgctctatatggaggaagcgttgagctggatgcgccgtaatggcgaagaaattatagatgaagatatcgctcggctatctcccctgatgcacgggcatatcaatatgttgggccattatacattcacgttgccagaggatattttaaaaggggaactgagagctctaaatttaaatataaacaacgaattatcttcttaacgtacgttttcgttccattggccctcaaacc

SEQ ID NO: 14269 - DNA, 650 bp, Oryza sativa
ttgcctagcatagatccttttgttccaagtacagtttctgggaagagaaagtccatgacaggaagttcttcccatcttggttcacgggcagttcgtgaataccaatttattcctgaacagtcaagtgatatatatgagaggacgacccagtcacgatactatgatgttttaactgaagcttcggattcaaggatgtcgacaggatcacgattcctccatggtgttgaaaaggcacctggctatacattccatggacaaatttctggttctagccatttatctctacatggcaggccaccagttttttcatcgggatcaacagattatgagatggatccatctaatatcaattctagttctgttccaaatgaaagccagtatggaattcctcaggttgctggatttgaaaactccgttgcaccctcagacagaatggtttatcatgatgacgatgcttttcgaatggaaagaaagcgcaaagtactgagagatcccctcataatttccccaaaacgtaaccatgtgtgaataaattttgagctagtagggttgcagccacgagtgagtcttcccttgttattgggtaaccagaatgccgcaaaacttccatgcctaagcgaactgttgagagtacgtttcgatttctgact

SEQ ID NO: 14270 - DNA, 26293 bp, Oryza sativa
ttgctacccttactttttattgtgttttcttaacaggaagaggagatcgcaagattaaacacaaaaattaaccaaaccgaaattcatgccacaaatttgatctcaaggcttgaggtatagtagctttctcactttcatcatctcccctttgcgatatttatgtctctcattcctggaatgaccaaacacaggctactgaagcaaagttgaagaaccatgagtcagattcgctggctttgaaagaagagatcagatcactgactgttagcttggagtcttttagaactgaagctcagtcacgtgagaaggaagtgaagatcttggaacaagaaaaaaaccatcttcaggagaagtatctaacagagtgcaagaggtttgatgaggcagacagccggtgcaaggaagctgaaagggaggctaaacgagcaacggaattggctgacgtagctcgtgcagaagctgttgcttcccagaaggataagggtgaagcgcagaggctagcaatggagagacttgcgttaatagaaagaatggagagacaggttgaaggtctggagagagagaagaataagatgctggaagaaattgagcgagttggtcagtctgagaaggatgctgtatgtaaggtttcatcgcttgaacaaagggttgacgagcgggaaaaggaaattgatgagatgatgcaacggagcaaccagcaaaggtccagtacagttcaagttcttgagagtctactggagacagaacgagaagcctgcgctgaggccaataggagagctgaggctctgtcactgcagttgcaggcaactcaaagcaagttagatatgctccaacaagagctgacatctgttcggttcaatgaaaccgcactggacagcaagcttaaggcctcacatgcaaggcgcctgaggggtgaagctactgagtctgtccatgatatggatatcgacgatgacaacactggcaggcgaaggaaacgatcaaaaagcacgacgagcccgtttaagagcaatcacaccgaggacggtggctctgtatttgtaggagaagacactaacaacgggagccagcaagcgcaggagacggagactgaagactacaccaagttcactgtgctgaagctgaagcaggagctcactaagcatgggtttggtgctcaactcctgcaactgaagaatcccaacaagaaggacatcgtcgccttatatgagaagcacgtagttggcaagtagcggttttctatttatgcgtgctagattttccctgttgcgatgaacgttgttgtcacggttgaggtgagagcgcgaaataactaatgtaacttagcctgaaactccagtttgtgttattgttaacttggtgcagtttattttgcatgcatcattggcaagtgtttgtagtacctgtgtggctgtgtttagttattactcactctgtctcaaaataaactcagcgtgtagttcaacttattttgggtcggagggcgtagaaatttggtttgcaaacccttcattatatctggcttccgtgtttgtactaacgaaataatcctatatgttggggactacgaaacagagatcaaggttaatttctctagctataatgttagaaccatccatccgagacatctaaagatatatatgaagtgatgcatcatcaggacctcttccgtgtgcatgtatacatgtacaaactgatacattaattgacattttcgagttagaacggcgtgtagtaataatctttgcacagtatagcatcggaaacgatataacaactttgaacaaaactgcaaataactgatggatgaatgtaaggttaagaatgtaatataatggcacctatgtgaatcatatcggtataaacggtaatgtttagattttgtgtaattttggtttttccttcaagggccaccaaagctgttccttgccgcgtgcaccgcgaagtttggcgcgaagtgcgcagcaggagcaggtggccggtaacccatcgttgctgccgggtcgtagaactcgtgcacaacgtttgcctccttgagaaagctaccaccaccaccaccttgatggccatggacgatggagtagttgctgttcaccacggcggcggcgacggcggcggaggcctccttggcggcggcggcggcggcggtggagccgcactgcctgggctgcgtctggaagaagaccttggagacgacgagctcgccgtcccgctcctcctcgtcggagccgaggtggtactggtgcatcacccagttggtcttctccggcttgcgctgcttgccgtagttggtgtagaggacgaggatcttcttgtagcccctgggccggccgttggccatcaccggtctcgtcttgccggtcttgtgccaccgcgtctcgccgccgtcgacctcgtcgctgtgcaccttccgccgcttcctcgtccccgtcgtgtacgccttcgacggccggtggaagaagtgcctcaccagcccgtccttgctcacacctgaattaatttttcaaatttatttacacccacaaatgcacgcaacgatcaactcatttatcaagaattttaagctaccgattctgattccactgtaagaaaaaagaatttacacccaccgggaagcctctcgggatgggtgtagcagatgccattctcgccctcgatggtggggatgaactcgtcgacgagagggtggagcttcctcgagtccggcctcgccttcccttccaaatgctcaagaagctcctggtccgtcggatcgaacttcactccggccggcagccccggcaggtcctggatcgtcgtcgtctcctgcaataattcatcttaattaatttgttgatttgcatctcaaccaaaagaagaattaatgtagtactacgcagtatatatgatcagttatcacttgctgaatttatagctgttggctgttgcattcagaaaaaaagaagaagaagaaggcatgatcttgatcacgcagtatatatacctgttcataccgcgcgcggtggccgcaggaggggcacatcttgacgaggacggcgagcgacgccgccgccttcttccccgcggcggcggccacggcggcggccggcgacaagctgctgtccacggcggtgcggacgtcgctgaagctgttgcaccacgtcatcgatctctccggccaaccccctttctcctcctcctccacaccaatatatacacacgccttatattattaattaacctagtattttaccactaactccatacatgacagccaaaaactaagaccagcagccaagaacaatgccggattaaaagaagaagcctactagctagttagcttagctagagacacatctctagctgctaattaagctatctatctagctaggagagatcgagagagacctgagctgatagggaagaaacaacttaaggccggggtcctgatgagagagagatcgtcgagagggggaaaaaagaagaaggaaagcttgcaggcaacagctagcttgtccctgttaaaagctacttgtaatcacacacacccgtactatccctctctctgatttctctatcctcatctggtaccaatgagcaggaggaatgcaatactgtgcacaattcaaccttttccccgtgtggttcattccccaataagagatccattacatatacacctttttctccttttcttttctttaattatgtccaagtgtgtgtgtgcgcatatgtatatatacaaacatgtacgcaatattcctagcaagtagtagtaggcggctaactaatacgtagttgagatggcaatggcatgtagtacgttgcttcgctctcacgtataggcatgcaaaaaccgatctgtgcccaatacgttcaaggtttgttaaaatcttgatcgtgaatcaaaatcgaaagttctaagggtatgtttggtagagtttcaacttctaaatttaacttcaggagttgagtctggagtagagttgtagagctgcctaaactcaattccacttctctagttcattttgtgaaaacgctacacccagccccgcttccattttaagtagagctgaaattgtttagctgagcttcaacttcaggagaggtgaagctagagctaaaattgtgccaagcatgcttaggattgttgtgatcgtagaatcgtacatataaaaattgttaaattgtagattttactcatatgtagtcgtagaatctttactcataaaattgtacgagagaactaattgagattttaaccttagaatacgtgagaaaggaaacgccggagattgatcgatcgaacagctaggtgcatgcatagtgcgacatggtaactgtccacgatccgatcgaccaacaacgcccggcatatcctgttccatttttcaacagaagttagcaaggagctagcagtacaccctgcagctaagctagctgaaattaaagcataatattgccaaggagagaagcatatgcaggtgctctgtgtggatgcatgagatcgatatcgatctaagttgcatgctgcatatatgcacgaccaacattattctctctcgatctgtacgttgttggagaggccgtacgtgcaggtgcacaatgttgattgaaatatcttatactagggcctggttggttgctttggccaggagatatattcccttccattaatgaaaccacgtttcagatatacgcacgcatgcaccagctgcagtagctgggccaccgatcgatctatccatcagataactaattaactaacgcatttgtgtgcagttatgtaatgagcaagtacaatcaggcgaatgaattcaaatactcgcaccaaaaactcttgttccgatctggggcaatgatacataccaaaactttcttattggcatttcctaaaatacttttaaatagggactgtctactcgtcatttgacagaaaacccctcctaatatcttgtaaatttgtgaccattggattgatttgagattcgtgcaaaccccaccaaaccctaaccacttttcctttttccttcctgccgccgcacaacgctcgagcgctcctctcagcaccgcgcgcctcctgcatcgccaccgtcgccgctgccgccccaccgtgccgccacccggcctcgccagctggccgaaaagtgtcaacggcgtcggcgaggccccgccgactggccccctccccctctccttctttgcctcaagccggcggcggcgtgctgtccgtcatcttccccatcgccagcggcggggcgccaccaccggccgcctacaccgggccaccggccgctcccaaccccgcggcttcgacggagccgccgccgcctagccgcccgcccaatccgccgcccgccgccgggctactgcctcccatggccatccctttaaagccagcgaactccccctttttccccctccttccttccccccacccctaccccaccccaccccgggaccctaattcgtcggccctctgccagagtttgggttcgccggcgccggagaagaagaggtggttgccggagttggagaagaagagcacgaatcgtgaagcacatccagtgatccaaaatttgcaagatttgaggttgtgttttctgtcgatagaaatttcgcatttccgttttaaatattaggcttttcaaccttccaacatttagttcattttttttacctcgaaaaagtatcatgtaaactcagtttcatccattatgatatatgtatatttcactgttctgatagatatgagttgtgcgagaatttattactacgtaattcaaaacagtgccatgaatatatatactgaaactttgtgcagtacgtactgtctcagcttccactaaaaatccagctgcaacaatacgtatatcggtatatgtgtggtcatggagacggaaggagtcaataataactgaaggaaagcttagaaggtcaccaactcgccatggcatttttgtgcatgcgcgatagacgatggttggatggggatggatggagtaggtggagtggagatggggcaacccgattcgccgggggacgttccaacgaacaggcccagcagagaagctctttggaaagggtgcactgcatattgcgcatatgctattgctctctcgctagtcgctagctaggagatcgaccgagtccagttggctttagataccaggtcgccgtggagtgtcttgcaagacaaattaaacaccccacacatcacaaacacaaacacatacaaatgagcagggctgtccctagcaatttggggggccttatgccaaatttaaaatgaggctttgtgtttaaaaatactaattatatgatagattaaggctatatattttttacaatacgtcgggacgtgtctttattaagattgtctttttacttgatctgcatcacagccattggcccttcaaccacatcaggaaagttagatcaatttaatgctcgtttcttaagctatgtttcaagtgcggtcgctcacctcatacttgctcagggacgagcttgcaaaccagaagaaactaataaaaaagatgagctatgtttttcctctcgtacatgtacatattgccccttctttaatctctattccataaaattggcaccgtctatatttttttcttaaaaaaagtaataaactttttctttttgaagaaaaaaagagagcggattagctatttatttaagaactagtaaggtagcccgcgcattcgcgcggggatgtattgtacacagggttaaacttttcggtttagccaatttgatcgggcatcaccgaaataccaaaatttccgaaatttcagtctgaaatttccaaaattttaaacaaaatttagttaaatttaaacaaatattaccaaaattcatgaaaaaataaaaaaatgaaaaattcggccgaaataatatcgtatctgaggggttagaaatgatcgaaatttccaaccttgatttgtatattgcgtttgaaatttatcgttttacttgtcttttcccgtatagtcacaatagatattaaaaatacaaacactacaatctaataatgttattttgaattattctaatgttataataggggagtagttttttaaagcattcctcagagttaggttcattttacttttatccatatagatataatttaattatttcgaagtcatatatggtgataaaatctatatcattatccttatataattttataattgtttgaatggcatacaaaaaacagaaaatatagccccaaagtgacatatttcttctcaaagtcgatattatggtagatatgtgtctttaaatgtaaaataatctaaagacgtaagttcatcaaatgttagtagagtgagttagatgttatagttgcttattttgttgcataagttttgctttctaactacatattttgtaaacattactcatagtatattcattttacttttatgattgtagacctaatttaattattataaagttatgcatgatgataaaatctatattattatcattattttatatgtttttaattgcttgaatggcacgcaaaaatcagaaatataaaccaaaatgacatttttttcaaagctaaattacagtgaaatatggtcctcaactgtaaatttagttataaataatctaaagatttacgcagatcaagaattagttgtatgatttagaagcttaattgtttaacacaaaattattacttatctaactaataaggcatgaaaataggagaagtaataggtgaaaaagtggagaaatgaattgaaggaagaggaggcgtacatacgtatgttcggttttgtaaaaaaaagtaacttatacatataggtgttaacaaccaaatttggtaacatcggcatttgggaaagaagattagatcgaagcaaagtcggaggcggagatcgagttcgaaaacagaacaggaatcggctgaagtccagatcggctgagtctgagttgggctaggtaagctgatgtacccgatcccgacaatacaacttgatgtgtgatgtcgggttagattgaggtgctttaagatgattgccgcacatggatagagtcctgagggggcaattatatctattgattaggatgttttatgtaatttccttagagatatgtttgggcaaaagtctgccgtaaagacttatggtatcttagagtttgttagagatagtagtcgtgtccgttatggacatatcttgtaattctcgggtataaatagacctgagccctatgtaacttttaacacacacgttcaatacaatttcggcgcatcgccacccttttgctttagttttgtttcgacgagttcttgctttcgggttgagctgcatcggtttcgatcttcaacaagaggtaaaacttgttatgtcggctcgcattcttgagattagtgcttccatcttcatgatactctaatcttgtttatgtaattcgtcgagttatcatgtatcttatataatctctggcaatatcaccatctaacatacaatcggctaacatctattgaggaagacagccgattaggttagattctgacgttgactcagattatataagatatctaccattctatgaaactttcagcggcttgattgtctagatttggttcttcttttcatacttaatactgcatcagttgagtttgatctattaagtcgtgcttagaataccaatctctagcctgcctcctggttgccgaatagagtagtatcggagtatcagccgatcttacctgatttaactatatttgctttatatgcttcattgatatgttaaatctgtcctttatgtcaagatatcgttgtatttaagtatattaggcttttgtttgttatattatacctgttttaatatcctgacataaagtagtatcggagtattagccgatacatgctaggtctatctgatcggctatgctataaacatatatagtcctgttattaacatatatttcgatctaagtgatttatactatctcggcatggtgaccgatctatcccaatcacttgatttaagtatatatcgatataagaactatatgttggaaatatctacagctgatcgaatagatttatttctttattgtttatttacaactgccgatcgattcatatatgacatcggctcagagataaatgatatgtcatcggcacctagccgatcggctatcatttatagatttaaccgcggtttctttgcttctatttcttgttgattacatgatcaaatcaactggcatgctagtacacccgaaggcgagctttggacatgcactggagttaagcagatctcccaggcctcgtgttttctgtcaacaataggcttaggtgggcccgggtttaggagagaaatttttttattgaaaattaatctaagggttgtaaataatgggtccaccaaattcaataaaaatatgttttgttattttagaattttaagaatttcactaatttattaaagcatcatatggcaacttagaagcgttggtaggatgtcatatggtaaattaggagcatttttgggaagtttaatggacttttagatatctaatctaatgttctaaaacaccaataaggtccaccaatttaaatgaaaatcgaccgtgatatttatgtaaatttatagagtaatatgttttatctttacataatagaaaatcctattttaaatatcatcaattttttccaatagtactaagggcacgcgcaatgtttatttcacaagtgagcaataacgtgggcccattgattaggtagtagtagttgttactaagctccacaatgtatataagcctatgaaggataaaataaggtgggtccatgcacaaaaggtacatctgttagcttgtgacggactacaattcattttttatttgcttgttgccggtagaaacgctatgaccaggtaacaactaataccagctttcacagtgtatataaccaggttagaaggaggaattcaatgcctattacctgcttttgtcccacattgtggatgctctaagtacatatgtttttttttgtttattgattttatgataattctgtgcgtagttttttttttcttctgacgagaacagtaggtacgtaagctttattggtttcttcagttatacttacgtaggtttttcctgtatacataaatacgtaacagagtaagggaattagattgttaaaaataaattacatataatctaatagcctaaaatatcgggtccactgacagtggcggatctaggatttagaatataggtagtccgacctaattttttcctaaacatactaaatctaacgatggtaatatataccatgcaagtatagataatagaatagaccaaaagtgtatcatgctatattaataaagcatcttaaaacatataaaattagtaattacctaaatttttgaagaaaattaccatactaatttttcttcttatcgggtctacgccttctaatggccatgaaagtggtcgttatatcttcttccttcacttttaagaaaacatcccgcttaatgaatgtgactatacaatcatccaaaagctcatcacctatcttttttctcaaccatcattagtaaatgcatcaattctactataatttaatatcacaatgcacaggagtaaagagttcaaaatttcaaaactgaaaattgaaaaaaagtaaaaaaaatagaaaacctatttttttttttggcttggtgcaggactgcatcactgcgggcgggcgttggcggcacacgctgcaggtctgcagcagtgcgctagtgcggcactgcggctgcagctgcggcggcagccggccaaggtgtcgacgcgcgcgcgtggcccggtggcgctcgctctcacgatctgatcagatcgctgatcgcgtcggcgtcgcgactcgcgagggcgaggaggagagatacagagagtcctgtgacggcgcgacgcttcggtttcttaattccgatcgattagatacaccatacacgcgcgtgtagggtggggcctgtggtaatctaatggtttaaaatattaggtacaccaatttaagtgaaaatcgacggttagatttgatagagctacgtggcagcctaagaacgtttgtaggagtcccacgtggcagcttgagtgcgtttgtaggaagtttaatggacttttagtatataatagatagatagataatagatagatgatgttgagatctaatccatccgtcctaaaaaaaagacaaaccctggtttccgtgcccatctattaaccgtccgtcttatttaaaaaaaatatgaaaaaaataaaaagacaagtcacacataaaatattaatcatgttttatcatctaacatcaatgaaaatacgaattataaaaaaatttcatataagacggacaattaaaattggacacggaaactcagggtttgccttttttttgagacggagggagtaacatcatagcaccagaggacttgacgatgatacccctactgtctgacaccctagatgagttgtagggccaacgtggcaagagattagtaccaaaatatctgacactaaactcccaacctcaacgtcaatggacctagcgctgtggtaggggacttatcaatgaagcagtggcgcctagctcagtgacgccaccgcagtctcgacttccaatggcgttggactctcatgctggtaccggttcctttctcttccatgccactgctgtctacgatgagctccatcaactccagtgccgccacgggctcgccaagcttcggagcttctaatcaagtcctataccttagcactaggcccattggcgcttaggttgagaggttagcatccacatgctgagaaagtattttctacacctaggtgctatggcacttaggtatatgcatgcaatttaaacaattatataaaaagtttatataatttaataagataggccatgataattaagacactatacaaaaatgcaagtctaaattcgatcgatatatgaagaaacaaaaataacaaattttatctgcgttgtatgagtactattcaatgtctgattttattatttttgtttctctaattgtagattaaatttagtcctgtatgtttgtgtatagacttatatcatcacaatcgattttactaatttttttataactatttaagtcgtatgcaaatgataggtgccgtcacacctaggtgtataaaatccttgtcctccacatgctgctatgtcgtgcctccaactagtctacggttggggtttcaatgcccaatcatatttcatgttaaaatgatattggacctctgcattattagatttggtgttaagatcacggtttattttagaaatatgttttttgcacagcacattcttaaaacaagtttttcaaaaaaaaaactaaattgtcaattgatccggcttgaagcttaagttaaaccaacagttatgtgttccagttttggtcacatagccgatagccttttcgagcttaggtgtgcatcatgtcagaaaaggattaatcatgcaagagagcttatagaagtttggtaggtggtggtgttggcgcgcgtgtgtgtggcaggaagtggattgcaccaactcgatcaatctgttgcattcttcagtttgcagccacagacagagctgcccatactgtagcttttaggtgaggtgaactgctactacactacgagtctactactgctacagatggtcttgatcagtagggcttattaagatcctctaatcgtggcgatttctgaaaccaacgatcagaatacatgattaagagagtggtcaattaatttgcagaggcaataaaaacatctagcttgttaattaggatcaatcgggagaaagctagcacgcctctatcagaaaatgatttggtaccccaattgtatggcagcgtcgaaggagccaaaaaatcaatatatattatttctaatttctttgctactatgtactccctccgtcccactttaaatacagttgtgtgtttccgtgttcaacatttgatcgcccatcttattggatatttttttatgattattatttttgttgttattagacggtaaaatatgaacaatactttatacgcgacttatttttaaaaaatattataaaatttttaaataaaatgaacgtgcaaatgttgaacacgaaaccctcaactgctttaaaatgggaaggaggagggagtactagtgtgctataagctctctcggtgaatgatgacatgtctaaatcagcagaagttttttttttatataagaaaaatcaacttttctctgcgtactagatggacctacaaagtactacaaattaattaagatatcgcactaggtcatatctggagtactatacgttgccgttgagatgtagcatttgacgcagatgtatgtaaaactttgcattagattgctgatagtacaaagagaataatttcttgccaagtgtcgactgactgtctcatctacgtacaatacaggcttaattgcagtcgatcgttcaattcactcctactattttacttgatatggaagttcttctgtttattagcagttggtagactacctagctagctatatgttaattaagctgctaacaatggcgtttatacgagctaatctattactaatcgaggagtacaattgatctaaaccaactgtttaagtggcttctgggtgaagctcaagttttctccatagattggcgagtaagtacttttgattggaaattatattggcattgattggatgttttgtgcgttgatgttcatctgtcaacgcatgattgttcaacttttagtgagaagggtacttaacgtggatgaaatcgcactcgttcgcttcaattcttgcatatatggttcgtctacatgatgtcaaggctatgttataccacttcgtttcctaaaatgtgtaacgttgattagttcaatttcgagctaaccaacacaattaaaaagaaaaatagatggagtactaattaagatgaactagatgatagtacctcacgcgttgctgcggaggttttagaacaaatttgatagagcagttggatatgatcgactctcaaatttgcatgtacaattgttctattcaactccctaaatgcatgcatgaagcataaagaggcaaatactaaattgttttattcttttgtaccacggcaaaataaataccatcaagaaaaaaacactgggtaatggatatcgatatcgtttaatttcacaacatagaagtttgttagctgtatcctatctagatgtaaatatcaaatcattaggtactcatatgccactacagagaagtacatatcaggaagaatgaacaggttctctttttccaattaatgtcttcatgtattagcttgttgtcgttcttgaagaacgaactaaaacaaataaaacaaaatctgcatcaaatgatatacatagagggatcacaatagttttccattgatatatcagacatcgattgtagatctaatggccgaattaatttaaggtgatgtggcacgttgtgaaaggagaaaattaaagtttgtggggataaattgtataagtatataggataagtacattgtatgatctgtgggtcataattaatttacacgtactgcttaggatactttgatgcagctgcatgaaggtagggcaatactaggctaaagcttacagacatccgaatcgagcatgttaatgattgatggccgaaaaaggataatcacatgattaaagccttgtgctgtcttatagctttgcaatgtttgttctccaagacctcaggtggagcatgcattctacactgttacaacatgcaatgtgtaggaatctgttttgccagaaagaaaggccatggagtactggcagaggttaaaggagcatgcatgtatttggaccactgcatcaggaggtttttgtcttggcacccaaaagcttattcttatcttgcccaagctatcctgttcatgttatgctacttttgattgcattgcgtctgtgtctctgtgatagctaggctggtatagctgcttcagaatgacggcgaacatatcagagcctgactcatgtaagtttgcattgggcatctgggcctttcttgtatcagcttgggattagattgggctacctgtaattttgcaggctactggacctgtccatctctatgggcttttttcataggctaaatccccagcctccaaccgaacatctctagcagccagcacaagcaacaggcagcctatcagcctatcagctcaagcaacggcaacacaacaattcgtgatcacttatcagccatcaccaaaaagaaaagaacacaaaagattttaaaaataccagcaagatatctacgatgatttcatgaatctcaacaaatgacagcacaatcttttcgaatatgcttatagaggtaaagcggtgtatttgtagaatgagtatgcacgtgttatgatcgcatacgtttatctttaaaaaaacacacacacaaaagcgagataccacacttgcccaataatgcttagtcgactacatgacacgtactttagccatctccacaaggcaaatccactaccggcccaagccacagtagaggtatcaccaacaaactcacctaatccgctccgtgccaaagctgcctttttagttttgatccatcaatccttgcaccaaaaacgctcacgaccaaaaaaaacgtagctggacgaaggccggcactgcaaatttgcaatgccattccgttactcaaccgtgtgcggcaaccccgaaagttaactcaacgccgaagcgccagaaaccacacctcgtctccaggctccagcgatcacttgcaagcaacaacggaaaaactgcccgatttgcttcgatttttggttgtttttccttgcaagccaagtgccaaccatccgcaaacgcgcaggccggcttcgctcgaccgccaccacgcctcgtgcgtgcatgcgtttgcacgctttaaatcctcatcaattcccttccgttttcgcagtagcaacattggcagagacgaggaagagaatgcgagcaagtgccagggcatcatcatcatcatcggcgtcaatggcggcggcggcgcagcgcgacgacgtggagtcacggcgtgatggtggtgagaatgagaagcggccgctgctggagaagcgatccgccggcgacggcggcggcggcagcggcggaaatggcatgagcccggtgcagagggcgatcagccagacgtaccagagcacggcgcacctggcgaagctgctgccgacgggcaccgtgctggcgttccagctgctgtcgccgatcgtcaccaaccaggggcactgcgacgtcgaggccaaccgcgccatggcgggcgcgctcatcgcgctctgcgcgctctcatgcttcgtcctcagcttcacggacagcttccgcgacgccgccacggccggcgccgtgcggtacgggttcgccacgccggcggggctctgggtcatcgacggcggcgcgccgctcgacccgcaggccgccgcggcgtaccggttgcggctactcgacctggtgcacgccgtcgtctccgtgatggtgttcgccgccgtcgcgctgttcgaccagaacgtggtgtcgtgcttctacccggtgccatccgagggcacgaggcaggtgctcacggcgctgccgatcgccatcggcgtcgtcgggagcatgctgttcgtgagcttcccgaccacacgccatggcatcgggttcccactctcgccgcgctaatatttagtagaattctgcctgcacgtacgcctatatgtgcatatcctcgtcttagttctttggaccattaattgcatgtaattaaattgtgacacgaacgaacacactgtaaagctgatcacggccccaatgggctcgcaaggagtcgatgcttacaagtttaacttaatctacgctttgtttgagtacggcatgacgatatgatgaacttgtgggtgcaaacgggcgggaaattagctagcattacctcgtactagaaatgcgtgcaagcttggatgatgacaaacttgtgaggaataccaagctcacaagtcacaggtcaaaccggggagtgacgcgatctccaactccaacccgtcgtcctctcgcgccggcaccgtgaaggcgtgaagcgagggcagcgggtgtgtggactgtggagtgggaagtgtgtggtgttttctcgtcgcgtcgcgctcgatcggaggctgtgcagcggggttgcacgccgtggacgatgatacttttggttgggcctattgatgatattgtcgagagaattggcccgtggagagcaggacggggttcggaccgcggttctcatggcccatatgcattatgatgacatcgtgtactatactactgctgttgactttgattgtgacttcttgtattgacttccaccgaggaaacatgtactatccccgtctcaatcagtccaccactactattttttcattggtaaataacaaggcacttatttcgtctacctccgttttttaacagatgacgccgttgactttttctcatctgtttgaccattcgtcttattcaaaaaatttatgcaaatgtataagatataaatcacacttaaagtactatgagtgataaaacaactcataacaaaataaattataattacgtaaattttttgaataagacgaatgatcaaacatgtgagaaaaagttaacggcgtcatatattaaaaaacggagggagtactggatttcatacacgcgtgggaaagaacggctctgatcagctgaacctaatccgatataccaaaacgacgaggggttttctgtaaaagttgaaaacgtggcatggcggcgaacccagcacgtttaagatatatagtataccggtttattctttaaaaatatttttagaggtagagtatacacttatacggatgtgcgtgtatccaacaatctgctttcgtagaaagagagttagagcaggtacaataagctgactgagcaggctccaaaaatatccagctcatcaaattcctacgtggaagagagaggagagaacaaagcgagcgactaatctatagctgggcgatagcacgggttcgcatgcgctttgtgggtcccacggcgagccatccgatcccgtgtgacatgcagcgctattccctccccctccgcagcccatcttgtttctctcctcacgggagtgtcgcagatcgatctttgccagccatcgcctcgcagttgtcttccgcgtcgattccccgcccaatcttcccggcgtgtcttcgccggccgccgcttgcgattatcttccacccggacgcctagcccaatctcgctcaaaagcctgaccaagaagggtctgttgatgtcgtcggcgcccgtggtggcggcgatgacaagggcgttcttcttggcgactcggccgctggcatcgacgaacgcagcgctcgcggcgcagcagatcgtgaacgtggcggcagcggcgggcgccgacgacaactgcgggctggcgctgctgctggccatcgcgtcaagaaggggcagatgcatctacgagcagaacaaacggatctcatcgttgatggagcagcgaatagctttctaatttgagttattgtcatctaatctcttcctaattcttttgttcttctcgtctatttgctgtctgtgacttgtattttccttttatgtatatagcactcctgagtattgcacaacaacgaccacagggattgagttcactttcgatcatgtatatcaatatatgcgtataaaataaatttttgatggatgagatgcagtcaacacaatagccactatgttgtacaaattagctttaacatcaactataaaatgacatggatacgagtggagccatcagctggctatactattgaccttgctcttaggggggtgtttagatccaggggtaaaattttgacgtttcacatcggattttatataggatgtcgcaaggggtgttcgggcactaataaaaaaactaattacagaatccatcagtaaaccatgagacgaatttattaagtctaattaatccatcattagtaaatatttaccgtggcaccacattgtcaaatcatggcgtaattaggctcaaaatatttatcttgcaaattaatcgcaatatgtgcaattagttattttttagcctatatttaatacttaatgcaggggttcaaacgttcgatgtgacggggtgtaaaagttttttttacgttggatctaaaatttttagtggtagtcttcaattcaaaacacgtccaatcacaagaacagtttaaccatcacatcgaaggtacagaacacaaacatcgacggatccaaactcatcaacctgaccccgaatcccactgccacacgggccccaaatcccacggcccacatccccccacccacaccacaggccgcggatacttcactggattcccaatccgacccaacccaactggcacgccaggcacaccaagtaccccaccaccaaccagggccccacactcccaaactcctcccacccgcacgccgccgttgccacagaagatccacgcccagttctacgccacctatgaacacgcgcgcacacacgccgcgcacatacatgatcaaatctcattcgctcgccaacgccgcaagatcgagcgaaccccagcgaatccgagcgcccacgcagccacatcccatcattattccgcacctttcctcgctttccttcgcacactcccggactcctctcctctcctctccccatcgcgaagagaaaaaaaaaggatagcaccaacaacaacaacaaacacagcggaaggaagcagaggcggcagaagagtcaggcaggcaggcaggagcagcgaataataaaggggggtttttattaggagagtagtagtagtaacaccacgatggaacgagcgatccaaatcctgaccagttcggatcgagcggtggaagaacaggtttggagtggcctcccgtgttgctcctcctcatcctcctcctcttttctttctattcctcttcttccccgcggtctctttcccctctcgcacgcaccctccttctcctcatcatcctgctcctcccctcgttttgttgttgttgttgctgctgctgctgcggatcgaggtcgtcgccggattcggttcgggtcgtcgttggcccgtgggctatatatcgaggggatttaggtttgctggattttggagtttgtgtgttgaatcgatcgtgttggcggcgggcggaatcggcgaatctagggtttgggattctcgatttgattgatcgggtggggggatggattcgtccggcgatggaggggacgagggagcgggagctgcgccggctggggtggaggaggagagccctgccccggcgtcggctccggctccggctccggcttccgcttccgctcccgttcccgccgccgttggtggtggagcaggcgcctctggatccagcgggaaggtgaagcgcgtgatgaagacgccctatcagttggaggttctcgagaggacatacacaggttcgtggatgatggcctatgggggactggggattctggaaatttttagggctatttcgtgtttgatttgtcgatttttcgatcgaaacagccctgtgatttctgtgcttacttggttttgtctgtgttgctgcagaggatccgtatccaaatgagacgatgagagcggagttgtctgtgaagttagggctgacggacaggcagctgcagatgtggttctgccaccggcggttgaaggaccgtaagccaccgccgaagcggcagcagctggaggaggaggttcctgtgccggttatggcgccgcctcctgttctgccaccaccactgccacacagcgagctaacaatgggtactggtgggatgtatggcgagccgttgctgtccccctcttcccggagaggaactggcagaccatcggctgttccgaggatttctgcatcagaggttgcgcggagatattatgagccaccacaagttatgctacctccgttggcaccaatgcagctcacacgagctgagcaccgggtgattgattctgtggaacgactgataggggagccgctccgggaggatgggccagtgcttggtgtcgagtttgatcctctccctcctggcgcatttggggcgcctattggtatgtttttcatgcccatgatgcttccatcctgcattttataggtgctgcaatatgaatgtttcacttatttagaaagaatcctttgcactgttctaatacatatacatgattctaaaaaccaacatgttggatcgatctttatagttcattttctgtcatcacccactgttcgacaggtaaactccgtggttacctacataactgagaattgtgacagatattagacttgcatttcatcttttatgtgtttaggaaagcgttagcaagtttaaatgatgattgcattgtttcagcgttgatactgataatatgttcatttcatacttccaatctgctgatttcaattgtgctgttattttgctatgtttggagcagttccagagcaacagagacagcctttccgatcttatgaggccaaaatgttttctgggcatgatacaaagcacattaaggtatgttacattagcacttagcttgctgcatgcatgcatgctgtcttttgatagttgacttccagtaaagggtctatttatcaatcctggttatcagccttcacaggttataataatgtaaatagtgtaaaaatattcatgttatactactgatgttggatgcatcataattctgcaatatctataagctaatgtggtccaaagagaattaataattaatacttataaaacaaaactttagactaccgatgttatattgtagttgtactagatatttacctaaacccatgaccattcacatccacttttaaatacttcaccgtccttatatttgattacgtctcctgttctgttcatcttcaagtttagctgcttttagtatagtcttttgtttctttacttatcaatgtattcaatctatgttttcccctttcaggcatctgcattcttgcctagcatagatccttttgttccaagtacagtttctgggaagagaaagtccatgacaggaagttcttcccatcttggttcacgggcagttcgtgaataccaatttattcctgaacagtcaagtgatatatatgagaggacgacccagtcacgatactatgatgttttaactgaagcttcggattcaaggatgtcgacaggatcacgattcctccatggtgttgaaaaggcacctggctatacattccatggacaaatttctggttctagccatttatctctacatggcaggccaccagttttttcatcgggatcaacagattatgagatggatccatctaatatcaattctagttctgttccaaatgaaagccagtatggaattcctcaggttgctggatttgaaaactccgttgcaccctcagacagaatggtttatcatgatgacgatgcttttcgaatggaaagaaagcgcaaagtatggtttttcactgactttatgtaaacttgctcattattccggatatgcactagttgctgatgtgtgatcattttcttaaaacagcatagcgaggaagtgaagattgcaaaggaagttgaggctcatgaaaaacgaatcagaaaggagctcgagaagcaagatatgttgaacagaaaggtattccttattcatgttacagaggatcatgcatttgttcttggtatgagatttatatccccctgtttgcagagagaagaacaagtgcggagggaaatggagagaaatgatcgtgaaagaaggaaagaagaggagaggttgttgcgtgaaaagcagaaggaagaagagagattccaaagggaacaaaggcgtgaacacaagcgaatggaaaaatatttgctgaagcagtccttaagagtgagttctctagttctaggacttttaatgtgacaagtatagagttcagattattgctactatgtagtttacaatcttttgtatgtgcaggctgaaaaaataagacaaaaggaggagcttcgtaaggagaaagaagccgcaaggcagaaggctgccaatgaaagggctacagcacgtagaattgcacgggagtatatggagctcatggaagatgagcgcctagaactaatggaactggtttcacgaagcaaagggttgccctctatgctatctcttgatagcgacacgttgcagcagcttgattcattcagaggtacgttcaacactcctagatctagtcttctagtcagtgtacgctgcagaatttatcagcttactttgttttcatttcagaaagaaactacatttgctgattgaataaagaacttttcttttctcaattgggtagatgcaattgttatggctttaaaggcacttcattttaaggatgaaaaatatagttatatgtttacaaaaataatagacctgatactcgaatttatgatagttcttttgttaggttcaccctttatctgatatggcagtgtgaaatctaatttcaccccttcgtagttttatatctttgtaaagagtagtgcttggtatttaagccgaaatcagtgtacctctctgtacgaaaaactgaaataccttgtaacgcacttccacattctcaaattcaggatgagaaaaaatagaataggttatgcaatcattatctacagcctacttgctgctaggtcatcaaaaatactttctttggtttggatcgaatagtcacactatgggttatcttggtgtgttatgacaattttgttcactcatgttacctagtattcagtgacaatttcttctaggtgacaattttaaaccaaaaggcatgacaccccagacccaacttttattaaaaagagccagcaaagttcttagcattttacagcgcgcatacaaaacacttcacctcacatgatcactacacaaacatctctggctgcataatataggggatctaaagttttgtctgcccttttacaggaatgctgagacaatttcctagtgaaattgtgagattgaaggtgccattttcaataaaaccatggacaagctctgaagataatattggaaaccttttgatggtactttcttgttatgaattttcttctattcaaagtgcattatatgctagaagcctatagagttgttgtaagttgtaaaaattgctgctgtttaatgatatccacaggtgtggaagttcttcattacctttgcggatgttcttgggattccgtcattcacgcttgatgagtttgtgcagtctcttcatgattatgtaagttaattgcccattccatcatgctaaaagtgaatcctggtatggtgcaaacacaaatgtgtgagttgatggcatggtgttgcttctctgttttatcctagtaatatgaataagaaccacaacatgacatggatgttttgacatttgtactgtacatgatattctgtgctctctgagtttgtatatccaactcatcgataccaaaatatgctaactggcatttgactcttggtacattattatagtacgagcatttaacttttggtacatgtatgattcattctcacatctaatattttttagctgcttgttctatgtgagtatgactattgatattcatgctataggattcaaggttgttgggagaattgcatgttgctctgctgaaatccataataaaagatattgaggatgttgcccggactccttcagttgcttcagggatgactgctaatcctggaggtggtcatccacaaattgttgaaggggtgtgtgtgcagatctttgctataacatagagcttctattcaaattgagtaaattctgtgctatttatattttctaaaacattcctgatctcttattgctaggcatacgattggggcttcaacatacttgcctggcagcgacacttgaatttgcttacatggcctgaaatattgcgccagtttggtttatctgctggtcttggaccacagttaaggaaaaggaatgctgaaaatgtcaataatcatgatgataatgaggtatttgtctgttgaaagtgtccaatgcatatgcatttaaattagtttattcctgatagctgcatcataatcatgtgcaatctgtgtagttctgttggaggcaataacttgcacgattgtagattgtattgttgtatcaatatctctggtattttggttcctgagcaattttcgattcagagaaaacgcctactgtttagtcttatagttggctccatagaatcctgaggtacaatggtatttatgcttttgatggaaaattcaaacatagaagctatcagtaccgcgatcctatgatcttgctaggctattttgatcttggtccttccaggattgtagttaggaattacaatataaaataacagcataatcctaaatatttggaatcatagttctcgaggcattggtaggatcatggtcctacgaacaagggattatcctatcttaaatactgaatgtggtccttgaatgaaagtataattggagaaacttttgtaatctgaagcaaaaaagcagattagccacttcacagttttattctctttatggcaagaaataaaattctctcaaccctaacagccctgaacaactcaaaatttgcaaacagggtcgtaatggtgaggatgttatttccatactgagaagtggctcagcagctgtaaatgctgctgctaaaatgaaagaaagaggctacggtaatcgccgcaggtctcgacaccgtctgacacctggaactgtaaagtttgctgcgttccatgtgttgtcacttgaagggagccaaggtctcacgatattggaagttgcagaaaaaatacaggtatgccgaccacatccaaaaaagttcaattgtaacctgttgctatcttattgattttgtttattgatctcttcagaaatctggactgagagaccttacaacaagcaagacacctgaggcatctatatctgctgcactgtcaagggattcaaagcttttcgaaaggactgcaccttcaacatactgtgttaaaactccatacagaaaagatcctgctgattcagaggctgtgttggcagcagcacgtgaaaaaataagggtgtttcagaacactatttctgagtgtgaagaagtggagaaggatgtggatgatgctgagagggatgaagattctgagtgtgatgatgctgacgatgatcctgatggtgatgaagtgaatattgaggaaaaagatgtcaagacttccctggttaaggcacaagatggt

SEQ ID NO: 14271 - DNA, 705 bp, Oryza sativa
gactcccattctcgcgactgctgcgctagcgcgtcctggatgccatgatccagctcttccttggcacgccggagttgcctgacgcattccttgagggcgccgtcgaggtgaacgattctgtcttccagtgttgagttcttggcagttgcagcgttcagctgggtcttcagtgatgctatctctttctcggccttctcccatcctagtaggagaattgcaggtttttgttatgaagatctggcttgtcagttgtcagttctatttatgcatgtgtagaaataacactgtttctaggatcagattaaaaaaagaactctttctaggggattaagcttttgcttcaaatcattagtacattattcgtgaaaaaaatattagtacataaaacttaaggattaggttgagaggaccttagaataagaatgttctttttctaagtcagggaattgataaaactacaaatgagcttttggaccacatgatcagtacaaaaaattaaaagcaagagacaaggaacatatctgcatatgatatgcagtatatccaggtccaaacagagtcatttcttaaattttttggcccagcgaaaaacaataatttgtttgaatttttgcttcatgtactgaacctgtacgattcagtcatgtttaacatcatacttagaacagcttcctccgcaacttatgaatgctgcggggtgcagga

SEQ ID NO: 14272 - DNA, 677 bp, Oryza sativa
ctctcctcctggattttcagttccaagatgctaacttgcttcggcagagatgcaatttcctctcgtgccgactccaactcatgctctgtacccttcttcttctcttccagagcttcgattccatggcacctcactgcgagccgggttgaaaacgccttctcctcctccagcttcttctctagaagagtgatcttatcaccgagatttttggcttcagattgtgatgcttccaggtgaccacgcagctctctcctctctgcctctagtgcatccatctgctgatacttagcagccagctccagcgtcagcgccttttcggactcgagacgttcctccagaatgcggcccttgtcgagcaagctcgtgatctcgccatgggcgagctcaattctcccctccagttcattcctcctgttctccatggcttccatttcggtttccatggaatgtttcactcccttgacaaggttcagttgcctctgcaattcgaccgatttctcctctgccaccatcgcccgatgccgggtgttcctgagctctcgctgagcttcgtgcagcgccttctccctgtccgccttctccattgccagcctcttgatcttctcctcgagcttcaccagctggacgctagcggcgtcctcggcctcgctcttggatgggctattcgccgacgcgat

SEQ ID NO: 14273 - DNA, 686 bp, Oryza sativa
  unsure (1)..(686): unsure at all n locations
ccccgtggnttgtagatcctctgatatacactnnnnnnnnnnnnnnnnnnnnnnnnnnnnnnnnntgcaagcgtacccttaatgttctaacagtaccagcaccctctaatgcgcttgtcatagcttacagcttataaacacgtacttagatggttccagcggcgacaaatgccgctgacagttaaagttgcagaggcaacaaatgcagacgagcagctaggtactatgtcacatgataagtgctccaacgcctacatctaagataaaaatatcagaatcatcagtccctccatctccctgatactcggccaccatctggagatccacagcaaaatctggaacaacggcaaaacaatgatcataacatttctaggtaaaactgtcacaggtgaggattttatgcctttggagtatcactaacatgtggttggaagcaatcctagtgttacttcacctccagataattttgcaaatccagctcataaatcagatcatcatatccatatctttgtgctaaaaactctttgattcctttcgatctaaatttcacacacgaccagaacaaaaatttcactggatgattgcacaccagtttgcattcccctgcactacgagattttttttttttttttgcagtgtgtatgcatttggcggccgtgggaagtagtctcggcccgggaggcacc

SEQ ID NO: 14274 - DNA, 683 bp, Oryza sativa
  unsure (1)..(683): unsure at all n locations
cccgtgnaactgtagatcctctnnnnnnnnnnnnnnnnnnnnnnnnnnnnnnnnnnnnnnnnnnnnnnnnnnnnnnnnnntagcatttgacgcagatgtatgtaaaactttgcattagattgctgatagtacaaagagaataatttcttgccaagtgtcgactgactccaaagtgctggcgaaaagaagattgattgagctaccaccgtcaatgagaactcgcgctaccttgaagttccgaatagtaggttcgaccacgatcggatattgtcctgggataacggcggtcttggggtggtcttcttccgagaactctatcttctgctcagaccacttcatcttgggtgcagccccttgccatgtcgagcagacttcacgttccactttcttatattctcgctttgaggagtacgttgtggaaccgccgaagatgtgtgagacgtggaggtcggagtctggatacgctgagtccggttcgtgaggagccgtctcttcgttcatctcgacaacgcgtactcgcttgcctttttcaaatgccatgtgcttctcgagcgactttttgaaaacaaggcaatctttcagagaatgtctatccggcttgtgtatgaggcaccatgatttctttgtgtcgctgctttgggggtctagacgtttgggaaggttcgcgtattctgctgcgagga

SEQ ID NO: 14275 - DNA, 9645 bp, Oryza sativa
cgaggcgctggcgttcgccaacgcggcggggctcgacgcgccgctgttcctcgacgcggtgtccaagggcgcggcgggttcgcgcgtcatggacatcttcggcgagcgcatgctgcgccgtgagttcgcgtccggtggctccgtgaagtacatcatcaaggaccttggcatggcgctggagaccgaggaggggccggagggggccaaggcgctgccaggggcggcgatgttccggcagatgttctccgcgatggcggcgaacggcgacggcgacctgagcctccagggattgatcaccgtagtcgaacgcctgaacggcattcgcaagtaaggaaggtgttcgtcagaatgccgcactgggaacgaaacgcttctgtatgttagacttaatcttgttgtttattgtgtgagttgtgattagtgcgtgcatgagttagcttgatcaagaaaatccatgatctgcatgtaagtgcttgcatgtaggaagttatatgtggatatcggctgggagtagtggccgagtcaagtagctggagtagtggcatggattgtggatcagttagctgtgttgcatgtgtgttagtgcatttgcatgcaaagagatatggccttcatgcatagagacgtgattagtggttaattagtggctaagtcatgtgagtggtggccggttagtgcggcaaaaacgtggctagtgtgctgctgcgcgtgtgtgctatttaagcatgtaatcagtgtgtgattaatgtgtggagaatagaaagtgaagtgtgtggtggttcactggtgtgcagtgacaagaaatttccttgcgtctctttgtttcattgcgtgctgttcatcttcttcctctgtcattgcctcctctgtatgtgtgtgtttcatcgagtgaaagagagagagagagagagagctgtgcgtgtgcaagtgagtgtttgggctaacactgtattcttatttcttaataaaacttgatgattgttctgtattcttatttctgaacaaaattcgatgcccatctctctgtaacagcatgaacttcaagggttcactcagctgattgaaagtgttattttactcatgcttgctgatgtaacctcagttatccgagctaagtgtgttataatctgatggattaacatatggagtacttggtcactaaccttatctcctgacagaaactctctgcacaaaaatatctccaagagaggtgcatactagagaagcaccttaactaagctcagaattgtgccaaactgccaatgctacactaatctgacagatgaggaccagtttgcaaaggctgagaactgagaggggctttgctgatgagctgctgctatagagaggatttttcaggtgtcagatatttgcacaggcgaagataacatatgtacggtcttttcttgtgtagtgcaatcttatctctttccctccaagaaacacttcagcagaggagcaacaatggcggcggcagggtcgctgggacttctccaggcgccatcgtccttcacggcggcagcggcgagccggccggcttctcggcgagcaccgcgagctctgttcgccgtgagagcctcggctgccgccgatgccaccaaggacgccgtcctcaaggccttccgagagaagagagctctcaaggtatcactcttatgaatcccagttcttgttgatgccttagctctgccaatgcaatgtttaactgcattaagttctgaatgctactccatgtctgaaggctgaagtgtagatgtagctgtctctggattttgaggcctaacagtataaaaataatgttgcttagattgctggaatctgatattcattgacatctttgcactgcagatcatttcagggcttcagaatttcgacaggagtagtgttgcctctgttgtctcggctgcagataaggtgtggatattgcatttatcttgcttatttttttggtttggttctttgcatgtggataaagtgtttgtaccaattacgttctaggagtagctttgcaggcttatctgaaaaactgaaatcatgtcaacgacaaaaacaatgtattgcgtggctatcatgaaatccatccctgaatatagtaatactagtattcatttttacccagtcaacacagtaatgttgagttgcctactgatgtgctccgtagctataaataatttgggcttatgtcactcctgattttctcgacaaagaagtctacaagcaaacggcactgcagtctagtgcagacgacctgttgtttagctgataattagagtcataattttagcgcacagcatttactatgatatatcaatgaaagttcgctgcatcacccaagtatgctctttgaagtcatacaacttccacaaaatcagtaagcagccattaatttttgaactaaggcaaccaatattgccatctcattctcttctccaacagtcaaaatattttctaaatatttgcagaaatctctgtatgaagtttgttaataagttaggtaactttcaactagaacagccaaattttggagggaattacacatttgtaatgctattcagctattttatgatttcagggaggtgccacccatgttgatatagcgtgtgaccaagacttagtaaagcttgctctggagcttacttcccttccggtgagcaaagcgttcatgtagctatcctacattatccaactgtggggttagctattctaaatgcattgtgggaattgcttgttgcagatttgtgtctcctccgtagatccttcagcattccgttctgcggtagaagctggagcaaagatggtcaggctctaagttttgataagaagtatatgaatccgaaagaactaatttccagtagttccttccgctcacaagcttttctccatgcagattgagattggaaactatgattctttttatgacacaggcatcgaattctcttctgagaaggtaaattcgttctctttgattatatgagtagtcagttatgataatgcatctgtttactgcagttatacacgatttgtttctgagaagaactgctcatcatttcagatcttaaagctgaccaaggagacaagggaaatgcttccagatataacactgtccgtaacagttccacatacactgagcctcctagatcaggtataccacttgtcatctcttcaacaatactctgaaatggtaaataaccaattgtttaatctggaaacgtttatgcataattacaggtaagacttgcagagctactcgaagaggaaggcgctgatatcatccaaactgaaggagggaagtgttctagtccaacaaagcctggagtgcttggattaattgaaaaggtatggcaaaaattacagaaaaagaaagacctcacaatcaaatttagtatacaatgtaaactcataaatactgtttaacaaattcaggcaacaccaactttggccgctgcatactccatctctcgggctgtcacaattccagtgatgtgtgcatctgggctaagctcagtgactgcaccaatggcagtaactgcaggagctgccggtgtggtatgtatccgtctctgaaactctgcagaatggttgagtaatcttcaggcatcacgaactttgtagcccaataatctatagcttactagttcatgtgttatttcatgtttcaaacatttgattatagttggcttttcttgtgattgcagggagttggttctgctgtcaacaaacttaacgacatcgtcgcaatggtcgctgaggtgaaaagtattgctgaagcattgggtttgccttcacggaacgtgtctagcaacttgagaacagttcaccattaggggctagttacctcctcttctagacaaactctagcgatcaataatattatcaaaagatgcagtagcttgacatttcacagtctactgcctttcgtaacatatatgcaaagcaatgcagaggtgccaattggcgttttcgacggttgtaatgtagctttggccagtggcgttgttgaactgagatcaagtttcagctgcaatcaattgtcagattgtcacatctttcccatgcaatttttttgcatcatgtccgtgtaaattgtcagatattccccttgcaatcttgtatatcaatgcctatgtaaatgcatgtggtgggtaaatccacattacttcacacgatatgcaacttaagcagaagctattttagaataagacatagaagagaaaatcaagatcgaaatacaacagggactccgtggcccaatggataaggagctggtctacggaaccagagattctgggttggatccccagcggagtcgaatcattccctgttttttactgcaactttccctgttttaactgttcatgtctatcaggtcaatttcttatctactttgatcctaaatttttttttgcccatgggttaggatcccagttggtgtaacattgcttatcagccgtcatcgcaggaaacaaccaaccatagcccagaggatatgggctacagtcaatagaactaaataccatgtccctggcgacatttggaacctatatactgctagtagctgacaatagcattcccatgaccaatttttcgaggtatagtttagacctctcactttgtcattcagaactagattatggactcgactgtcagctagacaagtctcggaggcttgtatgctagcatctttcagcaacaccgagccaccaaaagatgcagtttattcaggaaagcagaaatactggagtagtacatgattacacgcgcgagcgcaacaacatctcgtgcccaagaatcctgcaggctatcgacgcttgttgccggtggcgatctcccaagcttgcaggatgtggttcacaatttcctccacgccgactccatgtttcacctggaagcagtgtaaaataagcatgtgtaaatatggagctatgtcccttgcaattatcatcagcttctgttaattttcccccgctaaaaaaggaacaaatgtgtatggtttaatactgaacctgtgcaaagacaaaaggccctccttcccgcatgcgaagcgcatctcgttccattacagccaggtcagctccaactgctggtgcaaggtctgtcttgtttattatctgtgttcagaaagattgaaattgatcaaatggtaaatgcaaaagggtacaagcatatcagaaatatcaacgtctttgatacaggtatgcatcgtaacagaatggagaaagtaataacacaccaaaagatctgcttgggttatcccagggccaccttttcttggtattttgtccccaccagaaacatcgatgatgtagattatgtagtctgccagttccctgctgaagttggcagccaagttatctgcacaagtgtcagtatttcttttagcacttcattttggatttagcataacaatgccttccaaaataaacagataatacagttctgtctgtagcaggatgccaggatggtttgcaaaagcatacatgataaaaagaatagagaagtgcttccaatgttgggattcagagagttaaatacctcctccagattcacagaggagtaaatcagctttgcacaagtttgatagttcttccagaggacctagatttatgctgatgtcctcacgtattgcagcgtgagggcagcctccagtttcgactgcacggatgcgctcttcaggcagtgctccatgtttgatcaagaattctccatcctcttttgtgaatatatcatttgtaacctgcaagagcaaagagcaaagagacaaaagtccaagcatgagttcaagaaaacatggttgagactactaggttgatatgttaaaaaagaacagtatcacaagaatgatagatccttgtctttcgatatcagcccgctggaaagcgttgaatgataccaacaaacttttttgttgaattattggaagcgtgttgtacaagaatttactttacgaattaccatttacaaataagcaagaggcgaatcaagaaaagttccattcttgattgaatacaatcaaatgataagatggtgcttgcaaaagatctgaaacccaacaagcatgtagtgataaggaagagtaaaagaatcttgccacataccgctgcgagactatatttttcacgcagggacctgcaaagtgctagcatcagggcagttttcctgtacagcagaaaaaacatttttagggatcaaatatcacttatgctaatttcgcaagttacaacacacacacaagcaatgctttatggttgttatacttgttttatcaatagaagggaacatgcaaaattgcaaacgcttttgctccaaactaaccaggatcaactcacagaacaaatcctaggaagcttatgctaccgacttactgttctattatagatttgtagaaacacaattctgaaagcaagaatagaaaaactgattttgatgtacaagagaggtgcctttttagcaagaaaaggtatgatgtacaagaaggtgcctttttagcaagcaagtttacaagaataccgaaaactacaacccagattaccacaccaataatcactatttttcttctggcactgtggcacaacgattacattccgacattcgcaaacacattttgtcaaaagcaattgaagcaactaaatctgcgtgaagaagtaaacttatttatcgccaaagatatgcatacacctaaatctctccaaagtccaaactagatcaatcaagccctgtgcgctgaaattctcagtttctcaccaatcctacccatgggaaagatgcacaatttcagagaataatgcaaagcaggcgccttcctccacctaccatcacaactcacaaccatcaccaaacaggaaagccacgccactgtttgatgatagtacactacactacggggaaagcagagtcgacctgcaggaatgcaagcgaacggccgaacctacccagtgccgacggggccaccgatgccgacggtgaaggcgcgttccgcgaagcgccgcgagatgagcggcggcgcgcgcttggagaaagacgcccgggggagtaagatggggctcgtgggaaagcggcgcgagggccgccgtgcgagtgccacacgcgccccgttcttcccgacccacgagccgccgcccccgccatggctgccgtccctgcaagcgccgagtcaaacaggcagcagggagcgagatcatcagtacaaaccaccagccgaaaaggggggcagatgcccggctgcacgcactggtggtgggaatggtggtggtcgccgtcgtcgtgcctgtggtggtggtggtggtcgtggtcgtggtcgtgagacgccatggattccgaccttgaattgcggcggattcctccgggatgcgggaggttagggatgacgaagccgatagattctctcaacatgttgacctcggctcgttgacctggcccatatttggttgggccttaacgggctttccattttgtgaggcccaataacggaataaggatcacgtgcgggccaaattggttgggccttaacgggctttccattttgcgaggtccaataacggaattggacttacgtgcgggccatattggttgggccggaatgggatttcgatttcgtgcggcccaataacggggttgggcctcacctaggtgtttcttccccaactccggcccgcggaatcctctcctacattggcgccgccgagaattcttcgccgccgacgtgacgccatccgcgcgacggcagaagccacggcggtggttggccgcggcggcgcttttctcaaccgtgaaaagacgcatgtgatcgagcaaggcaaatgtatctgagagcttcttgtactgtacagatgtgagctcctcaacacaagctctctctctctctctctctcaaatcaaagcatttggcgcaaatccgccattgattctgtatcaatttctactgtaatttcactacggcaccacggcgacctccttgtgatcattggcagggtacacgtgctcctccgactgctcgtcgtcgtcgtcgtcgtcgtctccaagtgcggcggcttcttgctgctgctgctgccgcacgacgtggttccacctgtcctggaagaggtagacgaacgccatggccgacacctccacggtgaggagcaccgtccacggcctcacgctcctcccggtcctctcatggtaggtgtgcatgccgatgtagacgttggcgacgcccaccacgcagatcgcgatgccaagaagccagtgggtcaagtaccagatgctcctgaacctcacacctctgaagaaatgaacagcatgttcagacatcaagcttcagagatttagacaaatcaatccattgtataaatggatttcagagatgtgttcttctacctgtctggtctcaagaatccgatgagtggttgaagccaaatgaaaccatacagtgccaatcctattctctggtgtgtgttgttgaaggcgttctcgaagttgcttatcgacagcactgctccggcagttgcaagaatgacagcaacaatctgcaggcatgtgtccaacgcacagttaatttgcacctgatgcatttgtgagaaattaatcaagcaaacgaggatagcgagctaaggttacagacctgtgaagcaacatggcagtagaaaagaatcctgatgctcctggtgcttttcacattgcttgtgactctgattagcagtactcctattggcatcaagaaaccaaccgaagaccagagcaggaaggcatggagcttgagttgaagggagagtttgggtgtgagctgcaagaatagttgatgtgctgcagttagtgattcatcatctactaccagatattcagattgtagtgcagttaaatggaactagaaaattcctcaaaattacatgagaaggaacaattacctccaaaggctggacaatcttgtaactctgatttaaactatcagggctgcttgaagcacactgagttggagtgagaagcgaaagaatcgtacaacaacttcccaacacagcgagaagtctttttcttccaaacagtagcattgatgctagtcaatttagtctcctctcaacagaaaacaacgcaaaggaaagatcaagcagcagaggtgaacctcttcgacaggaaaagagccaactgaaacagcaaatgatggtcctaagctaccaaagacaggagaagaacagctaaaatttcttcatctctctcactatcatctcatgctggtatggaagtcatcccttccttcaaaggtctacctcaccttaaatactggcattacaagcgtattaaagaaatctatcttcactaaagaatgaacaaaaagaacaggaaaaaccaatgccttctaagttctaactctctgcacaatgtggatgtgttccaggataacttctaggcgaacgggaagaatctgccaagcaaattaaagaataagagttgtcatgggggaataacttgagaggggtgtcctatgaatgatttggatatgagcagctgctttctctgcttagcaataatatactatggtggacttttgtgctgttgggggatggaatggaatggaatgagatgggctcttttgatcacattcagcattgcttttacagctctatggtatgatggtataaaggaaggctttttgtggtggtgcagcaggaagca

SEQ ID NO: 14276 - DNA, 890 bp, Oryza sativa
aaacaaggggctatgccccctctgtcgtaggacaaacgaatcggcaagccacctattcgcccactgtagatacacctgaagaatttgaagcctaatcgtctcctgggtggcataccaacagctgtacccgagccactgggaacaagccatagcgtacgaaaaccagtggaaaatgctgccaacgaaaaaggaagtacccaaaaaaggacttcataccataatcctgttggtcgtttggtgatctggaaggaaaaagaccaacaagttttcaagcacaagaagaccacagctcctagcctcctggcgaaaataaaggaggaagcgagaacatgggctttggcgggagcaaagtggcttcaagtgtttctaccaaatactacatagcctctgtatagctcggtacagcttcctcattgacggagcgtggggctcctcaccgggagaccgcgcaggcccccctttgccggttcggccggggacgctgagtgaggttcttcgccctcgatctgaggaaagtcagcgggagaggaagtgcacaagacacgggtgacgtagacagattcgggccgctgagaagcgtaacaccctactcctgtgttctggtggatctgtgcgtgaaggaatacagagaaccggagagcgagagtgagttcaggctctcgcccctcttccccagagtcccaaccccctttctcctaggcctgggcctcctttttatctggtcaggggtcaccacatgggcctctagttgcctaagaagggaaacatgctttttacaatgagggctagtctacagccggaaatgacctctgacaagcagagcacacgcctcctgccccgctcgcccgctttcccggtgacgcacatttcaaccttcatttaatggccag

SEQ ID NO: 14277 - DNA, 9497 bp, Oryza sativa
cagaagaagttcatgtcctttgccactgaggttgagaaggatgctgacaacataagtgactgtgagaggttgtacaaggcctttttacaggaaattaatgcttttgtgttgcctcttcttaagagcaaggccgtggttgatgcaaaccttagggagaaggagagcttcaacgagctgcaagacgagattcagcgacaaatcttgcaagctcagactgatattgaggaactcaaaaagaaactggaacagagcagaattgagaggctgtacaaagaggagtgcgaagcgatcagaaaaatgatttctttgcagcctccacgatcggaaacagagaagctcatcgcgggtcttgagaaggagattgctaatttggaggccgagaatacagcatgtataaggactctggaactaaggaagaagcagctttctcttcttcttcatgtggtgagtttattcgtcaggttccttttgcttttctgaatcatgccttttccctttctatatagagtggtaagaggatactcattggaatttattaatctgcatggtaagcttaaatgatatactacttttacaaacattgtttcccgcaagaccgcaacacaaaactacgtttaggaaaaatatgactgtttctgatttttatcaaattataactattagcatccatttgtctaagaaggaacttggaagactatatgtagctattttaatcatgccatgcagttcattgttttggctgatgcctattgatttctgatgttgtatctattacaggtcgaggaattgcagatctcaatcgaagatgagcagaggagcatagcggatgagctgagagctggcgctgaagagcagcagaacatgagcacagatgaaggtagcggcgatgcttcagatgccatggctttagactgatcctagcagaaaagcgcgatgcctgcctagttccacaaaggcagatacgttttcttgtggctatatagcacttaattgccttggttagacttgtaggttgcttaattacaccctgacacatgatgactctcgtgtagttttttttttagagagaaggccagagtctctcgtgtagtttcagttgtaatttcagtcctaagttgtaatcgtgtgccctttgtctgaaggaacagaacatcatggtgtgacatatactcctccagattattccaacatgtatggttgttattatttgctaaacaagcccctaactgaatgctaatcgacgcactgtcgacgtggaaaccaaattctagtccgagtccagctctgcccttgttgcggctaataaaagggctgaagttacggccggtgagcgatcgatcaggtaattttaatttacctttggttgttggctgcgttaggtttttaacccaaggagcaagaagctaggtacatagagacgatgaagtacgtggtggtgatgggaggcgtgatcagcggcctcggcaagggggtgacggcgagcagcattggcgtcgtcctcaaggcgtgcggcctccgcgttacgtccattaagatcggtacgtactggagtactcctagcaaccaacgtgctgctaattcctccttttctctttttcctatatatgtttgtgtatgttttagtttactactgtactaacctccatccctaaattaataactgtaattctaacgtataccttttttgtctcaaaatataacagaggtagtatgtttatttgaatcctagaagtgcatgcacttgttaggtcaagtttgacacattatacaacgaattgttacataggattataaaattgattgtagggataaattaaatattccttaaaataaatttaacaaatagcttagagtaagtagactaattaatgcaggtgaagaatcttttcagaaaacgtatttttagagaagtagctgaaaagaacaaggccttaagtccgacctaaagtcacctcttttctttgtagatttaccgattgctgtttccttctgcttatcgatctgttttagaggattttctagaaaaagaacacttcatatcagcgaggcgtattgccttgtagaataatcatgccaacttttatttaatcaggcgtttgatggattgaggtaagacgtacttgttgtaactgtatcgctcaaatgtgcagatccttactttaacgctgatgctggaactatatctcctcatgaacacggcgaagtgtttgtattagatgatggtggtgaggtattggataaattgatgttcacgtcgatgcatccataataggagtcatttttgttcaattgatgtatatattatcttgcacttgttgcaggtggacttggatcttggaaactatgagaggtttctcgacattaaactaactcgagaccatagcataaccgccggaaagatccatcatgtatgtataaacttttgaataatagagtgaacacatcatttcattcactcccaaacattgatttactgcctagaacccacatgcatgtctaagctatggccaataaattgttggccacatttacacttaaaaaataacgccttaggcagagtttgaaaaataaatggatgttatttttttttagaaaatgggtaaaacccaacctctacatccaaacagatgtacatagccaaatgttatgtatgttagattatgatatactcccactatttaactaaacaaaaatcaatattgtaatatgtaagtacttagaataacataatgaaagctatgagctttcgcaaacaaatgaataaataaataaataagtctcattttttaagcaatatgctagctcttgatttgtttacttaaagccatgttcttgtggtggttgacgacagtatgtttacgaaaaagagagaaggggagactacttgggtcagactgttcaggtgccaaccacttctcctcaattcttcttaatttgtttttcaatttttggtaaatttaatatctacatttcttgaaaatccaaccaatcatcatttttttaaggttatcccacatattacaaatgagatacaagattggattgagcgtatcgcgatggttcccgttgatggtgaggtggatcctgccgatgtctatataatagagctcggtggcactataggtaacaagagacaattaaccagctgcattttattcttaacaaattcttagagttacataaatttttggacttacaagtcaatttaaaagctatatatcatgtctttattttcagtttattaacagtatttgttcgacactatgctgcaggcgatattgaatccacgcaatttattgaagcctttagtcaattctcctatcgtgttggtaaataaattgaattattgcataacagatattttaattttctccatggtgatatgataaccttatttgcatgttatttttggacaggtgctggtaatttatgtgtggtgcacgttggtcttgttccagttttgaacgttgtgggtgagcaggtcagaaaaatcatgtctattaattaaccacagctttgctatttgctaattgtcgtcttcgtcttgaaaataatatcctacatcttttggtttatgttcttgtgtagaaaactaagcccactcaaaacagtatacgtaagtagagaatatggtctcacgccaaatattatagcttgccgctgtaccaaggtttgtattatgaacccagtaaccttcatcttgcggttcatttttagttttggaagttgtggtagtcttttatttattaactaagagcgtgtttatttattaataggaactggagaaaaatgtgaaagaaaaactctctctcttctgccatgtgccggtaatgaaattttcttggcttttagttaatgattattttcagcaactaattgctctagttgctaatgaactcttgtggtcatcgcaggtagctaacatttttactctgtatgatgtttcaaacatctggcgtgttcctctgttattgcgggtaaacagctttcttatacaccagacgaaaattttcacccttgcactgtgctgaatatcttcctccatcgttttaggaccaaaaggcagatcaagctattcttaaagttttgaatcttgaaaggtaaaatttccatgtgtcatatatatatgtaagttgaaggtgtcatgctgctatacgcaatcctaaattctcctttatctcatttgcagcgttgccgaagagcctaacttggaggaatggatggcaagggctgatctatatgacactttacatgaaacagtcagcctctttttcatccttttttaaataacggatttttcataaatccggtctttatatttacgaaagatatacacatccaatattttttatcctcgtgatggaaacgaaagggatatttgagattacattaaaaaaggaaaaatatatacgttctattgtttttcttactaacactgatgtgtcatggtgtgagtacatctagatttatctaaatcaaactattgagatcattgttagtaaaagttcagtaagaaaaatttagaaagacctaagcaatctgtgtactcttttttcaggtcaggattgccatggttggaaaatataccggtgtatctgatacatacctttctgtgatgaaggtgggatgcatggatccctatggtgttttcttccttcagtccattacaaacctcatcggttttgtccaacatattttttgatttgcaattcttgtaggctcttctacatgcttgtatagcttgtggcagaaaacttcttgttgattgggttccttccaccgatcttgaggattcaactgccagtgtggtttgaaaaacttacactatgcatcatattttgctctgtagtatatatatttgtctccttacatgttttttgttaaattttaataggcacctgatgcttacagcacagcatggagtttactgagggtgagaagtttactcctgaaatatttgctacatgtagaatttttattatatatgctttatctgaaatatatttcatttcagggtgcagatggcattttagtacctggtggctttggagaaagaggtgttgaggggaaaatattggctgccaagcacgcacgcgaaaacgatgtccctttcctgggcatatgccttggcatgcagctcgccgtggtagaattcgcatgccatgttttgaaactgcctgatgcgaacagcacagagtttgatgccaaaacggagaacccatgtgtaattataatgccagaggtaattaactgtcaaaccctcagtctatatatatagatatgattgtaacatttatatccactcgtgaatataaatatcagatttctatttattgtgtaaaaacgtgtatttgcctttagttttttttttagaaaaatgtgttgcatttaggtgtatgtactggttagctataaacttaatttaggccattagttacttgtttccttaaataagtaacttaatttacttgcatttccttcagtgctccaacgaaggaaagggtggtaccatgcggcgtggatcaaagaggacatttttcaaggttgcaaatagcaagtctgccaagctgtgagtgatcatgaacacttacccttactgtaattgcattgtttctgttttaattttctgtgttaattacgttgcaatcactcagatatggtagcgtcaaccacatagatgagaggtttcggcacagataccaggtttgttgttcaatatctttagtgtagttcatcataatgttactcatggtgttttaattgcttttttaccttttttttaaaaaaagaactgtgatattgactaacttcccaggtaaatcccaatgtggtgcaattatttgagaacaatgggcttcaggttgtaggcacagacaagaccggagaaattgtgcaggtacaagctgaagaacccagcttgcttgaacaaatttcaacttttcacttttccattattcatgcatgctgatgttattgtttgtccaattttctagatcgtcgaaatacccaatcatcgatttttcgttggcgttcaatttcaccccgagtttatgtcgagaccttcgaaaccttccgcactttttgtcggtaagctacttaaacctctgtaaacgacccaagggaagttgatatatatctttcttttgaaaaaaaaaaaagttagcgatgtaatatcaacataccgctttctcgagtaccgtcaaaatttctctttgacaatctgatcaacatgtataccgacctgcaggactaatcgctgcatcgtgtgggcaactggatggtgtgctgcaagatgcggcttgtaaccatgagccacagcagaatcagcgtgcagagaagcgtcctgctgctagtgatctaggagattgaacctgccgcagcaagcggcaagtgacggcgtgctctgattcaaatgaccctgatgaagcaccggatgtcaaaagctgttaattgtagttgccgtttcttgatatcattgttagtaagaattttgtaaaaagaaaaaaaataagtatgtgtagcagtgttcttataatggaaatgggggagaataatcctctcttttttaaaaaaaaaggaaaaaaaaagtaaaggtgtgcaacacatgaatacatgatgcattgcatcgtcaccagtagttcttcatgtcgagatacggactaggggtttttttgtccgaccttttctccgctcttcacaaaaaatctggtttttttgggaggtccgtggatgtttagaaaaaaaaaagtaagctcttctaggttaatcagcatatctactggaattcaagctaatgcaaccatcggattcttcaataaatatgtgtgctaaataggaactgttttacatttgctagcatcggaaggctacatgttactgctataattgacaataacgatcgcaacagactttgcagacaaaatgaagtcgctgtgataaccttatggtcctcactaatcctttgttcagtattttcaccgttatctggtcaggctcaataaagtcatccagaagttcagtttcatcagcaccgccactgttactagatcagaagttaatttttatagttgaaaccagtgcatcccttaataagatactcttactgtgtatttagtcatgaagacaatgaggaacaagcaatttgtttaattgtttgttgaaatcatcagtttgtcagattgagacacatactacaagttattcattggccgtcaagtgctttaattggaagtaaatttcaaactctttgggagatttctttggaactggatcggctgaaggacctgtggaggcgataccgaggcactgaggcagtgctggcccttggcgtagccctcccaatccatggcggcctccccctggcccctgggtaggttttaggcgcctggtggtggtggatcggtgccggtgggggatttgccgggtcggcgaaagaatgccgaccaaatttcattaagattgagagtaaaatacatgtattccgatattaaactgtcgagtcaaggcaaaagccttgaaacaaagtgagaaaaagaaaaggggaaaactatgccggtggggggattcagcgagttgaatgcggacaaggcggtttaataaccggaatcagggtacggttatgtatgggttatcccgatcaatcgtattcgtgtccaattccaaatggacaatgcgtgcctacttaaattaagtaaggcgcgtttaataaccaattaagacaaggggatatactacaggacatacagatcaatcatggcggcagtcttctgcggggacatgatcccggtaaagttgtggtgggagatcctgctcagggcaccaaccaaagacgtcgcccggtcaagctgcgtgtcaacgcagtggcgcggcatcgtcagcgacccctcctttcggaagctccaccatgacaggcatgccgtgcccaacctcaacgacggcatctccgacactttgctcgtcgccacgtctgacgtcgacggtgaaagcgtctccagcgtcttcccggctgcactggtctctccggcggtgacgggccaggcgcccatctgccgggtcaacaacccatacggctacagcctcaccaacgtctgcaatggattcctctgcttcgcctcctggagcagagccaaggtcatcgtgtgcaaccccgtcaccggcgagaagctggcgctccccagggctcctcaccttggactcgagaagcgtcgacgttactcgcggccggtcacgttcgccttggggttcagcccgaccaccggtgcgtacaagctgttccgctttgccgaccgcaggatggacgtgtacacgcttgccgctgctggcggttggcgccaacacccgtttcctcacccgtaccgcgtggtacaaaatacgccaactattgttgtaggtggtaagatatgcatgctgacagccaacccggcgtcgcatcagcacccaaacgatgttggcaaacccggtccggtgatggttgtcgatgtcgcaagcgaggagtaccgcacgtacaacccagcggactatgggtgcctgtgggccgacatggcagtgagcggctttgagctgcacggacggctatgcctggccatcaggtctgatacggaaatccatttctggaaaatgcctgttgaagaaatatccatgcgtgcttggctcgatggtgatacccacacgttgtgctacggagtggacaataagttgtactccaggtatgtcggcacaaccatgacgatgacaacatcgctggcggcacggtgtctttctccgaccgaggttatgtcatgggactgcaaaatccgtctccctacgactccaccgtggttagtgtcgtgcaactggaacatctacacgggataccgccccagcctgctctcgcctctcacctttgcgtcccagcaagataacaacgacgatgatgaagatgaaggcgacgagtcccgtccattcgtccgcagattgttgtgtgcactacgacaccagaaatcgcagaaacgccgcatgtctccaacatcaaccgatcataccaacggcaagagagtttgctatagaaatccatgcatatgctaatgtaaatatgtaattccccgatcctcgttgacaatattcacatagaaattgtattttaagcagtacaaacaatacataaacttatttatgtggtggattcaatcaatcctttccggcccaaaaaatatggcccacgtagaccacatccccttttaggcggcccatcgagctagcggccagaccgtacttgtaccgtctatttgaatttttttcatttttaaatttttttcttttaatatttacagaaataatctatggcgcaaaaaattacaaaaataaacagtagagggcggcaagctgacgtggcagacggcggctgccgccatctgcaaaaattacatttagccccttgccgccctctgtaagggttgcaaggggctaaatgcaattttcgtagcgctaaagagcatttggctggtacttttgcatctggg

SEQ ID NO: 14278 - DNA, 2202 bp, Oryza sativa
cagtatactgaactaatccttttccttttcaatctactgaacggaacatgatcagaacagtgtacatgaaacagattcggctatagattaaagagaaaaaaaaccaacatgcataatcagtattcaccggcctatgaagtttacagcaagtagcaagctaaaggctactggattgttcaatctaaaaataaaccaagagaataagttctcttacgaaagagggaaaataaagcgataaagtccaacatgcagaaacgaacacattcacaaaatgagcagcgaggatgtgagtgtgatgtgacgatccaccactcgattcgctaccaaggattgaaaacattggaaaaatcgagtgcgtgcgatgaattcaggcaacggcatatattccgaagcttagctatacatggccaactactcaagaatctcccttcagttgttgcaatcctgcagatacactaccgcctgtgacgttactgaattactgcaacctgttaatctgaagactctgaagtgctactatactataaatttgctgtctgaaattgttaatctgaagcaaagctggatgcgatgtctttctctgttccccagtatatatcaatacggagtactactactttgtgcgccgtcagagattgcaataagctgctttgtttggccgccaattatgcggccaaatgttccgatacgcgtgtgccacacaccctgcatgcgcgcgggatcttcgcattggcgcgccgaaaagcttcgtgattctctatctgattgtcaattagcgctacctgtcctaatctctttcgtgcctaatttcagcctgcactaacactgaaccagattgatttcttcaggccagatatgcatatggttctcttgttaacggctatttgcattagattgtctattctgatttttttcatgattagtaccatgctggtgtagtttttttgtcttcatcttcttatttaaattggtggttcttgtcttcttgatatgtgcgtctaaatgcgacatgaattctttacggagtatatactaagtatatatatgttacagcgactagtgtgctattttaattgtgaattgaatcggtcctatcctaatccttttttaatgcaatctgaacaagtctaagaggtcaattacctggaacatctgtctcgattttggaatttggattactgaacattgaaagaacaaaaaataataattctggagcaacgggtggatgcagctgtttatgctttaaaactgaaggatcatgcaagttcttttctactagatctaccacccaaccactctgctctcccgaactttcttccaacggcacggcagccagccaacgcaagcagcagtagtactgtatctgcttcttttgcacgaacaaatcaaatcagagagccacggaccagccgtttcagaaacttcggtgtcagaaacgcattgggtctgaatttcctgcgaaatttccgtgaagatttaataaccgttcgtcccaacagaaagggtttcaacggaaaattcgagtttttgacacgaaccctcacattgacgacacccacttctagctctcttgacagcgaaacaagcgaaatgaatgaacaagagatggattaattacttaccttgacgacctgaataaaaaaaagaagagcttgggcaatgggcatcgccatcgcatgaggcaaccagcagaggaaaaacgaatccgccgcgagtgcatgtgtggcgtccgctgctagtaccagtatacatctcagtgacaacgtaagccattgctgatttcgctagcagctgcatccgtcgtccatcgaacgcctggctaggccggcctgcaccagctttgcactaagggccctgttcaaatctccaacaaaaattgaataatcttttggatagaagtgacatgcttttcaaactgctaaacggtgtgtttcgtgcgaaaactttatatatgcaagttattctaaaagatcatattaatctattttttaagtttgtaataatcaaaactcaaataatcacatgttattaccatctcgttttacgtaaaatacttaatctttatctttatcttcaggagattcaaacaccatccaagcatcgtcactcctagtctactccgttccggctctgcactgttgttttcaatattttcatcggccaggcaggcaccagcgccattgcgccagccgtgcggcgcgc

SEQ ID NO: 14279 - DNA, 510 bp, Oryza sativa
agaacgctcgactcaagaaggaggtccctaggctttagggacgtccaccgccaggaggagcccgcatccgcaccacgccaaggaagtcgaccacagctccagtgcgcatccagcttgcgcctaggaacccgccgcagcctccacctctagcaccgcctgcagctccggcgccagctccagttctagctccagctccatctaccgcagcatcttcagcccccgtgctagagttcggcttcactttcgtgccagcttcggcctacaggggtctagcaggtggcagtggaggatggctgccagcttctcccagtggtggtcgtgtggtcatcagcagttccagcttggagtcaggcaccggcagcacctatcagcctgagtactccaggagccgctcagaggggccaggcgacgagcaggaggacgccttcgactccaccgaccgcaggagccgttccgagcattagtcccattatcccttagcttatcgactgcttagtagttgtctgttag

SEQ ID NO: 14280 - DNA, 657 bp, Oryza sativa
aaaacttaagattttgtttagcacctcccttgaacatggtaaatttaaaattttccataacctctggcaaacaaaatttatagtgagtaacatgttcctctgttacaaacttacaataatacaatccacactatgtttcttctggcaaaatcgcaagtataaagtataaacacgttacacgtctgctgcaagtctgcaacacatatacacatgtaaaaggtgcagcatttgtgcagtactgaagcttccacaacagtttccaggacaaagttctgcatcactttgtaaaatcaagtagtactaacgcgattaattaagtattagctaattttttttccagttaggaacccctcctcccatgcacgcaaaacgatgcttgcattaacgcgtgattaattaagtattagctatttttttctaaaaatggatcaatttgattttttaagcaactttcgtatagaaatgttttacaaaaaaacgcaccgtttagcagtttaaaaagcgtgcacgtggaaaacgaggaagaagtgttgggaaaattgggtgccgaacacattgcagttgagcatggtggccgtgtttagattcaaacttttttcttcaaactttcaacttttccgtcacatcaaatgtttggacacatgcatgaagcattaa

SEQ ID NO: 14281 - DNA, 724 bp, Oryza sativa
ccaggtgcccgccgatggcttgttcctgtccggattctcgctgctcatcaacgagtcgagcctgaccggggagagcgagcccgtcgccgtcaatgccgagaacccgttcctcctgtcggggaccaaggtgcaggatggttcttgcaagatgctcgtcacgacggtcgggatgaggacgcagtggggtaagctgatggccacgctgagcgagggcggcgacgatgagacgccgttgcaggtgaagctcaacggcgtcgccaccatcatcggcaagatcggcctcatcttcgcagtcgtcacgttcgccgtgctcaccgagggcctcttccggcgcaagatcatggacgcctcgtacctgagctggaccggagacgacgcgatggagctgctcgagttcttcgccatcgccgtcaccatcgtcgtcgtggccgtccccgaaggcctcccgctcgccgtgacgctcagcctcgcgttcgccatgaagaagatgatgaacgacaaggcgctcgtccggcacctcgccgcctgcgagaccatgggctcggcgaccaccatctgcagcgacaagaccggcacgctcacgaccaaccacatgaccgtcgtcaaggcctgcatctgcggcaagatcaaagacgtggagagcgcctcggacaccaagagcttgttctccgagctgccggagtccgccatgacgctgctctcgcagtccatcttcaacaacacc

SEQ ID NO: 14282 - DNA, 1548 bp, Oryza sativa
aaggtttcatgactgcacatattaactaattcagcaaggaattgatccttaaattcactttgtactggcccatacaccagaactaaagcccacttaaacttatcaactttattacataaatgaaacttaatgtagaaatctccctcatcaatcaaaccaatatcaacattaattaaattgatgcccaaaagcaaaccaccggacctacctctatgaggcttgcaatgccacaaaaattatttgccagcacacagatttttaagaacagccggactaaaatctttcttaatagtctctgacaaagcaataaaatcaaggtgatgttcctttgttaaatcagaaataaacttatgttttttcgggaccttaaacccatcacaattccagaacaaccctttcatttaaaaatattctttttttttctttccccttttagtctttttcttactattaggagaggtatctaaagaatataaagtggtctaagaataattatcatccacaccactaaaatccatcacctcctccattaattcaccacacaaatgttgaagtagagaattatcatccacctgatcatccaatatctcgctatcaacatttgaagtatgtacctgattaacagaagaactaacatattcacttaacatcttttcctctatactctttaaatcatttataacatcatctaatatgtctacaacgtttgctgcaaaaattcccttaacgctgataatcaaacgctacattacagacactaacagcgacgttcttagcttgtcaaaactctcaactacgagtaatattaattgcagtggcatctctggttgggattgtgaagtcaaaaaaaaataaaacaaaacgataagagaaaaaaaaacttctcctgagaaaaaaaaatccagagaattataggtgcctcactgcctctcctttttatctgctgtggattggataattggacatggagacaaaacccaaacacccccctaaataactgaagcaatcacacaccttctctgcaaaaatcccaatctaccaccgcacccaacgaacttaagacagtggaataaagcagagagagaaatcaaagcaagaaagagagagaagaagcgaggcaagagtcaagaccatctcccatggccagtggtgatcgtagtagtagtagtagtatataaaaggggagcgcgccacggcttgccaatccgccgcgctggtgtgatgctgcgatcgacgcatccgccgcccagtagcccgagcagcagcagcagcggcggcggcgggggcggggggtcgtcggcgtcgtcgagctcggagaagacgatggtgggcggcgggggaggagggggaggagggagcgggtcggcggcgccgagcggggcgaagctgctgcagatcctgaacgtgcgggtggtggggagcggcgagcgggtggtggtgctgtcgcatggcttcgggacggaccagtcggcgtggagccgcgtgctgccgtacctcacccgcgaccaccgcgtcgtgctctacgacctcgtctgcgccggcagcgtc

SEQ ID NO: 14283 - DNA, 1001 bp, Oryza sativa
aggcctgtcccagatgtttctccacataatgttgctgatgaagttccctttccttccaacaggagttctcttcatcagttcatcgtttggaggttcagttgccaatgccagtgctcctagtgtgtccatgatcatgttaacccagagcagttggacagcagtaagaggagcactccctgaatgccaagcagaagtacaaagaacagtcaagagtaagttatgaaacaaactaggaaattcttgattttccacattaataaattttatgttagtttatttttttaagttttagcacatctcttctgccactcatttgaaatctaacgaaaaatttctgctgcactaacactaaacagtatttgaacttagaaacagtaggcagcagactaggaacagtggtgaaggagaagtataaaagatgaacatgtatcagcagtgcagttattacaagaaaccaacatcaaaggttattttaatcggaacgaaactatcaattctatacagtagaatgaggtaaaaaacatcaacatttagctgtacctgtcaagcaagctgaggagaagttcactatcagagcgaccacattgactgtcagctgaaactgcacaaacttctgaatattaatgtacactgaccgaccccatttagcaacagtgactatagtggagaagttgtcgtcaagaataatcacgtcagcactttcttttgccacctgcaaacagatagcacagtgagaaagtttgggagtgaaaaagtgcatagaactatgagggcatgaaatggatggtagtacaactcaagacaactaaattagcggctaaattgccacaaaaatacacttctaaaaaaatcgaagtgatgcaattcattaattatattgttcatgcaaggggaacactatcaactatctttgaggaaaatcacctcagttccagcaatgcccattgcaagtccaatatcagcttcatgagagcaggagcatcatttgtgccatcaccagt

SEQ ID NO: 14284 - DNA, 1117 bp, Oryza sativa
gtggcccagtagggggacacgcatccctctactgtttttttttttttaccgcgtcggattttactgcatttttaccctcctcttctcaggcctagaaaatatttcggcgcgacctgccaagaccgagagtgtactgtagcattagtgctcgatttttacctaccttactctattggaaaaaaaattacattactggagtgcttcgtgcatacaattatttttctttgtattttttcactcgccgattggtgatggtctgattgatggacgacgccgtgggccttctcacggcgagtgttcgcgacggcgcacacgggttcgtttgtttgtttcttcttcctccttgtcccggcttgacgtcttgtcgtttcatttgtcaatatctagccgcagtattttttcttcgtagtactaatatgttcaattaatttaaatcgtatcattatttgttattaacaaatatataacgatatttactttgttatatagagatttagcaacatcatatttaatttatcctatcaaaacttaataatgttgtcaatttatcaaatttttgataatataaatttttgaaaatgtttatttaggcagtaatttctactgctgctgtagaaattacccttcattttttgtacggttaaaacgtctcaaggaatcgtcggttgtgggagcggtagcagctaagcgatggcaaatcattgtcaacgacatgcatggcccatcttatcgccatttatatcgccgataaggaggttgaccctgccatctaaccgcagcctacggccccccagagaaatcacaagtcgccacgtgtaccaacctgattagtcaccagtagctttgtctgccccagttggccactactctctcggtcttaaaaaaatccaatctaatataaggacggacataatctagcacaacaaatctagatagtcttttgccaagatctagatagtcttttgccaagattcgttatgttaggttacgttacatctcaatcctagcacaacaaatctagatagtcttctgccaagattcgttatgttaggttacgttacatctcaatcctatgttagttttttttggtacggtccatacgaggaagtatgttctt

SEQ ID NO: 14285 - DNA, 742 bp, Oryza sativa
aggtattacaatccacaaacaacagaggacaaacttcgcatcatggattgccacttgaagccactacaatactagtataatttgtgttaatagaattgcaggcatacgtgagataagtgtgaataccccaaaatcccaagtagtatgggcaagctctcgtccgttccattgtacactgctaactcttccttggtccacaacctctgccgagtataacacaggaagaagagaaaatagtgctcactatacgatcaaattttactattcacaatatcaaaaggaacatagccaaaagcctaaaacagatactccttccgtcctaaaatataagcatttttagctatgaatctggataactgtgtgtccagattcatagtaaaaaattattatattttgggacgaaggtagtagtaaatctaaatatgtagcagcagtaaagtccagcatacaccatacagttacagccttacggggcatatcattaatttcaccagaaatctgcgaagttgcaactgggaacatctagtactaatagcaactagcaaccagctgattttgcgggcgatttcggatccagaattccggatcagttgcaagcacaaaggcagcttccacacattagataacaaaaaacacgcaatatctaacctcaaactcacaggtaagccagtggaaaatttcgggagaagtagaagtagagaacgcaccggcttcctgaggcggtagagctggaggacgacgg

SEQ ID NO: 14286 - DNA, 720 bp, Oryza sativa
atgagtcatgattttctcctacgctttgtaaggttcggcacggcacctgaaccacggcttgcattgcgtccctgcgatgaagacgcccctcgggcctctgtatttgcattctctgtgccctctccagtcgccgaatagctcatgcttttaccgctttgactttcagaaacctcgtcaataccctcacaggcatcacgtgtttcatgctccatttctgcaccagattgatccactcccgtatcttgctcgtcaccctcttccatgcagaatccaccaccggcgaagagatagtcttttggtgcagtgtccgtatggcaatcctcgggtaactcaaagcccgaaggatcttcgttcatatcagagggatctgtatgcgtttgatcgatgtttaattcactcgtatcctgatggagcagattagattgtgtgtcaagtccagccatgtgacacatgtcctcctccaaagaaccttggccctgattttcatcgatttgatgtatggaaacatcattatcatcagcttcctgaccatcttccgcgtatgtgacctgcttacgcttcctatttgactgcagaaacaacatcagcatgaaaaaaataataatgttactctccagtgcaaatattactgctcttcatgtgcagatcagaagaaatgcataaacaattctgattctttacttcaaaaaagaattgattctcaaagacaagcatgtgtga

SEQ ID NO: 14287 - DNA, 662 bp, Oryza sativa
ccatcttacatgtttactgacaaggagcatcgtggaccatttgagtactcggaggatcttacgaatttggctgtcggggcagaaacgacggaaaacaccatctcagcccaaagatatcaagaaagtgataatgatcttttgctaagtacttcggataaagaggacaatgcaacagctaccagcaatggttcttctgcctctacctacaatgctccttcagacttgagtggtccttcattgcttagttcacaaataccgtctgaaacttcactaataaatcctggtgcacctacatattcgtcacagtccaacttcagtcttgatgaccttcttgggcttggtgttccacaatcctctgcacctccaccagctccagcattgaccctcaactcaaaacctgtgctggatcctggtactttccagaagaaatggggccagctggccttatccttgtctcaggtatgttgcttctgagttctttcccatgcattttgtgattatttgtacagcaacatgctcatgtagcctttttgtagttgctcactcaaatttgaactattttagcatgaaattatggggtgctgctattgtctaaatctaaatactaagtgtcttcccatgaaagtcactctgatgaggtgtttgaaatcagcagttatatg

SEQ ID NO: 14288 - DNA, 7539 bp, Oryza sativa
  unsure (1)..(7539): unsure at all n locations
accgctgcagaggcattttcaacgttgtttcagtcagctttgtccaaatttgggctttcttgatcctgagcattttatattggtgatgagcctgtcagtttctctgcttgtcctaccacatccttgaacgtcctaaagatttttggtacatctttaatgggaatgttgaagcatgagtttgaacatcctcaacagcatatacagcagggagagcacaggctggagttttttaaggatgtatttatggtggctcggtggagaaaaattagcattgtcgtatatttcatctggagaagtgagttgttgtggcttcttgtgtttctgaaggtgaatgtcacctgttttgtcgatgtagagacaatatagatacagcgctgcttctgtatgttagtactccgtatttcttacttgcacagagcaataaagctgttcattctaccaatatgaagtgacacatattaagcccctttacattgtgaagtaaatcgactgatttcttacttgcacttgtgaaacttagcttgcaatgctcacggacaagtttattgtaaattggatctgcccgtgtttggcaggttttttttcctataaataaaaatcaatagaaaaacgcagtaagatcaaattgaggatggttgttttgatcaaattctggttgaattattgtttcaaatttgaattctaaagaaccatttgaaatttcatccaaaatctacttgcatcccatgtcaaaacctcaaattttcacggtattcgatcggctttcgtcaaatcgaaaaccctggtcgcatccacttcgctgctagcatagtccacaattcattaggcaatgggagttctgaatctttcctcgccaccacgagcttgctgttttgcaaatcaagttatccacatccacaaaaacacacaataattgtcccagttttatgtcactaattataagtgattagtagtaagcatttgctnnctnngcaacnnngngtgatgtnannttttaggcttatactgtataccagatcatcacacaaaacgctgcaaaggaaagcaaatgcttactttctgagtagttcaatacttcaatcagaacggatcggaaagctaaataggtcacacagaagcataaacatgtactccctccggtttgaggccaaacttttataacttgaccattaataactttaaaaaatatttagtttaaaggaactagaacaacatatattataatagaaaagtaagattaaaaatatcttttagaccgtgtcattgtccaaaacgtcaattaaaatggaaccggaaggagtaggaatatacaaataacacagaaaatttctccataccataccgaagtattaatagcagatccatgacccgcacaataatagcaagagtttaatccaaagaagcatccacccatataacattattagattcatatagcaaaaacctctaaatccgcacagcagcatcaactgctcagaaggcacgatctaagaaagaactattactaaagtcactactaaagcggtagtaaaggggggcagatcgatcgcatctagggcttgaaggcgatcgtcagatcagaccgggctgaggagctgggcgagggagggcctcggctcggatctcatgccgacgacgatgatgagcgggatgaagccgtagtgcgccgccaccttggtcttcttcatggtccacgtggtccactccttgacgaaccgcaccgccgccgcagccgtggactgctcctcgtcggccgccggggatcccttcctcgcgcccttgaccttgggcttcggcttcagcgacggccgcgacgccatggcacctccctcttgattcgattcggggggtcgctgaacagaaaccctagggctgtgcggaagtgtcgttctggggtttgatgatcccttccggttcggtgatttggggggtaatattggcttgttcgtgggcctcttcgactctaacttgaggagagacctgatgggcccaaaagagcgtagttatattgggctgcgttaccatagagtttgggctggacatttttgacagcccaattgatcaggtcagcctgcagcctgcatgggacaaaacaacagtcgctcagaaatgagtagcactgtaccagtatggtagtctagtcaccggttggtcggcaatgccagcccatatgtaccgctcagcaatcagcatctctgtcatgaattcctcctcattttcacacagatacctcgccttgctacgctaacaccattgccgcatcttattagcatttatatttcaacccgacgaaaaaggtaaccgtcggtatcatgacaattgacagtcgtacggtatgcatatgaagctgaatctgaacgtagccgccaccgagccacggacgcccaaatcatctcattagctgaccgagtattcgagcgggtacacgcgcgtgcatattcgccggccggctcacccccaccttttgaaggaagcagcacctacgtacgttaccggtcccgcgaaaaactccaaacctgtccgagtcacggcccggccccgctgtctctggtagaaccgacacccgatggacacatcggggagcaggcatcaaaatcaaatcgccaaaaaagaagccgaaaaaggagctgaaacgcgcacgcggcggaacaaaccgcgcgccgccgggctcagctccaccacgtaacccaaccccacccgcgcgcgctacaccacctatatacgtcgcgttcgcgtccaccggccaccccgcgccgcgcgctgcacgaacacgcacaagatcgatccgagatccccccgcgcgtccacgacccaccacgccaacagcatatcacctcaactcaattgacctgcctgccgacacgcgcagccgctccccggcccggccccgggtcgatctcgtccgatccgcgcgcacgcacgcacgctcggaaatccctggagatcagcggaggaaaccagacggaatcacggaactcgatcgggagagggcctggaataacccacccggtcccgcgcccactgatgccgcctaccagccatcgtactatcgcggcgccgggccgttcacacggtcgcgcgcgcacgcacgcacgcacgcacgccggcgaatgaattacggccccgatcgatgcatgcccgggacccgggacccatcgctcgcgcgcggccccggccggaggagtctctgtagacggcgatcgatgcttcgcctccacgtacggtgcgatggccgacgggccacgccacgtgtggccggcggagcggtacacggctcggtgacaagcgcgcgtcgacgtcgatcgggttccgccgggttgtttgccgatttgggcgagcgcgcttgaccggcttagatagctaatggcgcacgtgcaggcgcggggaagtttgactccacgcgcgctgcgccgcgcagcgcgccgatcgatcgacgtataccggtatacgctagcttacggcgagacgtgcccggtggccggcctctccaccacgtacgtacaccagagtcgacgtacgccgttagtgcacaggccgcgcgcgagcgagcgagcccaacgtgacgggggactgtagctgcgcggctgtacgtacgggcgtcttgtattccgtgtactgtgcgcgcgctcgtggtgtgacgcgacgcccgcggcgctggccggccggccgtgactcgtggcatgggaggaaaacatgagagagtcgtgatctctctaacaaccgagaccagccagtagccgtggggcaacgtgcgccggccgtttttttataagcgggtctctgcttatttcgttgctatattctggagatttttttttactaatagggagatattttcctatcttataatgttttagttggattttgatttgaatggaatcaaacgacggtcctttaaaatataaaaatgttcaagaaaggtagtaattctctaagctaagtaccagctcgatctccagtatcgtttatgactcccaaattagctagaccaaataacacgcgctgggttagcataatccctcgagggaaatactcatcgtgtaactttttctttttaatttaacgtaattagttgtgaaatatttttaaaaaataacttggtaatacagagtatagtgacaactatcaatcccctaaaattaagtttaaacttgacctacatattgaaaaataaatgaattcaaatgttaacagtaccctactatttatataagtttattattttattatatctcgataagtgagttgagtttatttataccaaaaattttgttaactaatatatatatgtcatgtgagtgttgtcaaattttgtaagatttttctataacttcggattgtttttatttattgtttttaaataaaggagctagatatttttttcaagggattaaaatagtttcatggtcagcatacatacttcgcatcccaaatcacagctagccgtgaccaaatatgcatgcgactgatataacagtaaaaaaacgtgggacgctgagttgaggcaaataaggaataactatatctttaatttgtaatacttccagtatataaaaagtataatatatatgttgaatgatatagttttttttttcacttttaccagaaaatataccaaacacagtactgtaaagagttgatcagctgaaaatcataacatcatttttcttgtaaaaaatgttgatctatatgtgatgtaataagtttcgctggcatcaattcccgtatctatagatcactatgccagcgtcaagtatgttactccatccgtaaaatataatgcacccgtcttttataaaaatcaaaaattttaaattgtactactaataattaaatttacaatacgtgagagtttattagttacatgtagtactattatattcatatttgataagatttttatatgatgttaatttcgtagctgccgatgttatatcatgcaaaaaattaatggtcaagctataacataggagatcaccacgtaaaaatctaaatcaccttatactttatactttagaaaggagggagtatataattttgaataatgaaggtgctatacttctttatattgtttgatcttcagacaactcatcaatcaacagtcttggaaaaaagcagccataatataaaccttaattgatatagtggggtatttctataattaatctaggaactaattacgttatcatttatctctgtgtttcctcattatcataaaaatggcgaaaaaaggagggatcacctacagattaatttcatttgatcagcacatactcgaatccattatctctactacgtaccgtaagagcggtgccatcctcctgccagaccatcgctccttttccactaaaaaaaaacatcctaactcgaaaataaccaacccataaaaaaacagtatttccacgtgaaaatcaatcgactagaaaattaattagatagacgaaccacagctcatagaatcatccgtgtccatcttcctctagaaaaatacagttttcaggatattcatccctaaactttctctaaatatatatgccgacgattaacttcggcaaaagaagtgatcattatttcactatatgaaaagcaagacaaaaaatatcagtgatgagttaagtcaaccctccacgaaatcaacagaaattaaaaacttgtagacgtacatgttcgatgtagacacatctcacagatacacacgcatatactactatattttttgccatgttattcaattggaccatgaggtcaatgctagattgtgtagatcagaaggcaattgcaatgaacattcttctcgattttttttagacgtacgtctttcttctcgaatttttttttgacgtctttcttctctaatttttaaccgaatgaaatatttgtccttaataagatgagagtagtttggtagctgtgcactgtgcaagggtactgtgacagccgtacgtccaatatccaactataaatatgtacagctgtatatacgtatggatacatgtcatccttcaaaacggtacttgtgtggcacgtgtatgtcaagaaagagctgtagtgtactgtgcaaatcatttaaaatcttgaagcatgcctgatcatgcataaacatttgaatcgaaattcacatgcacagtttcgaactcttggctggatccccgtagatgtccgttaaaacgcggtggatgtaagtgagttacattgctcaaattaatggacacaaaacatgtacatagtatatgcatgctatgcccaatatataccaactccaaccgggaaatagtatcttaattcagcatacagtaagctgaactgtatggattcaactattcatagtacggcaggccctacacaatttaattacgttgacactggccggtcttatacctaatacctccctgaccaacagatgcgaaaagaatctaaattaagcacgctgatttcattaataaaacgtctctaccattaagaattgacgactagctagctagtatatatgtgtgtatatatattaatagtactgctggaattatggagtattatatatatataaacgaagatcactagacgccgcaccgagacagatttacatattccatcacaaaaagtcgtatcttgcgcctatccttttccagcgaaggaaaagaaagaaaaaacaaatcaaaagggaggtgagaccggttgaaagctgaaaccctcctcacttccacgcctctctttcctttccacacataagctagctccccatactctcacaccccatgtcttctggaggaggaggaggaggaggaggagatcgccatggcccctaccaccagcacgggcacctcggccgcggcgaaggcgctgattacgtgtacagcagcagcgacatggagagcttcttcttcagccaacccgggggcgtcggcatcggcgggggtggtggtggcgtcgtcggcgccggcggtgccgacgagatcatgccgtactccagcatcacggactacctgcaggggttattggacccctccgggctagctcggcacctcgacgtggcgtgcccgtcgtctcaggacacggtggtcaagcaggagctgtcggtggatgtgacgagccacgacagccagggcaccggcggcgtcgccggagaaggcgtcgcgcaggccacgccgaactcgtcggcgtccttctcgtccagcgacggagaggcggagggcggcaaatcgtcacgccggtgcaagaagggtcaggcgaaggcggaggaggaggacgacaaggatgaggaggatggagagaactccaagaaaccgtatgttaaatttccattgattctactctatactttgtctgattcttgtcttgatttcttgcttgattaattcttttttgatgcgtgtcttgagatggggatactttcttggggctagatctggttggtcatactgttgcggagttgcaaaatttgacctgaaattttctttcgtttatgctttctctctactgcatgcatggtgtgaacattagggtttgctagaattttggttccttagggttctttttgggctg

SEQ ID NO: 14289 - DNA, 1574 bp, Oryza sativa
atttaatttaatagacaaccaacctatgctccataatagatcttgcgtagaatgaatcaattttacgagttatagcttcaatttttgacttgctaggtctttgaagattatattatgatttccccttttagaaatgattcaaattaagatatattttcgtatcaccaccaaccacctaaatctacaatagttcctcagtacttttgcaaaattaacgctgatcttgccccataacatgcaatccaacagatatctagctagctagctaacttattagaccctaattaatactatatatcaaaataacaactatttctagcaaaacctggtgctaatctaacatgaaatagctagctattcccatagtccaccatgatcctacctatctagcaagctagttagctagtttgattgttggtgctctgaaaaagcccaaactaattaataattaggcctgattgagcttgtcaccgcagaaatatcaactgatcttctgaatccatatcatctctctgtttctagctaatccacctgaccttatttttgatattttgtaccatgcatctacacaggaacaagcccaagaagaaagctgagaagaggcagcggcagcctcgcgtggcgttcctcaccaagagcgaggttgatcacctcgaggacggctaccggtggcgcaagtacggccagaaggcagtcaagaacagcccatacccgaggtacacatctatatacatgtacaaaccttaatttcacccagttgttgtagcacatacatatatcgtagtataccatgttactgtgccatacaattgcatggcacgatggtgttcaagtactccaatttcaaaatgcaattcaattcgaattcgaatattgcaggagctactaccggtgcacgacgcccaagtgcggtgtgaagaagcgggtggagcggtcgtaccaggacccctccacggtgatcaccacgtacgaagggcagcacacgcaccacagcccggcgagcctccgcggcggcggcggcggcgtcggcatcgtcggagggcaccaccaccaccacctcttcatgcccggcgtgcatggcctgccgccgtcgcacctcatgccggcggggttccaccctgagctgatgggcctcatgcaccaccacccggccatggccgccgccgccgcaaaccctagcatgtacttcccgggcgtagctgcttctgctccgccgcctcctgctgtggctggcggcggtgcaatgccgcccaacgatcatcctcctcttcagcagcatcacttcactgactacgccctgctgcaagacttttcccttccacaatgcccagcagcaacccatgatgatgactgatctaactgattctgcacaaatatatactactcaatatttaactagcacccggaatttatcaagatgcttttcaaacattggagtcgttgcgccaaaaatgtgatggctagggagtgcttgatgatcagcttggtcttggtgagaatatataattgttattaattaattgattttctgcaagcttttcatcttgaacgtaacttgtgtgtgttgtgcactt

SEQ ID NO: 14290 - DNA, 654 bp, Oryza sativa
agaagaacattactactacctcaggagagtgctcttcctcccaattttcaacgagactctcaagaatgtatggagcatcatgcatgtcttgtgaatattctcctaacatccatataagagctgctttgccttttggctcctgaatatttttgctactgatgtttccaacaactgctatacaatcatggctccattgaggatatttcctcaaaagatctttcaccaagacctacatttaagtttttactcaggaacaaagacacccagagttgaatgtacttcatccttagtgaatgatgaacagttaaaatactatcaaaaaaacttacaagagtttcagccgtcacatattccttgtccatttcaaggaattgcagaagcctgtcaacaatagcattcacatcatactgctgcagcgctattttcccaactgctcgaatagactcacgtgcgattggtacatcaacatttccagcatattcacacaactcagttactggaacgaaagaaggccacaaaattttataaacataatgaaaatcatggagttaaaaatatatcacatatgttgtgagatatgccgatgtataatcaatggaaacagatatctgctgtaccaatttcataggtgttgctctcgtttgctatagcagt

SEQ ID NO: 14291 - DNA, 2385 bp, Oryza sativa
tatgttctagtgataaatcataaatggcaaaattgagatgtctttaaacattaaatataactaaaaaactgcaatataattcttggtaaatactatctctgaagtaccctatctagtttggctagtgaacactatgtaaacctattatgttgtattatactgttgaaggcattgtgagaaaacaagaacccaagggtacaagcaaaatgctgttgaatctagaataattgcacaaactgcagtgtttagtgtgtgtgaatatgtatattcaggtcaggatttccttcttgaccatgtgtactttgttttttcctccttaatgaaataacatgcagctctcctgtgttgttccaaaaacaaattgcagtgtttagtatttctcctatatgttcatgtgagaaaatccatagccaatcgtgcatttggagtggaaaggcggagtatttgttagatataaaacagcatacgctgagacgactgacactactctcacaaggtacaatcatttgagacttaaagtgtgtgaccaatttcttaagttgtacacatctgaataatattaagagttgtgtaactttattcaaaaggtgtatagaagaatagcatcttatacaggcagtcaggaacaatactgaatgtagggctgcaatcttgtaaaatgtggccatgtatgggtttttcacatcctatataatgtttctttcagtttgggatatggattcgtataatatcaaatacaaattacatgcagatagatttaatatgaatatggtcatgaatacatgtggatattatgcatgaacattccagaaatgttaagcacataatagaaatatacatcaatagtattgtaggaatttatgttggcaaatactgaaacaattgttccaaaatttataaatcatacgcatgtaaaatgtagcagacaaacagaatatcaaaagtacacttcaaaggtgtggcggcatggtgaggcagggactctcaaggtggcaacagcatgcaacaatgaaaaatggacaagagcggtagaaaatggggatagcgagttagaaacagaaccaataaaggcagccaaggtatctatcctctcagtaccatttttacctgtgttcagactcttattcttgcaaggttatatttgagtaccatggtatctattttcccagaaccacattcatatgttgagccctgcttgcttcagctaattcgctggcttataaaccaaaaattctaagccttaagtaacagacagctttaccacagggacttttaaaagccaaaaatcatgatagaactaataaccagaagaaaattatgactctacccttcaacttgtggctgaaatcttaaaagcctaagccaaaacaagaatgttttgagcaaaaatatatgaattcacctaatagcctccaaatccttcccagaaatcaaacccacatagatgcatgatcagattggttcagagttgatttcttccattatgtaaccttaaaagaatagggtgtatctaggttcagtagttttgtcttgactagcattgtggtttcacttcaaggcttcaagctacttcagcaatgttaagtcactatactttccatcacaaaatatgtcggtccaagtaattaccaacaacctatatgatcaatcagatcaaaatcaaactattatcaatgaagattaatatcactagcatgcagcttcattaggcatttccctccacctgttctattagacaaactgcaaagtagaaaacgattggccggctgcatgctgaaccaaatttcaagttacagctcacattggcatgcaagaagtattaaatccttactgattgtctaccagttccaactttaaatcagcactacagatgtcatagacttttcggtggtaattaaacggtattgtgagcactataatctacagataatgaatcattgcaacaggtagcagcatcatagttgcatgataatcacaacattgtttgtggaatggcaactcacctgtgcatcaggatcagagagcataagcgctttgagcgccgcaggcaagtcagcatcaaggcaggcggtggcagatatgtgatacagcttcgcagcaccaacagcagcgatcatccggacgtaagcactggggtccttgagcccagtggcgagcggcgagacaaggtactcgacgaggttgggaacgcggagggagcagaggctgcggagtgccaggccgcgtatggtggggtcctggtcgtggcagtcgcgctggaggaagttgatggtgaggagcgcgaggtccgggtggttgcgcgcgtggacgccgacgtagaggtagcacatcttcttcagcacgacgtcggaggtggcggagcagagcaccatctccccgaacgcc

SEQ ID NO: 14292 - DNA, 1016 bp, Oryza sativa
aatgtggcttctctattgatatccttgagtgtttgaattatgatgtcacccctgatcataggatcttcgactttagctggaaacatctttgtacaagcttcaacatcacgctccacaagttgattgttcaaatagcagaactccaataatctccatccgaaactgacagttctccttgacagcatccttataccaagaactatgtcactcagtataatgtcagatgcagtctctccattgctttgggaactggacataacttgaaacccatgaagcaaagatggcaacaatgagtcatacaatcttggaagagtgttcagtagttcctcaactccatagctgcaaattaagtggtagataagcatcattgcctattaagggaacagcgaacaaatattgtgttggatgagtagaagcgcacctcgtctcaaaagaggtacaaaataataaagcagcaggttgataagcatcgacaaaggcatccagagtgacaattgcatcgtttacaaaatccaacacctgaaggaagttggatttacaacaatatagaaaaatcagatgaaaggacagcagacatatcataaactatgcagtataggtaaaacttgcctctgagaaatctttctgaagttgggtatatccactatcattcggtccagatgaagtgagcgcctaaaatgaatttattatggttaagttctttttatgcatagttctccaagatcttctgtaaactactaaactgtcatcagatcaggaaggtgtgaaactacaagatcaagtttatatcaatatcataggtcctcaacttttaatcgtggtgagaaaacatacttcaatctcaatttaggataaaaaagaaacagagacaaattaatagtaaacatcataatcgtcactttctatctaacctaccaagcaatgtatcatggttgttgaaaggaactgggaagaaagtatttgaaacaataacagatataacaagtaataacaagtatattcgtcaatagcacaaa

SEQ ID NO: 14293 - DNA, 3967 bp, Oryza sativa
ggaactcattgttttcatccattgctgcagaaacagaaaaatgaaaaaagaagagcgagagagaaagcattcagttaccaagatatgaaagcctggtttcaaattcatatacaagttgacaacttaaatgattgaaagggttggaactgaagccaatgttacctgtagtattgtggttcgtctcttttacctgaagatcgctgtacgttgagtcagaaaagaggacagtctccagactagatgatgatgatgatggtactgatatagggagctacaaaaataaacgatagtttgaataatccatatggttccatagcttttaagaaatggaaacaatctgtacgcagatggcacgaatataacagaaagccagttatgattatcatctaagccttttttactaatatagcatatcctgtacgaacactcgtatctctaggcactggtagctttatgacagtgaggagggacctgacattcaaaagctgatttctagaattagtaaaattaagaattatattcgtggaaaaatcacagttaaggagcataggttagtaattgccaatcccagtgactgaccggtatgatttcctaacttcagtccatgttgttagagtatacagtttcataatttatattacaagcgttcgcaaaaaaataatttatattacaaaagaagatactggctttgaacaacttcaatacgttgcctcatgatgtccaaatatagctttgatggaacaaaggttatcttagtagtaacttttcatcagccctttaagtttgacaatgtggataatatgcaaagaacacgaaatcttctctgacagataacaatatgataatgtgaacctacgctgcccctatatccgtcggatacaacactggagcggagctgtcatggttaagcccctttggttggtccctaatgcatgtaagactagccacctcatttatcaaaacaggttcacattgttttatttctatgtttgttgtaacctacacaactaatcaaagcatttgcttctgaaaaacagaagaaatctgaatatctgatgacagaggatattgagaaaatattagcaagtatcaggaacagaaataattcatcaggcaatttataatggaaataaaaaaagttaatcaccatagatctagagccacaggacaaaaatgatggtggcagtacaccggtggtttctgcatcatattcatcctgtaaaaaactgacttcagcgattccaaagtttccccctgatacttcagaagtagagcaaactgcaaacgaataactaattaaaattgaacatgtaaatttgatggtgttgagaagaaaaaaatactgatatatctactaactaatgaatagtattaacatgataaactgtgtttgtgctgaacatgcccgtatctccaactgtttatgaaggggcagttctatgttctacatacataataaaactggaattatgaaaaaataaactgtagcacattcggccttgaaaaactacaatgcatttgcttgtattaaacttattttgtttctgaagcacacagtaattcaataaacttgatatttttttattcggtaagatctaatttttgtgctcagcagtcagcacaaaacaataaccaacaggatattctctaataatttcatttacagataagttctgtttgtaccttgcaataagtgttaagcaaacacagcataacagggctaaaattcttatttatgtgagtaaactgcatctgagagcataccagtgtattaaataaactcaaggtgttgtgttcaggtcggcattaaccctatgcactatataattcaagggataagtagccaggtatgcatctttcactggctatttctggtgtgctcacaatacaaactagttaaatcaacatcgccacacttcttgttttagtaacatggccagcacagaggattgatggactcatgcatcccaggaagcggatgcacttggagagtcactggtgctaaaagcatagaattaaaaacagcttttgcagtgcggcaggttcaggtgtatgctgagcagaaattcttcaaaatcagccagagcaaacaaaatcaagaatagtataaatacggactttaccattttgatgacttagaagtgttgaccccaccgctgttctatcgagtgcaatctcttgagactgtgagtcttccaatatttcggtggtcttgcaaaatgaatgaagctcctgcgtccctaaatagtcggtgcttaacattttattcatccttaatgcaggcatttgcaaaaagcatgttgaaagtactgcagttccagtaggaaaagtccaactgttgaaacatttgatatcactaaagacattagtggagaaaagtgaagctggtaaaatatctacagactaatgatctactggaagaacatactttacccatatgttctcaataaattagagccagccaccattttttttctccaaaatctaccactaaaataaaacactcactccagtgaattcaccaatcgaacaaccctttcaaaatctttaaaccctcctagcaagcaacaactttaacaccaactaaaatcccttccttgctttcccctcccttttttatactttcccatgaaacaaattttcgttcgaacttgtcaggacagtaattaagatcagaaactaagctacagcaggaacgcagcctacagaattccccaaacacatgccacatcccaaaagctcgctactccttttccaccgagcagcccgaaaaccttcacacaaacacaattcctctctatacctcggcccaaattttgagcttacaagtatttctcacgggtacaaaaagctcaaccacccaacaactagctgaaacatactcaagcagccaaacatgtaccaccctacacagagcgaagcatccccccagatcaaattacacaaaacccacaagaatcacagagagtcgagcccgagcaggaaatcgagctccggaaatcccccgtccaaagcagagctcgagcgacgcgaggagagagagagagaggaggcacgtacccgagatgcacccagctcctcgccgccgttccctcgcggagcacgatctctcctcccctctcgctcagcctcaagtctcgcacaaacgcacccactgggagagagaggaagatggagagggagagcacaggtaggggacagctcgatcgcttgctaatcccgtaccacatatactaatctacgcgaccggtccgcgtctgcggagtcaaggtctccccacacgttccaccgcggtcactgacgtgtgggcccaagaggatccggccccgcgagggcgtagcagcgggtagcagtttacgtagctttcgcatttttgcgggtgggttgcggctgctttgcctatcgcccaccattcgttccgctaacccgtccgtccccgcgtagcaagttgatcgctcactgacaggtgggtccgcgaacatgtggcccccggggtcagttggatgggttaatcggaggacggttggtgcggggcatcaggggccgaggtgtacacgtggacggcgaggatgggtagctcatcatgccaccagcggagtccacctgttaagtttaatattggcgattagtccccactttatctaatcgggctactaatcgtactcgtcgttctggttagtcactggcaaggttgggccggtagattccgggcccggctgtaagcgacgtcggatcggtgacgacctggaggccctgggaattcatggagttggtggggtacacgtggacggcgcttgatcttttgctcctcctttgcggctgcgtccactggctacccgacgcgtggaacgggaagccgggggccggagcgcgtgcggccatcgcgcgccaggtttgcggctctgcgcggagagagagggggagcagcggcgccggcgcggcgcgcacgtgcggcggagcaaagaaa

SEQ ID NO: 14294 - DNA, 3695 bp, Oryza sativa
agcccatgccgcatggggggctaatgcgcgatcgatcgatcgccagggctgatcgccctgcgatcggatcccaccccccgctcccctataggctactcccacttctcccctttctccccctttcttctctactactactacagtacaccacaaaaaagtttttaaaaaacaaaaaatttagaaaattttatgtataaaaattttgaattcaaattcaaatttgcatcgggtatgtaaacttttaacttataaattttggatctataaactttaggtgtataaactttagatgtatagaaatactatatatagaaaatatttgaattcaaattcaaatttgaatcggatataattcaaattcaaatttgaatcgggtatataaactttaggtccataaactttaggtgtacaaactttagatgtatagaaatactatatatgaaaaatatttgaattcaaattcaaatttgaatcagatattggaattcaaattcaaatttgaatcggatatataatctttaggtctataaagtttaggtgtatacactttatatgtatagaaatactatatataaaaaatatttaaattcaaattcaaatttgaatcggatatatatacttttgatttataaacttttggtctctaaactttatatgtgtaaacttgaggtgtataaactttaggtgcataaatttactaaaatagaaaagtaatacggtgccaaaaaaggaaaccaggtggagggagggggggtgggaaagggcgagtgaggatcgctcgcccgcccagtagcatttccgcatgccgcatggtggatgtgaaagaaatagaggaaatatatcccatgctactttgattttttttatgctgttactttggttttgaaatgcagggaggggatatgagatttgggggtgaagagtagatcagaaggttgcaagctccacgctatatgcaataggaaaaaaatacgaattacctcccgaactatcacggtcaacctaattacccctctaaaccataaaaccagacattttatacctcaaacttttcaaaccagacgaataaccccctagtggaatccagagtggttttgatcctacgtggcatacacgtggtggtctagtcagtgaaaaattaattaaaaataagtgggctccaccggtcagctcctctttctcttctcccacctcatttcccttccatctctatctctctctcgctctctccctctcacggaaagccaaaacagaggacgaggcggtggaccggtgtcacggcggcagtaggggcaacagggcgttgggggagatagcggcagcagcggcggcatgagtgaaggccgtcaggtcggggtggcgggcggcgacactgctgcatgcgtcccctgggttccatcgccgtactctttgcccagggagagtggacggcgccagtgcggtcgtcgaggccggatctcagccagtggggcagaaagagtgctagcgtggggctggaacgacctcgacggcgagggccctagaggtcgcgatcgaagctcgcgtgaaggcagcgatgagcccaccgccgtctcgagcttggtgagggcgttggaggcaacgaccagcagtggagctcaatgttgcttagggaggtcggcggagcaagaggttgcgtggaggcagctgcagtggcggcggagacggagctcgcgagaaggaagcgacgagcctgtcgcagtcttgagctccctcgaggacgagcggcgcaccggcagctacgagcctcctcgcggtggaggccgaggatgagacgcgcgccagcggtggccggcccatcaagctcaccattcaggccccgttatgatgcgcgccagtggcggccggcgtcggatttgcgcgagaaggtggcaatggtggggaatactatggtgggggagaggtgtggcacagtcgacgaccgtggaggcgagcccgttgaccagtgtgactacggatgcagatgccgacaccgacccggccgcgctagcgcggcggcgcgaggcggacggggaggaggcggaagataggcgaaagccggaggaggcggtagcagaggaggaggccgttctcgcattcgccgctcgccatttcctccgcccccagattctgtccctgcggcctcccgccgcagcgccgtgccttgccatagcctcccggccactcgccacactcgcctcgtccacctagccatgcctgccactgctcgccatcgaccggagcccaattcagagtgagcaatgtctggttttcgggtccaggggagtattcggtcgaccgagatagttcgtgggagggggtggggggtaatttatactttttcccatgcaataagcatatggattactaccaagtactctttcatttcttattatagatggcttgttaatttctatcatgacgtttgatcatttatattattctaaaatttataatgttctattattaaagaaactttaagtataacttatactttgcatatttacactattttttttaataaaacgaatgtctaaacattatttcaaaaatcaatgacgttatttattaaaaaacataggtaatatgttccctcacaatttccattctaattctttatgaaatctttccaacctccaaatttgactaggactcataatcctactaggatttcctcacatgacacttccagttcgttcttcaaaattttcagatttggactcttttcatgattgactaggacttctactaggattctcttacattcatatcttccggtctgttcttcaaacttttgaaatttcgactccctctaaatttgacttattttccatacacgcaccatactgaatccgaagaacattctcttccctctacgcccacacctctcccagtcccatccttatccagttatcctaaccttcaacactctaggtgggatctgtgagctcgccggaattcgttggaactagagaaggatgtggagcatatcaatcggtggagtgggtggagtaagattttttatcaaatgtatcatttagcaaattcgctttttattttacgcctacagtaacattttttccatgccacattctttttttaggaacggtttaatataagtgaatcataatagaggaatttacgccaaactaactagtactacaagaccactccacaagaaaacttctcatgcaaaaaaacgacagtatcctactcacactcgtcatacaaatgcaacgtttcccaatggccgatcgaatgctcgaattcaccaacacctgcctagtagtctccagtgatcgatccaatcagctgcagcgaggaggcagccgtagcttcatcgtcatgcccttctgaaccgcctcaagacaaggccgagcaggctgccgtacacgacgacgcagtagcctacgaagaacctctccccctgcgctatccccgccgccacctgcgacgccgtcctgctcctggccgccgcgtcccccgcagccggctccgccatcgtggccgccgaactctgaggtaccttcaggatctcctccttagtgccgccgccgccgccgcagcgggctgtgctggcgagctttcgccggctgcagttgtgctccgccgacgaccgggcgctccgagcgacgagccttgccacgctctgcatgatttgtttcctggcttcacgggtttgggttcggttgtgaatt

SEQ ID NO: 14295 - DNA, 1195 bp, Oryza sativa
caccaagtaatcaaatactcaagcatcaaactactttcctcaatgagcgcaagtatgtaaatcccctccaatccattacacccacatatacaactaaaatattactacttcaaagggtaggttatcatggcaccaccattcgaaatggacccatcaagccttctttttcccattgcccattgcttccctatgttgcagaatggcatgcttcctttgttttctctcccagatgtagagcctctgttcatctgcagacaagaatacgagagggactcatcaaagtcgatcatgagtcctggaatcattctcacgagaagaggggaaaaatggtcagatggatactttctccgtagctatgctggatggatgctgacccacattgctttctttacctctacgcaaagatggcatgctcgattcatcacttattatctactatctcctgtacattgcagagcaaaggccgtgacagcgacgaagaaggctgggcgctggcgatggagcagattatgatggtcgctttgctggcagttattattcactcgactgctactttacatccatcacaaacatagtgatggtttactttttcttttttacctttgctttgctagaagatatctggaaggatggccattgcagcccatgttatgcagtacttgtgatgttgatgtaaggcattcatccagtgagtattgtggaaaaatgagagagatttgctattgtcacaggctcccagcatatggccaacaaatctgaaagagggcagtgcagagaaggcctgaatataagttgcttcattgtcctcagccttcaacagattatggccacagtgttaatattaccatatgcgaacggtatacggcagatagatgatagttggcgaattagatgaatataattattacataagaagattgcagttatctcgcaagcgattgcaagatagtactgcagtgagactcttttctcagcctgctgattgcaaattactcaacaaaaagagctttgttataattattattcttttgtacaaaagaatccacatgatccaagtgtataaacccctgatctctcctaaacatggtgttccccacggtacacatgtgcttcctttgtcatcgtcattgtagcagcactgtaccatttgctgcatctgctataagctgtaaaagtttgtgcgtctatgttcatt

SEQ ID NO: 14296 - DNA, 5477 bp, Oryza sativa
ctacacccaccgaacccatggataccccctgagccccccttcaattttttttaccaaggttgataaaatagggggtgttaatagcattttagtatagtttaatactgatattatgtgtttataccggtgtactcgatatgtttagtctctcaactttttattgctggatccgcccatgcctccatagaaagtgcaacgtacgttttgatcgatggagaggcaaattttgagacgtactggttcgtactgatcatccacgcctctccggctatggttcgtcctcgtcggcgaggcgtcgccgtcgcatgcatgcgtgcgttcgtgcctccacgcggtagctataggaggtggagtaggccggtttgatgcggtagagcgctggagaaagataaaaaggattttcgcagatggccaaaattgctctgtgcaggtggacacaagcgtcgtctacaagtagagatttacgaaaatcatcgattttcacacgaggttttcgcaggtagacggtcggtccgtctggaaagatggattttcacgggccgatgtttgagggcaaaaatttgactcatatgtttggtgaaatggacatatcagtttataaaaattgtttatctagtagttgtcgaagtaatccatggcgccatcggctatttgctgctctagttatccactaagcgcttgattccgagtttgttggatcatggcgcatgtatagctcagacgcatgctgtgttcatgcgggagtttgtttcttttttccgttttcttgggagtgcgtgtgccctgcatgttcttcgatcgtaggatggcgcgatcacctcgggagacatggctagggcgccgggttagtaggaacgcatggtgcacacctcggtcgtgggatggcacgatccagtcagaggtgggagacgtgtgtatgtttgttatttaagttccctaatgcatctgaaaatcgttgccaagttcatcacaacacaaaacctcgctttctcgcttgctctgttttgatcggcatttcatcgaacaccttcgggagtttgccaacaactggtatcagagcctcgttggctcgctggtgccatggcggagcgttcactgccacatcattctcgcacacctccgcacgtttcgacgccaccaggctcgcgctctcctctttctcgcccattgtgtaccccgccacgccgttgtcctgctaagtccccgccgcgccgtgggcgcgggcgtggcgagcgacagcccttggctgctcagccgcgggtcgtcagggagtcgagcgttgccgttcactactcggttctgacgaggaccaactacgaggaaagggcgctcctcatgaccgtgaatttgcatgctcaggggctctggcatgccatggaaccgtacgaagacgaggagaccgagtaccgcgatgatcggctggtgctggccgtgatcctgcgtgcggtgccggcggagatgctccgcttcctctccaccaagcgcacggcgtagtctgcgtgggaggggatcaagacagtctgcgtcggcactcggcgcgtgcgtgaggcgaatgagcagctacttcgccaggagtttgccgatgcacggttcaaggatgacgagaacattgacgacttctccatgcgcctcaccggaatcacaaacagcattcgcactctcggaggcgatctccccgaggtagatgttgtcaacaagctgctaaacgttgtccctaagcatctctcacagatagccatctcgatcgagacgctcctcgacatcagcgacctgtccatagaggaggtcaccggccgactccgcgccgccgagaaacgcaaggccaagccaaaggagatcgtcgacagcggcggccatctcatgctcacagaggagcagtggctggcacggctcaagcaccgcgagcagagtggtgagagcagcggcactgcacccggcgcggccacgaacaacggcggcaagaaacgcgggaatcggcgcggttgcgtgcgcggccaggaacaccctggcgacaagtgtcgcaattgcggcaaaatgggccactaggccaaggattaccgctcaaaggccaagaaggctgaggcccacattgtagcggaggacgacgacgagccgacgctgctcatggcgcgcacgtgtctggttgagcggcgacgctcgccagccgaacccgcaccggaaatcacaacggtgttcctggaggaggcaaaggtgctggcgcatctcgatgacgaccctgatcccactaatctcgatgacgaccctgatcccgctgatttgtggtacctttacaccggcgccacgaaccacatgaccggagtccgctccgtcttctccgagctcgacacggcggtgaccggcttcgtcaagttcggtgacggctctgtcgtcacgatcgcaggctgcagcacgatcctcttcacctacaagaacggcgaacatcgcaggctgactggggtctacttcatcccacgcctcaccgccaacctcatcagcgtcggccagctcaacaagaacgactgcgagtccctagtgcacgacggcttcatgcgcatccgcgaccaggatcggcggttgctggcgaggatcccacgctcaaggaatcggcatcgtgccatcacacgaccgaggtgtgcgccatgcgttcctactaacccggcgccccagccatgtctcctgaggtgattgcgccatcccacgatcaaagaacatgcagggcacacgcactccctagaaaacaaaaaaacgaaacaaactccctcatgaacacaacatgcgtcagagctatacatgcgccatgagaccatgatccaacaaactcagaatcaagcgcttagtggataactagagcagcaaatagccgatggcgccatggattacttcgacattctcccccctaattcttgccgccgtcgccactgagctcagcaatgccaataccgttgcatagctcctggaatcaaacacggctgagtggcttcgtcagtacgtccttcagttgctcctccgtgcgaacgtagttgatgacgatcttcccgttctccacgcactcccggatgaaatggtatcgagtgtcaatgtgcttgctccggtcatggaaaacggggttcttggtcattgcaatgctggacttgttgtccaccttgatctccggcgctccgatctctgagtcgagcaagtcactcaagagtcgagcaagccagacagcttggcaggcggcggccgtggtagcgatgtactctgcctcgcacgatgacagcgccaccaccttctgtttcgtcgattgccaagtgatcagacttgttgtgaggaagaagagaatgccgctcgtgctccggcgtgtgtccagatcaccggccatgtcgctgtcgctgaagccatgcagcttcagcaatcctccttttcccctggcgtagtgcgcaccatggtgtcgtgttctggcaatataccgcaacacatgcttcaccgccgctagatgatcctcgtgtggctcctccatgaaccggctaaggtagccggcggcgtgagcaatgtccgggctcgtgttcaccagataacgcagcccaccgatggtgctgtagtagctcgtcaagttcaccggcggacttgaactagctttactcaatttttttgaggcagagtacatcgccgccacggccgccgcctaccaagctgtctggctctcttgactcttgagtgacttgctcgactcggagatcggagcgccggagatcaatgtggacaacaagtccatcattgcaatgaccaagaaccccgttttccatgaccggagcaagcacattgacacccgataccatttcatccgggagtgcgtggagaacgggaatatcgtcatcaactacgttcgcacggaggagcagctgacggacatactgacgaagccactcggccgtgtttgattccaggagctgtgcaacggtatcgacattgctgagctcagtggcgatggcggcaagaattaggggggagaatgtcgaagtaatccatggcgccatcggctatttgttgctctagttatccactaagcggttgattccgagtttgttggatcatggcgcatgtatagctctgacgcatgctgtgttcatgcgggagtttgtttcgtttttccgttttctagggagtgtgtgtgccctgcatgttcttcgatcgtgggatggtgcgatcacctcgggagatatggctggggtgcctggttagtaggaacgcatggcgcacacctcagtcttgggatgccacgatctagtcagaggtgggagacgtgtgtatgtttgttatttaagttccctaatgcatcagaaaatcgctgccaagttcattgcaacataaaacctcgctttctcgcttgctctgttttctcgcttgctctgttttgatcggcatttcgtcgaaccccttcggaagttcgccaacagtagtgatatatgagatgtgtagtgcattccacgagatccatatgtgcattttatcacgagatcgacgaccacgcggcggccgggggccttggctcgatctcgccgtcgtcgtccactccgagaacgaccgaatgattgcgtccgtcctgctcagctcgcgctccaatcttcttttgtctcagctttgtctggcccttcttttttttttcttttgcctttttgaactgatgtttgtcttactcttaaccctctgcatgcgctaggcgattatacgattgatccatccaaattatgcaacagatcacagcaatgtaactagaaaggttttaagcgcgctcaaataaaggtgtaaggttgtgtaatggattaaccattcgtgtttgtctataagtgggttggtgagtcagcccatttacacctctatacttaaatctaattgtatgacacgtatatttgttataaaaaaatattttcaatcattacaataacattgaaattatattgcgcgagtggccgtctagggttattgggtggtggctccgttattgcaaacaccaaacagagatgtatatatttagaagaagctttattttcaagttggatgaactatttttaactctcaagagctcatgtccttatatctttttcccatagtccaagcagtcataaataaatatgaaaaagaattgatgtgtcttaatatgagtattaacaagaatttttttgccagaaaaaaaatgtattacctattaactaaatttagccaagtcatttaaaaaaaataatagtttttgaatttctcttatgtatgctttgattataaccgtctacaccataagtcctaagaagaataccctaagtcctaagaagaaaaaaaaatgtattacctattaactaaatttagccaatcatttaaaaaaaataatagtttttgaatttctcttatgtatgctttgattataaccgtctacaccataagtcctaagaagaataccctaagtcctaagaagaataaactttcgttcccagaagttagttttt

SEQ ID NO: 14297 - DNA, 8934 bp, Oryza sativa
caagaaatggaggttccatatagtgaatagcgatgcactaccagtggttgagctagggtccccatcgttcttaggcaattaagtagctctttactaatgaatatgaatttgcctcaattaatgtttatttttagcaaagttgcttattcgagggttgaccactatgacaataaaaaatatttccttagagaagggctgggcttgagttaacctatgatccttatatgaccccttttttataaacgcatacaagagtcaaagatgatagacttgtacctgctctattgctcataacctttttttctcccatcctttcgtcaaaacaagcaggtcgagtttcgagtgcaaagcctatcgcctctaacttttagtatgtcgatgggctatacccaacaatggtatttctatagtattggggatattagggggtgtttggttgattgcttcactttgccacgccacacttcagtcatgccacagttttttagacgtgtgtttgtttcaatgcgacagttgtgtcatgccacactttcctacccttaggtcccacatgtcatactcagataactagagctaacattgccacacttgtgactaactatttcttggccatacttttaccacatgccacaacttgcctaagcttagttatggcaagcttaggcatcaaccaaacaacccctaagactataggtatacatgagattgtagtaaagagatggaagacaaggattattatatagattcgagctctctactaatgggtaacagctttactcttgttggctgaagccggtcgtattgctattatatatcacaatctctcacaagtgcaatagagaggagaacctaatctagtatgatagtatagcagcgtaaatcgaacaggtggtcgacggctaagctgttgttggctacacaagtactcttgtatagtgtatcccgtatttaagacactgaaataatcatattttcgtcgagaagaacgtgcaaggaacgaatcgtacattgagttcactaggcaaaatggcatccatgccaacgactaaggagaagagtgtttgaccaatggctatgcagattgatgtccaataagctagagagccttgtcggagcgattgcatgccaaactagctagcctaggaactggctgatttgccactgtgcaccaggccaccaaaggtggaggagctagctagagaatattaattaatatataatatcatatgtgataaaatatgcaagtaccacctcatcagttgtagagctagtaaagctactatctttgggaacctatggaagctgtagattgtagaatgtgctccataaatcctccacatgcatgcattacgattatcacaatggggagaatggctctgacatcccaaaataatactcatgatctcagcatcagagtagtacataaatgtcaccagagttaaacaacaacacaatgtatttctctttctcatgagcacgattaattcataagatactttttaagctagacacagataaaacacatgaagaatttaaactagcccctccaattccacttccattgtatcccggccgagatcgattatacatgtgtacacccatacatatatctatcaccccattgtgcactgaaaggtttagtactagtaaaaacctctcaaagcacccaacacatatgcaacaaaattaagtaacatccaaacaaataaaaacatatatatatatatatatatatatatataagggatacataaaactctccctctaccttggaaatcccatgtttcaaattttctccttcctttaattttgatttccctcatgcacacaccataacaccaaaaagaagatccaaactctaagttttttttaagtcggctatatatagctttataactatactaatataagttgagttgcataagcaagagcatggatatttcatgctacttctgatgaggctgcaggaattaatggatggatcgatgatcgacttgagtttttaccagccactagaattgaaggaaccttgctgatcatgtgcactgatcatccgctgcctcttgatgctcccaccgccgccgccggcgccggaagaggaggtgtcgctgctcgccgctttgcggttcatgacgccgcgcagcgcctcgtggatcgacgcgacgagctcgtgcctccggtgcgaggcggcaacgccgtagccgtgttcgccgtcgtcgtcgttcccggcctcgtctggatcttcctcctcgacggcggcgatgaggaggacgctgcggacgcggccgccgagcgtggcgatctcggcgcggcgggcgcgcagccggagcgcggcgagcgcgcgggcgatgcccgggatgaggtcggcgcggtcctcgcagcacagcgaggccctcgccacgagcctccctccctcgtccgccgccgcgtccacctccagctcgtcgtcctccgtcggcagcagcaccaccggcgccgccgccgcctcccctcccgcggcgccgtcctccatcatcgccgacgtctgccgcttcagctccttgacgtgctcgatcacctccgccagcagcgacgccttgtccgtctgcaaacaccacaaaacacacaaacaccaatcagtgctcgatccgtcagctcagctcgcgccatcattagagaggtctcaagctttgggcgcatgctgcagaacacagcgtgcagtggctggcactagctaagtgtagtggaggtagctaggtaggaaggagaggagggagaagagacggggaagctgagtagtagtagtggaggaggtgcatgcgaggatggaggaaaagctacaaaaatcgcgggggccgtggcgcggcgtggcgtggcgtggcgtggcgcagcctttgcatgcgcgcgcgcacggcgcggcgctctggatcgccttttggggagcgcgctctggcacgggcgtgcgcgcttgtcgcgccgcgccgcgcgcggcgagagcgagagcactctccccgacgaatccaaaggcttctctgctgcatctgcatgcgccaaactgatctctgcacaaattccttcctttattttttcttcttgtccatgtcagtgtatcagcatgcaaatgctctatatctatactactgggtgatctctacattggagcttagcttttggctttggtactcctatgcccaccacaccttgtctcttgccccccttaggttttggcttaggttacttaccattatgaaaatatggacattgtttgattggaacgcatgaattttacggaactaaatataatataattgaaattgtcgtgttttctgtacaatgattaatctttgatctaactttacacgattatttacaattaaaattgttgtgttttttatgatgattaatctttgatctaaaacgcatggattttacaaaattatgtaccatgaaaacaaggttgttttatgtatgatgatcaatattgagttcctttgaaaagagagagtgaataggtagcttaagttttgtgtttgtgagagggtcatcatatatggtgtgacaatataattgccttggggaaaataattgaacacagtacatgagatggatcaaaaggcaaattaagataggaaagaacatgcatggttcctttgattcaagcatgtaatcatgctatgtgggttagttttgttgcaagacctaagtaagtacatgtagagttgcctccccaagaagctacctaagctaataggcagctactaagctactagatctgacttctcctttgctcgtaccacttctcaattaagtttttaattggtctgtttaattacttcgatcatcgattgtatatttttgacttggttataatcagtagtatatatatctagatcttctgataatctgaatcgattgtgcatcaaaaccatgcatcccagtttggttagggtttggacatgagcatgtcgaactgatgatcatcatccataggggaagaaggaaggtttggttagttaattaattaattcgattagtgcactgtgagattgtgagaagctgcacatgtagtaatatgtgagaaataatcatgtattcatggaggagatcgcctgaccttggtggtgttggggaggaggctgcggagcctggcgaggtggccgttgatgcgctggcggcggcggcgctcggcctcgctgtggctgcgcgacgccgccagcgccttggcgtccatgatctccttcgccgtcatcctcccgagctccgcctgcagcgtcccgagcagcccggacaccaccatcctcgacgacgacgaacccccgccgcccatctgcatcatcgtcatcggcggcggcgcctccatcccgtactgatgatgatgaggatggtgattatgccccgccacgcctccgcctccgtcgaagtagaagggctgctccaccggcagctgctcgccggcggcgaagggcgccgctgccgctgctgccgggggcatgtagagcggcgcggccgcggccgagccgggccacggcaggagagccgtgccgtcgccgccgcctacagcttcccacatctccaccacaacaaccaaaccaaccaatcagctgatcaattaccttcttggatcgatcgagttcttggctcttcttgctgatgcttcttctttcgttgagctaattaataaactcgatcgtgcgcatcgatggatcgatctatgcaacaaccttttcttgctttttcttcttctactactactacaactcgcagcagcagctgttctagcttttcatcagtcaaagggaagaagggggggttttaaactgatgggtgtgtcgagtcgacctgcgcactgcgcaacatggaatggatagcttttttctttcttccccaagtgtggccttttcgcattcgcaccggttgtcgggtactagtggtagtggtggtcgagagagaaagagagagtgagagacggctaagctaagcatgagctagctagggctcctcaactcagatcgtgtacggcactggagctcctctctgtctgcctcatctttgtgctagcttgcagttgcagcttgggacagatagtataatgacgcttgattacgctgtaatgtaaagggagccacgtaagagaaaccagtccggtttagggatgtaaaaagtgtactggacggtttcgagagttcaggccatggagcatccagtttggaagcttatagggtctgtttgatactcaggttgtgttacagctctatctcttctcaggttgtgttcttctcaactttcccaacctctctttctacagctctatcttctttttttaaaaaaaaaactagtaatgtaacccgcgcgaacgcacgggaatgtgtatttgtttgttctaaaattaaacatacctagcaaattaatttcaaatttgtaattaagtcagatgtttctgaaaacgggcttatagaccttttcgtcttatgaaatcttataagaatttattaataaatgtattatgtgtatcatcaagctacccttcccctctagttcagatgtgtaggcatctgtctaaatttttaattataggtgacttttaattacctaaaatattatttgacaaccgatattggtaatcctttaaaaaatgtttatttataaaattatcaagatcaattctacaatgtatgcattagagagaaattaagttgcttagatatctaatagtgtgttatagcgggtgtaaaataaggtgtatttttaattatgttgcttgaaaggattatggtgtgtaccttaactatcttagagaaaaaaataagggaagatagggcaatagttgcgtgcggagaaccagaggcaggcacgtgtccattatgagaggaggggatggattagagatttcttgaaacttaaatctaatggctccaaataatggatacacctatttagtgaaaaatcaaaagtgagatattttcttttttctcatattttttctaatttattagagtgccacgtgacagtttaagaacgcttttaggtgctacgtgttaacgtaggatcgttcataggaagtttaaaatacttttagtatataatagaattaatgaagtattggattcgatacatcaccaaaatttaggcataatatattttatcaagtttccattagggaaacaaactaaactaacccaaaataatcatgttttcatgtgtgcagtagtgacattcatagctccttatcttatataccatttcagggttacagccctacctttttattgggccacgtggcaccacaattagaactaagtttggattctaggatcgagaagcagccacgtatttgcagcccttccgtagccgtccgattataatcaatgatggtggtgcagcgagcatgattggcttccgtagccgtccgattggaaatcaatgatggtggtgaaaatccattgcaccgacgactcgtacaaaggggatcgaggataagattattattattattattattattattattttgacattttcacatcggtgatttctagatgagctctttgagctttgctggcatgggaaaaaacgaagtgggtcaaaagcccaaagtgaggtagggatagatgtggcatttatttacttgatttgaaatttaatattttcaataaataatcataatcgtgactctatatgtgctttaaaaatatatatatggttaaaacgtaatttttgatttatgagcctactgaacgttttacatgcatggtttaacacaggcttgtcaaacctgttctttataagctcgtattatcgaacatgcaaccaaaattatttaatctataatcctataaatcttcgcataaatatcacaccctctattttctaaatagacgacgccgttaaattttgacataatatctaaccacacatgtattgtaaaaaattatgtgttatttgttgtgactttatttttattattgaaaaactataagcatgacatatagcaccaaaatcgggaattaaaatatcgttcaaatgcacagaggctaactagcatgctcgccactttttttaggagtatattatatttctcagtcaaaagtaaaagaagattaacttaaaaaaaagagcaagggaaatataccacaactactattgaataccgaaaaatgagaattaaaacattgttaaaatgcatcatactacatatccaaatagtaggtgcgaggtgcgcggtgcgccaataggcgcaccaattttcttgtgcatgtcactagggtccgacagctggcactgccatgctctccatttgggaccatttccctcctccattccctaccattgagttatttttcagatcatttggcttccaaaatttctcatagtttttaagttggtccccctctcctctctctctaccttatagactgtgttcggatgttgaagttgggaactaatccctcacgcacgtaaaacagaacaactcattagcatataattcattaggtactggctaacttttttaaagaaatggattaacatattttttaaagcaactttcatatagaattttttttaaaaaaaaacacacctgccgtttaataatttgggaagcgtgtgcatggaatacaaagatgtgagttgggaacctcaagcaaagaactcagccagaaatccttggttacaatcagaggtattaacagctcacaaataatttcatttctcataccatgaattaaaattgatatcctctactaaccaattttacaagtatgtacttaagccgtacgtcggcaattccattctttgtgtattatgaaaaagtttatggtactaataataatgaatgatgtgttcaaatgggtattacagtatcatatccaattaccagcttggtgatgacaaaacagtcctattatatatgcagattaatttaagtccaaatccaatagaaacttagggacattataaaaacccacaggttgcgaatgcccatatatatctttttagcaaatctatctcttctccattactctttactcaacactcttctataattccttgattttgttttagcttataatcttgaatttgacttatctaaaaaaaatttattgagttatcttcaccattaagtaaaacctaaaaacttaattaattactaatcaggaaatgcatagtcctagcatgaggcttcctcttgggccttaacatgaaagtgagctgcaattttttttcatttcatagtatgtggttatttggcattccatatttaaacttgaggcctatgactataatatcgtaatgactgttacatacaccaattaatttgagacagacgacgagcactttgcttatattccaaaaagaaattcctgtgttcttccacgtatatatttttctctagccaatcaaggagtaattaaaagatttgacaatgatatatatcctatgtcggccggtgacccggtcggccggccggccggagtagcagcagctgcatgctgccgaccacgctgcctgcctgcctttccaatccgcgtaccgtaaaaagtgtatatttttggtttttcattttaacctttgactcttcgtattttttaaatcttttaagattattatttctattgttattaaattataaaacataaatattacttaatgtgcgactaatcttttttttataaaattttaaaataaaataaacagtcaaatgtattttctgtgagatggagagaggaggacacggagagaggaggacgtagctcttgaaaagctactgctgcattcgcttaccctagttctcaactccctcctctcgtttttcgcgcgcatgcttttcaaactgctaagcggtgtgttttttaaaaaaagtttcatattgatccattttttttaaaaaaaagtttatacttaattaatcacgtgttaatgcaccgctcagttttctgtgcacaggatatgggttcc

SEQ ID NO: 14298 - DNA, 648 bp, Oryza sativa
tagaatcacaatggcacctcaagctcttctcttccagaacctcaagtttttcatttgcgtcgtgcagtttctggttcacggtgttgagctcatcctcaagctcaagaactctctggtgcaatgtgtaggcaatgccatcatcctcaccatcttcagactttgcatcagattctgactgtgaagccaaatcctcaggctccttccttgaggccggtgagggtgagccattgctcttgttggacaggaagacgtcgaaaccggcggcccttgggctctgctcccttgtccaggacttctgtggttcaggagatggtgagggtgacctctgcagctcagagtctgaacctgccaaggatccctgatactgcagccttgtagggatgttcttgcgcaattcaccagtgacattgtcgtatcgctcagctagagcacggtacatccggtagaaattttctgcatgggttatgagcaatgatcgcttctggtaggacatatgagcgttgttcgcgaaggtctagccatcttcttcaattaggtgcagcatttcattagcttggttgtccatttgtgcaataagtaaaaaggttcagggagagttagataaggctacagtatatatgaacaatagtaacaacgtacagcatagca
